(19) United States
(12) Patent Application Publication
(10) Pub. No.: US 2023/0272434 A1
(43) Pub. Date: Aug. 31, 2023

(54) GENOMIC EDITING WITH SITE-SPECIFIC RETROTRANSPOSONS

(71) Applicant: Massachusetts Institute of Technology, Cambridge, MA (US)

(72) Inventors: Omar Abudayyeh, Cambridge, MA (US); Jonathan Gootenberg, Cambridge, MA (US); Lukas Villiger, Cambridge, MA (US); Justin Lim, Boston, MA (US)

(21) Appl. No.: 18/047,685

(22) Filed: Oct. 19, 2022

Related U.S. Application Data
(60) Provisional application No. 63/262,714, filed on Oct. 19, 2021.
(60) Provisional application No. 63/371,246, filed on Aug. 12, 2022.

(51) Int. Cl. C12N 15/90; C12N 9/22; C12N 15/10; C12N 15/113; C12N 15/63

(52) U.S. Cl. CPC C12N 15/907; C12N 9/22; C12N 15/102; C12N 15/113; C12N 15/63; C12N 2800/80; C07K 2319/80

(57) ABSTRACT

Genome editing tools for use in systems designed to deliver large genetic elements are disclosed herein. A genome editing system is described, which includes i) an R2 element enzyme or other non-LTR site specific retrotransposon element and ii) a payload RNA, wherein the payload RNA comprises an insertion region and optionally one or more of a 5′ homology region, a 3′ homology region, and a protein binding element, wherein the insertion region comprises a template for a small or large nucleic acid insertion into the genome, and wherein the R2 element enzyme or other non-LTR site specific retrotransposon element comprises a targeting domain, a reverse transcriptase domain, and a nickase domain. Also disclosed are cells edited using such a genome editing system, methods for editing a genome, and compositions comprising cells edited with this genomic editing system.

### RELATED APPLICATION

[0001] This application claims the benefit of U.S. Provisional Patent Application Ser. Nos. 63/262,714 and 63/371,246 respectively filed on Oct. 19, 2021, and Aug. 12, 2022, and the entire disclosure of which is incorporated herein by reference.

### STATEMENT AS TO FEDERALLY FUNDED RESEARCH

[0002] This invention was made with Government support under Grant No. R21 AI149694 awarded by the National Institutes of Health (NIH) and under Grant No. R01 EB031957. The Government has certain rights in this invention.

### SEQUENCE LISTING

[0003] The instant application contains a Sequence Listing which has been submitted electronically in XML file format and is hereby incorporated by reference in its entirety. Said XML, copy, created on Oct. 18, 2022, is named 733339_083474-024_SL.xml and is 66,696,250 bytes in size.

### BACKGROUND

[0004] Genome editing systems have developed as a promising technology for the development of therapeutic tools. Systems such as CRISPR/Cas9, TALEN, and zinc finger proteins have been used to alter the genomes of organisms. However, these systems are limited by a number of factors, including size, cargo capacity, and targeting ability.

[0005] Retrotransposons are mobile elements that insert themselves into the genome of a host through an RNA intermediate. This is in contrast to the mechanism of most DNA transposons, which directly insert themselves into a host genome. Retrotransposons are categorized as long terminal repeat (LTR) retrotransposons and non-LTR retrotransposons.

[0006] Non-LTR retrotransposons are among the most frequently occurring transposable elements in the eukaryotic genome. They can be either randomly inserting or site-specific. Site-specific non-LTR retrotransposons are generally characterized by the presence of specific activity—reverse transcriptase activity, DNA nicking activity, and nucleic acid binding activity. The genetic loci for these activities are found in either a single open reading frame (ORF) or split between two ORFs. The DNA nicking activity of single-ORF systems is found with restriction-like endonuclease (RLE) domains. Multiple non-LTR retrotransposon families, such as the R2, R4, R5, R8, R9, Dong and Cre families, are categorized as RLE containing non-LTR retrotransposons.

[0007] Of the known non-LTR retrotransposons, the most well studied is the R2 element. The R2 element is comprised of R2 RNA and the R2 protein. The R2 element contains a single open reading frame (ORF), which encodes a reverse transcriptase, an endonuclease, and includes DNA binding regions and zinc finger motifs. R2 element. R2 inserts itself into a host genome through a mechanism known as Target Primed Reverse Transcription (TPRT), which is a stepwise reaction including a first nick of host DNA, reverse transcription of the R2 RNA into the first strand, a second nick of host DNA, and synthesis of a second strand.

[0008] The mechanism by which the R2 element inserts into a host genome, being independent of endogenous cellular repair pathways, as well as the capacity to carry an RNA molecule of varying sizes to a host genome, makes the R2 element a potentially powerful genome editing system. However, the R2 element specifically inserts itself into either the 28S or 18S ribosomal RNA locus. Therefore, it lacks the ability to target insertions to a particular locus, which is a critical aspect for viable genome editing systems. Other site-specific retrotransposons are similarly limited to particular loci. There remains an unmet need for a genome editing system that is capable of directed insertion of large nucleic acids into a host genome.

### BRIEF SUMMARY

[0009] The present disclosure is directed to a genome editing system comprising: i) an R2 element enzyme; and ii) a payload RNA, wherein the payload RNA comprises an insertion template and optionally one or more of a 5′ homology region, a 3′ homology region, and a protein binding element, wherein the insertion template comprises a sequence for a nucleic acid insertion into the genome, and wherein the R2 element enzyme comprises a reverse transcriptase domain, and a nickase domain.

[0010] In some embodiments the R2 element enzyme further comprises a targeting domain. In some embodiments the targeting domain is a natural targeting domain or an engineered targeting domain. In some embodiments, the nucleic acid insertion into the genome is a DNA or RNA insertion template. In some embodiments, the R2 element enzyme is a modified R2 element enzyme. In some embodiments, the coding sequence of the R2 element enzyme is modified. In some embodiments, wherein the modified R2 element enzyme is modified by an N-terminal or C-terminal truncation of the R2 element enzyme sequence. In some embodiments, the modified R2 element enzyme comprises a linker. In some embodiments the linker is an XTEN linker.

[0011] In some embodiments, the genome editing system targets a genomic locus. In some embodiments, the genome editing system targets a genomic locus other than the 28S rRNA locus. In some embodiments, an N-terminal zinc finger domain of the R2 element enzyme is modified to target a genomic locus other than the 28S rRNA locus. In some embodiments, a non-naturally occurring targeting region is fused to the N-terminus of the R2 element enzyme or inserted into the R2 element enzyme.

[0012] In some embodiments, the modified R2 element enzyme is a fusion protein. In some embodiments, the modified R2 element is fused to a Cas9 protein that is fully active, catalytically dead (H840A/D10A for SpCas9), or functioning as a nickase (H840A or D10A for SpCas9). In some embodiments, the modified R2 element is fused to a Cas12 protein that is fully active, catalytically dead, or functioning as a nickase. In some embodiments, the modified R2 element is fused to a TALEN protein, zinc finger protein, argonaute, or meganuclease protein.

[0013] In some embodiments, the genome editing system further comprises a guide RNA. In some embodiments, the 5′ homology region of the payload RNA is engineered to target a genomic locus other than the 28S rRNA locus. In some embodiments, the 5′ homology region, the 3′ homology region, or both the 5′ and 3′ homology region target an exogenously introduced landing sequence.

[0014] In some embodiments, the insertion region is introduced into the genome of a specific cell type. In some embodiments, the specific cell type is a post-mitotic cell. In some embodiments, the genome editing system functions in post-mitotic cells. In some embodiments, the genome editing system functions independently from intrinsic nucleic acid repair systems.

[0015] In some embodiments, the payload RNA template further comprises a 5′ untranslated region (UTR), a 3′ UTR, or both a 5′ UTR and a 3′ UTR. In some embodiments, the 5′ homology region and the 3′ homology region are located between the 5′ UTR and 3′ UTR. In some embodiments, the 5′ homology region and the 3′ homology region are located outside the 5′ UTR and 3′ UTR. In some embodiments, the payload RNA further comprises a 5′ untranslated region (UTR), a 3′ UTR, or both a 5′ and a 3′ UTR, wherein the UTRs are truncated. In some embodiments, the payload RNA does not comprise a 5′ UTR. In some embodiments, the payload RNA does not comprise a 3′ UTR.

[0016] In some embodiments, the payload RNA further comprises a nuclear retention element. In some embodiments, the payload RNA further comprises a Cas9 or Cas12 guide RNA, wherein the Cas9 or Cas12 guide RNA comprises an extension with a 5′ homology sequence, a 3′ homology sequence, a 5′ untranslated region (UTR), a 3′ UTR, an insertion template, or any combination thereof. In some embodiments the nucleic acid insertion template is a sequence of greater than 1000 base pairs.

[0017] In some embodiments, the R2 element enzyme comprises a nuclear localization signal (NLS).

[0018] In some embodiments, the insertion region comprises a template for a reporter gene, a transcription factor gene, a transgene, an enzyme gene, or a therapeutic gene.

[0019] The present disclosure is also directed to a method of inserting a large nucleic acid into a genome within a cell using a Cas9 or Cas12 fusion protein, wherein the method comprises supplying a Cas9 or Cas12 fusion protein to a cell, wherein the Cas9 or Cas12 fusion protein is supplied with a payload RNA template, wherein the RNA template is reverse transcribed by the Cas9 or Cas12 fusion protein prior to being inserted into the genome of the cell; and wherein the large nucleic acid is inserted into the genome of the cell.

[0020] In some embodiments, the Cas9 fusion protein comprises a Cas9 portion and an R2 element portion. In some embodiments, the Cas9 fusion protein comprises a targeting domain, a reverse transcriptase domain, and a nickase domain. In some embodiments, the Cas12 fusion protein comprises a Cas12 portion and an R2 element portion.

[0021] The disclosure is also directed to a method of inserting an exogenous nucleic acid into the genome of a post-mitotic cell, wherein the method comprises subjecting the genome of the post-mitotic cell to a modified Cas9 protein that inserts the exogenous nucleic acid into the genome of the post-mitotic cell. In some embodiments, the modified Cas9 protein is fused to an R2 element enzyme. In some embodiments, the modified Cas9 fusion protein targets an endogenous landing site. In some embodiments, the Cas9 fusion protein targets an exogenously introduced landing site in the genome of the post-mitotic cell.

[0022] The disclosure is also directed to a method of editing a genome comprising subjecting the cell to the genome editing systems described above.

[0023] The disclosure is also directed to a composition comprising a cell edited by the genome editing systems or methods of editing genomes described above.

[0024] The disclosure is also directed to a genome editing system comprising: i) a payload RNA, wherein the payload RNA comprises an insertion template and optionally one or more of a 5′ homology region, a 3′ homology region, and a protein binding element, wherein the insertion template comprises a sequence for a nucleic acid insertion into the genome; ii) a non-LTR site specific retrotransposon element enzyme; wherein the non-LTR site specific retrotransposon element enzyme comprises a reverse transcriptase domain and, optionally, a nuclease or nickase domain, and wherein if the non-LTR-site specific retrotransposon element enzyme does not comprise the optional nuclease or nickase domain, the genome editing system further comprises iii) a nuclease or nickase enzyme. In some embodiments, the nuclease or nickase enzyme is a programmable nuclease or nickase. In some embodiments, the non-LTR site specific retrotransposon element enzyme further comprises a targeting domain. In some embodiments, the targeting domain is a natural targeting domain or an engineered targeting domain.

[0025] The disclosure is also directed to a genome editing system where the non-LTR site specific retrotransposon comes from the R1, R2, R4, R5, R6, R7, R8, R9, CRE, NeSL, HERO, or Utopia families, or from the 9 family classifications established for RLE domain containing nLTR retrotransposons (FIG. 24C).

[0026] In some embodiments, the nucleic acid insertion into the genome is a DNA or RNA insertion template.

[0027] In some embodiments, the non-LTR site specific retrotransposon element enzyme is a modified non-LTR site specific retrotransposon element enzyme. In some embodiments, the coding sequence of the non-LTR site specific retrotransposon element enzyme is modified. In some embodiments, the modified non-LTR site specific retrotransposon element enzyme is modified by an N-terminal or C-terminal truncation of the non-LTR site specific retrotransposon element enzyme sequence.

[0028] In some embodiments, the modified non-LTR site specific retrotransposon element enzyme comprises a linker. In some embodiments, the linker is an XTEN linker.

[0029] The genome editing system of the disclosure targets a genomic locus. In some embodiments, the genome editing system targets a genomic locus other than the 28S rRNA locus. In some embodiments, an N-terminal zinc finger domain of the non-LTR site specific retrotransposon element enzyme is modified to target a genomic locus other than the 28S rRNA locus. In some embodiments, a non-naturally occurring targeting region is fused to the N-terminus of the non-LTR site specific retrotransposon element enzyme or inserted into the non-LTR site specific retrotransposon element enzyme.

[0030] In some embodiments, the modified non-LTR site specific retrotransposon element enzyme is a fusion protein. In some embodiments, the modified non-LTR site specific retrotransposon element is fused to a Cas9 protein that is fully active, catalytically dead (H840A/D10A for SpCas9), or functioning as a nickase (H840A or D10A for SpCas9). In some embodiments, the modified non-LTR site specific retrotransposon element is co-delivered with a Cas9 protein that is fully active, catalytically dead (H840A/D10A for SpCas9), or functioning as a nickase (H840A or D10A for SpCas9). In some embodiments, the modified non-LTR site specific retrotransposon element is fused to a Cas12, IscB, IsrB, or TnpB protein that is fully active, catalytically dead, or functioning as a nickase. In some embodiments, the modified non-LTR site specific retrotransposon element is delivered in trans with a Cas12, IscB, IsrB, or TnpB protein that is fully active, catalytically dead, or functioning as a nickase. In some embodiments, the modified non-LTR site specific retrotransposon element is fused to a TALEN protein, zinc finger protein, argonaute, or meganuclease protein.

[0031] In some embodiments, the disclosure further comprises a guide RNA. In some embodiments, the disclosure further comprises multiple guide RNA.

[0032] In some embodiments, the genome editing system of the disclosure comprises a payload wherein the 5′ homology region, the 3′ homology region, or both the 5′ and 3′ homology region of the payload RNA is engineered to target a genomic locus other than the 28S rRNA locus. In some embodiments, the 5′ homology region, the 3′ homology region, or both the 5′ and 3′ homology region target an exogenously introduced landing sequence.

[0033] In some embodiments, the insertion region is introduced into the genome of a specific cell type. In some embodiments, the specific cell type is a post-mitotic cell, a non-dividing cell, or a quiescent cell. In some embodiments, the genome editing system functions in post-mitotic cells, non-dividing cells, or quiescent cells. In some embodiments, the genome editing system functions independently from intrinsic nucleic acid repair systems.

[0034] In some embodiments, the payload RNA template further comprises a 5′ untranslated region (UTR), a 3′ UTR, or both a 5′ UTR and a 3′ UTR. In some embodiments, the 5′ homology region and the 3′ homology region are located between the 5′ UTR and 3′ UTR. In some embodiments, the 5′ homology region and the 3′ homology region are located outside the 5′ UTR and 3′ UTR. In some embodiments, the payload RNA further comprises a 5′ untranslated region (UTR), a 3′ UTR, or both a 5′ and a 3′ UTR, wherein the UTRs are truncated. In some embodiments, the payload RNA does not comprise a 5′ UTR. In some embodiments, the payload RNA does not comprise a 3′ UTR. In some embodiments, the payload RNA further comprises a nuclear retention element. In some embodiments, the payload RNA further comprises a Cas9 or Cas12 guide RNA, and wherein the Cas9 or Cas12 guide RNA comprises an extension with a 5′ homology sequence, a 3′ homology sequence, a 5′ untranslated region (UTR), a 3′ UTR, an insertion template, or any combination thereof.

[0035] In some embodiments, the nucleic acid insertion template is a sequence of greater than 1000 base pairs.

[0036] In some embodiments, the genome editing system targets a genome for a deletion. In some embodiments, the deletions are between 1 and 150 bases.

[0037] In some embodiments, the non-LTR site specific retrotransposon element enzyme comprises a nuclear localization signal (NLS).

[0038] In some embodiments, the insertion region comprises a template for a reporter gene, a transcription factor gene, a transgene, an enzyme gene, or a therapeutic gene.

[0039] The disclosure is also directed to a method of inserting a large nucleic acid into a genome within a cell using a Cas9 or Cas12 fusion protein, wherein the method comprises supplying a Cas9 or Cas12 fusion protein to a cell, wherein the Cas9 or Cas12 fusion protein is supplied with a payload RNA template, wherein the RNA template is reverse transcribed by the Cas9 or Cas12 fusion protein prior to being inserted into the genome of the cell; and wherein the large nucleic acid is inserted into the genome of the cell. In some embodiments, the Cas9 fusion protein comprises a Cas9 portion and a non-LTR site specific retrotransposon element portion. In some embodiments. the Cas9 fusion protein comprises a targeting domain, a reverse transcriptase domain, and a nickase domain. In some embodiments, the Cas12 fusion protein comprises a Cas12 portion and a non-LTR site specific retrotransposon element portion.

[0040] The disclosure is also directed to a method of inserting an exogenous nucleic acid into the genome of a post-mitotic cell, wherein the method comprises subjecting the genome of the post-mitotic cell to a modified Cas9 protein that inserts the exogenous nucleic acid into the genome of the post-mitotic cell. In some embodiments, the modified Cas9 protein is fused to a non-LTR site specific retrotransposon element enzyme. In some embodiments, the modified Cas9 fusion protein targets an endogenous landing site. In some embodiments, the Cas9 fusion protein targets an exogenously introduced landing site in the genome of the post-mitotic cell.

[0041] The disclosure is also directed to a method of editing a genome comprising subjecting the cell to the genome editing system as described herein. The disclosure is also directed to a composition comprising the cell edited by the genome editing methods described herein.

[0042] The disclosure is also directed to a method of correcting a genetic mutation related to disease or human pathology, wherein the method comprises making small nucleotide changes or small nucleotide insertions (1-100 bp) in a human genome using the genome editing system of claim 1 or claim 47.

[0043] In some embodiments, the genome editing system is delivered via single or multi vector AAV, adenovirus, lentivirus, herpes simplex virus, PEG10 viral like particles, PNMA viral like particles, gag-like viral like particles, nanoblades, gesicles, or Friend murine leukemia virus (FMLV) viral like proteins.

[0044] In some embodiments, the components of the genome editing system are delivered as all RNA in lipid nanoparticles or another RNA delivery reagent. In some embodiments, wherein the non-LTR site specific retrotransposon is delivered as mRNA. In some embodiments, the guide RNAs are delivered as synthetic RNA. In some embodiments, the payload is delivered as mRNA.

[0045] The disclosure is also directed to a genome editing system targets and edits the genome at more than one site.

### BRIEF DESCRIPTION OF THE DRAWINGS

[0046] FIG. 1 is a visual depiction of PCR products isolated on an agarose gel following amplification from isolated DNA from HEK293FT cells which were transfected with two plasmids, showing insertion of R2 into the human genome. Lane 1 displays a molecular weight marker. Lane 2 displays PCR products from cells transfected with an R2 plasmid, encoding an R2 derived from the zebra finch (Taeniopygia guttata) R2 element (R2Tg) with an eGFP payload. Lane 3 displays the PCR products from cells transfected with R2Tg alone. Lane 4 displays the PCR products from cells transfected with eGFP payload alone. Lanes 5 and 6 display the PCR products from cells transfected with R2 orthologs from Geospiza fortis (Gfo) and a long Gfo payload (Lane 5) or short Gfo payload (Lane 6). Lane 7 displays PCR product from cells transfected with an R2 ortholog from Geospiza fortis alone. Lane 8 displays PCR product from cells transfected with only long Gfo payload. Lane 9 displays PCR product from cells transfected with only short Gfo payload.

[0047] FIG. 2 is a graphical depiction of luminescence readout from HEK293FT cells transfected with 3 separate plasmids: the first containing an R2 protein encoding region, the second containing an inactive luciferase reporter region (containing the promoter region and a first of two artificial and inactive luciferase exons followed by a chimeric intron) with R2 landing sites (the landing site is placed in an intronic region that is spliced out after insertion of the payload carrying the second of two artificial exons) of variable length, and the third containing a luciferase portion of a payload, 5′ and 3′ UTRs as well as regions homologous to the landing sites. The x-axis labels represent variable landing sites, named according to the number of base pairs (bp) present on the landing site on either side of the insertion; 38/10 therefore, represents 38 bp upstream of the insertion site and 10 bp downstream of the insertion site. Columns 11 and 12 display the luminescence readout of two negative controls, AAVS1_target (non-target) and CFTR_target (non-target).

[0048] FIGS. 3A and 3B are graphical depictions of the tolerability of mutations of the landing sites with respect to R2 integration in HEK293FT cells. HEK293FT cells were transfected with 3 separate plasmids: the first containing an R2 protein encoding region, the second containing a luciferase reporter region with mutated or wild type R2 (28S) landing sites in the intronic region that follows the first of two luciferase exons, and the third (payload) plasmid containing the second exon necessary for luciferase signal after insertion and splicing of the reporter plasmid. Additionally to a small intronic sequence upstream of the second of two artificial luciferase exons (minimal cargo necessary for luciferase signal), the payload plasmid has 5′ and 3′ UTR sequences as well as 5′ and 3′ homologies (100 bp homology to the 28S locus on either side). FIG. 3A displays the location of certain mutations within the region flanking the insertion on the insertion region plasmid. Figure discloses SEQ ID NOS 33523-33534, respectively, in order of appearance. FIG. 3B is a readout of luminescence from HEK293FT cells transfected as above. The y-axis represents the specific plasmids containing altered landing sites introduced into the specific cell, with each name representing the number of base pairs (bp) present on the landing site on either side of the insertion; 37/23 therefore, represents 37 bp upstream of the insertion site and 23 bp downstream of the insertion site. A 115/115 negative control (transfected cell with no plasmid expressing R2).

[0049] FIGS. 4A and 4B are graphical depictions of the tolerability of mutations of landing sites with respect to R2 integration in HEK293FT cells. HEK293FT cells were transfected with 3 separate plasmids: the first containing an R2 protein encoding region, the second containing a luciferase reporter region with mutated or wild type R2 landing sites and the third (payload) plasmid containing the second exon necessary for luciferase signal after insertion and splicing of the reporter plasmid. Additionally to a small intronic sequence upstream of the second of two artificial luciferase exons (minimal cargo necessary for luciferase signal), the payload plasmid has 5′ and 3′ UTR sequences as well as 5′ and 3′ homologies (100 bp homology to the 28S locus on either side). FIG. 4A displays the location of certain mutations within the region flanking the insertion on the insertion region plasmid. Figure discloses SEQ ID NOS 33535-33546, respectively, in order of appearance. FIG. 4B is a readout of luminescence from HEK293FT cells transfected as above. Target_37_23_mut_10 (red box) has full mutations of all three, predicted zinc finger binding sites.

[0050] FIG. 5 is a graphical depiction of the effect of aphidicolin on the integration of a luciferase payload into a target region. HEK293FT cells were transfected with 3 separate plasmids: the first containing an R2 protein encoding region, the second containing a luciferase reporter region with R2 landing sites, and the third (payload) plasmid containing the second exon necessary for luciferase signal after insertion and splicing of the reporter plasmid. Additionally to a small intronic sequence upstream of the second of two artificial luciferase exons (minimal cargo necessary for luciferase signal), the payload plasmid has 5′ and 3′ UTR sequences as well as 5′ and 3′ homologies (100 bp homology to the 28S locus on either side) Cells were then treated] with either Dimethyl Sulfoxide (DMSO) or aphidicolin at a concentration of 1 μm, 5 μm, or 25 μm. Homologous sequences in the insertion region were either 60 bp or 40 bp long. Columns 9-12 are cells treated with either DMSO or aphidicolin and transfected with negative control plasmids.

[0051] FIG. 6 is a graphical depiction of the effect of aphidicolin on the integration of a luciferase payload into a target region. HEK293FT cells were transfected with 3 separate plasmids: the first containing an R2 protein encoding region, the second containing a luciferase reporter region with R2 landing sites, and the third (payload) plasmid containing the second exon necessary for luciferase signal after insertion and splicing of the reporter plasmid. Additionally to a small intronic sequence upstream of the second of two artificial luciferase exons (minimal cargo necessary for luciferase signal), the payload plasmid has 5′ and 3′ UTR sequences as well as 5′ and 3′ homologies (100 bp homology to the 28S locus on either side. Cells were then treated with either Dimethyl Sulfoxide (DMSO) or aphidicolin at a concentration of 1 μm, 5 μm, or 25 μm. The insertion regions of the plasmids are flanked by either 300 bp, 200 bp, or 100 bp. Columns 13-16 contain a 300 bp flanking sequence in the insertion region and were simultaneously transfected with a plasmid without an active R2 enzyme. Columns 17-20 were solely transfected with a Cas9 plasmid.

[0052] FIG. 7 is a visual depiction of a heatmap showing the luminescence readout of HEK293FT cells transfected with 3 separate plasmids. The first plasmid contained an R2 protein encoding region, the second plasmid contained a luciferase reporter precursor region with R2 landing sites, and the third (payload) plasmid containing the second exon necessary for luciferase signal after insertion and splicing of the reporter plasmid. Additionally to a small intronic sequence upstream of the second of two artificial luciferase exons (minimal cargo necessary for luciferase signal), the payload plasmid has 5′ and 3′ UTR sequences as well as 5′ and 3′ homologies of different length (from 0 to 100 bp homology in steps of 20 bp).

[0053] FIG. 8 is a graphical depiction of the effect of modification of UTRs on the luminescence readout of transfected HEK392FT cells. HEK293FT cells were transfected with 3 separate plasmids. The first plasmid contained an R2 protein encoding region, the second plasmid contained a splice luciferase reporter region with R2 landing sites 26/22 bp, and the third (payload) plasmid containing the second exon necessary for luciferase signal after insertion and splicing of the reporter plasmid. Additionally to a small intronic sequence upstream of the second of two artificial luciferase exons (minimal cargo necessary for luciferase signal), the payload plasmid has 5′ and 3′ UTR sequences that are truncated in different ways as well as 5′ and 3′ homologies. Column 1 represents a positive control. Column 2 represents a negative control. Columns 3-8 represent truncations from the left of the 5′UTR. Columns 9-15 represent truncations from the right of the 5′ UTR. Columns 16-22 represent truncations from the left of the 3′ UTR. Columns 23-29 represent truncations from the right of the 3′UTR.

[0054] FIG. 9A is a graphical depiction exhibiting the effect that altered homology regions have on integration. HEK293FT cells were transfected with 3 separate plasmids: the first containing an R2 protein encoding region, the second containing a luciferase reporter region with 26/22 bp R2 landing sites and the third (payload) plasmid containing the second exon necessary for luciferase signal after insertion and splicing of the reporter plasmid. Additionally to a small intronic sequence upstream of the second of two artificial luciferase exons (minimal cargo necessary for luciferase signal), the payload plasmid has 5′ and 3′ UTR sequences as well as 5′ and 3′ homologies. Here, the 3′ homologies have different lengths: PBS13 (13 bp) and 3′ homology (100 bp). HDV is an HDV ribozyme, which cleaves the insertion region directly after the 3′ UTR and mHDV is a mutated HDV ribozyme that is non-functional. FIG. 9B is a visual representation of each 3′ modification.

[0055] FIG. 10 is a graphical depiction of the effect of linker insertion site on integration efficiency of the R2 protein. Linkers were inserted into various domains at specific insertion sites of an R2 derived from the zebra finch (Taeniopygia guttata) R2 element (R2Tg) with an eGFP or msfGFP payload. Positions for linkers were identified using Emboss gamier to identify potential linker regions, of which 12 were chosen. Linkers for eGFP, for example, were GSGGGSGS (SEQ ID NO: 33377)-EGFP-GSGGGGSG (SEQ ID NO: 33378). Columns 1 and 2 are wild-type R2Tg without a linker region.

[0056] FIG. 11 is a graphical depiction of editing efficiency in the short 28S landing site in an exogenous plasmid. HEK293FT cells were transfected with 3 separate plasmids: the first either containing an R2 protein encoding region or no R2 protein encoding region, the second containing a luciferase reporter region with 26/22 (26 upstream/22 downstream) R2 landing sites and the third (payload) plasmid containing the second exon necessary for luciferase signal after insertion and splicing of the reporter plasmid. Additionally, to a small intronic sequence upstream of the second of two artificial luciferase exons (minimal cargo necessary for luciferase signal), the payload plasmid has 5′ and 3′ UTR sequences and 100 bp 5′ and 3′ homologies to the 28S target site. Percent editing is measured by digital droplet PCR (ddPCR) using primers that recognize the payload.

[0057] FIG. 12 is a graphical depiction of R2 insertion efficiency within the endogenous Beta actin locus of HEK293FT cells transfected with 4 separate plasmids: the first containing an R2 protein encoding region, the second containing an insertion region with a pMAX gene flanked by 5′ and 3′ UTRs and homology regions to the 28S locus, the third a prime editor encoding region, and the fourth a prime editing guideRNA to introduce a 26/22 R2 target site at the ACTB locus. From left to right, the samples are 1) wild-type R2 protein, 2) R2 protein fused to a nuclear localization signal, 3) no R2 protein with Prime editing molecule, 4) R2 protein without prime editing molecule. Percent integration is measured by ddPCR.

[0058] FIG. 13A is a visual depiction of the integration a payload comprised of an R2 protein attached at the C-terminus to eGFP. FIG. 13B is graphical depiction is a luminescence readout of the effect of addition of a nuclear localization signal to the N and C-terminus of the R2 protein on reporter expression. Either wild-type R2 (column 1) or NLS-appended R2 (column 2) were transfected into HEK293FT cells with a stably integrated splice reporter. A negative control is shown in column 3.

[0059] FIGS. 14A-D are visual depictions of HEK293FT cells transfected with either an R2 expression plasmid (FIGS. 14A, 14B) or an R2 negative plasmid (FIGS. 14C, 14D) at either 20 hours post transfection (FIGS. 14A, 14C) or 36 hours post transfection (FIGS. 14B, 14D). The R2 template inserts a second GFP exon into the stably transfected splice receptor, which contains the promoter and a first exon, allowing for GFP expression following integration.

[0060] FIGS. 15A and 15B are graphical depictions of the percentage of GFP positive cells as determined by flow cytometry following transfection of specific plasmids. FIG. 15A is a graph depicting fluorescent readout of cells transfected with plasmids with wild-type R2 (column 1), a negative control (no R2 protein; column 2), 300 ng of R2 with a nuclear localization signal (column 3), 200 ng of R2 with a nuclear localization signal (column 4), 100 ng of R2 with a nuclear localization signal (column 5), 50 ng of R2 with a nuclear localization signal (column 5), and untransfected cells as a percentage of all cells in each sample. FIG. 15B is a graph depicting fluorescent readout of cells transfected with plasmids with wild-type R2 (column 1), a negative control (no R2 protein; column 2), 300 ng of R2 with a nuclear localization signal (column 3), 200 ng of R2 with a nuclear localization signal (column 4), 100 ng of R2 with a nuclear localization signal (column 5), 50 ng of R2 with a nuclear localization signal (column 5), and untransfected cells as a percentage of the number of transfected cells in each sample.

[0061] FIG. 16A is a graphic depiction exhibiting the effect that N-terminal truncations of the R2 protein have on integration. HEK293FT cells were transfected with 3 separate plasmids: the first containing an R2 protein encoding region, in which the R2 protein has been truncated from the N-terminus, the second containing a luciferase reporter region with 26/22 bp R2 landing sites, and the third (payload) plasmid containing the second exon necessary for luciferase signal after insertion and splicing of the reporter plasmid. Additionally to a small intronic sequence upstream of the second of two artificial luciferase exons (minimal cargo necessary for luciferase signal), the payload plasmid has 5′ and 3′ UTR and 5′ and 3′ homologies to the 28S target site. Wild-type R2 (column 1) and negative control (column 2) are also depicted. FIG. 16B is a visual representation of the N-terminal truncations of the R2 protein. Each horizontal bar represents the R2 protein expressed, with further N-terminal regions being removed as the numbers go from 1 to 10.

[0062] FIG. 17A is a graphic depiction exhibiting the effect that C-terminal truncations of the R2 protein have on integration. HEK293FT cells were transfected with 3 separate plasmids: the first containing an R2 protein encoding region, in which the R2 protein has been truncated from the C-terminus, the second containing a luciferase reporter region with 26/22 bp R2 landing sites, and a third (payload) plasmid containing the second exon necessary for luciferase signal after insertion and splicing of the reporter plasmid. Additionally to a small intronic sequence upstream of the second of two artificial luciferase exons (minimal cargo necessary for luciferase signal), the payload plasmid has 5′ and 3′ UTR sequences and 100 bp 5′ and 3′ homologies to the 28S target site. Wild-type R2 (column 1) and negative control (column 2) are also depicted. FIG. 17B is a visual representation of the N-terminal truncations (Nt_1-Nt_10 from FIG. 16) as well as the C-terminal truncations (Ct_1-Ct_6) of the R2 protein. Each horizontal bar represents the R2 protein expressed, with further N or C-terminal regions being removed as the numbers get larger.

[0063] FIG. 18 is a graphical representation of the luminescence readout of HEK293FT cells transfected with three separate plasmids. HEK293FT cells were transfected with 3 separate plasmids. The first plasmid either contained an R2 protein encoding region, no R2 protein encoding region, or an R2 protein with a catalytically inactive restriction-like endonuclease (RLE) domain, which should ablate insertion activity. The second plasmid contained a luciferase reporter region with 26/22 (26 upstream/22 downstream) R2 landing sites, and the third (payload) plasmid contained the second artificial exon necessary for luciferase signal after insertion and splicing of the reporter plasmid. Additionally to a small intronic sequence upstream of the second of two artificial luciferase exons (minimal cargo necessary for luciferase signal), the payload plasmid has 5′ and 3′ UTR sequences as well as 5′ and 3′ homologies.

[0064] FIG. 19 is a graphical representation of the luminescence readout of HEK293FT cells transfected with three separate plasmids. HEK293FT cells were transfected with 3 separate plasmids. The first plasmid either contained an R2 protein encoding region, no R2 protein encoding region, or an R2 protein lacking one of several specific R2 protein domains. The second plasmid contained a luciferase reporter region with 26/22 (26 upstream/22 downstream) R2 landing sites. The third plasmid contained an insertion region with a luciferase insertion as well as modified or unmodified UTRs. Columns 1-3 display the results when the transfected R2 protein is an R2 protein in which the −1 domain, which is an RNA interaction domain, has been deleted. Columns 4-6 display the results when the transfected R2 protein is an R2 protein in which the −1 and the 0 domain, which is also an RNA interaction domain, has been deleted. Columns 7-9 display the results when the transfected R2 protein is an R2 protein in which the 0 domain has been deleted. Columns 10-12 display the results when the transfected R2 protein is an R2 protein in which the 0 domain has been replaced by an eGFP domain. Columns 13-15 display the results when the transfected R2 protein is an R2 protein in which the 0 domain has been replaced by an MS2 coat protein (MCP) domain, which binds to MS2 binding sites. Columns 16-18 display the results when the transfected R2 protein is an R2 protein with the N-terminal 6_2 truncation, and the MCP domain has been fused to the new N-terminus. Columns 19-21 display the results when the transfected R2 protein is an R2 protein with the N-terminal 6_2 truncation, MCP domain fused to the new N-terminus, and the zinc finger domain has been deleted. Columns 22-24 display the results when the transfected R2 protein includes a c-terminal MCP fusion. Columns 25-27 display wild-type R2, and columns 28-30 display the negative control. Orange bars have a payload which includes a wild-type luciferase with 5′ and 3′ UTRs. Blue bars indicate payloads in which the 5′ UTR is replaced by extended MS2 regions. Green bars indicate payloads in which both the 5′ and 3′ UTR have been replaced by MS2 regions.

[0065] FIG. 20 is a graphical depiction exhibiting the effect that altered payloads have on integration. HEK293FT cells were transfected with 3 separate plasmids: the first containing an R2 protein encoding region, the second containing a luciferase reporter region with 26/22 bp R2 landing sites, and the third (payload) plasmid containing the second artificial exon necessary for luciferase signal after insertion and splicing of the reporter plasmid. Additionally to a small intronic sequence upstream of the second of two artificial luciferase exons (minimal cargo necessary for luciferase signal), the payload plasmid has 5′ and 3′ UTR sequences as well as 5′ and 3′ appended at the 3′ end with a number of different nuclear retention elements, as named on the x-axis. Figure discloses “atcTgtcaGtaAGCCCcatgGaAA” as SEQ ID NO: 33547.

[0066] FIG. 21 is a graphical depiction exhibiting the effect that altered payloads have on integration. HEK293FT cells were transfected with 3 separate plasmids: the first containing an R2 protein encoding region, the second containing a luciferase reporter region with 26/22 bp R2 landing sites and the third (payload) plasmid containing the second artificial exon necessary for luciferase signal after insertion and splicing of the reporter plasmid. Additionally to a small intronic sequence upstream of the second of two artificial luciferase exons (minimal cargo necessary for luciferase signal), the payload plasmid has 5′ and 3′ UTR sequences and modifications thereof as named on the x-axis, as well as 5′ and 3′ homologies.

[0067] FIG. 22A is a graphical depiction of luminescence readout of HEK293FT cells transfected with three separate plasmids, indicating cleavage by Cas9. HEK293FT cells were transfected with 3 separate plasmids. The first plasmid either contained modified R2/Cas9 fusion protein, linked together by an XTEN sequence. The second plasmid contained a luciferase reporter region for Cas9 cleavage. The third plasmid a single guide RNA. Columns 1-3 display the results when the transfected R2 protein is an R2 protein in which the −1 domain, which is an RNA interaction domain, has been deleted. Gray bars indicate an R2 protein with a nuclear localization signal, while orange bars indicate an R2 protein without a nuclear localization signal. The x-axis lists the individual R2/Cas9 fusion proteins tested, as well as PDY0044 and a positive control. FIG. 22B is a visual representation of the modified fusion proteins used in FIG. 20A. Vertical lines where in the R2 protein the Cas9 portion is linked to the R2 portion by the XTEN linker.

[0068] FIG. 23 is a visual representation exhibiting the integration of a 20 bp sequence to trigger the expression of GFP using a modified Cas9/R2 protein. FIGS. 23A-N represent modified fusion proteins of Cas9 fused at the N-terminus to R2 at varying locations. The fusion proteins of FIGS. 23A-N exhibit the ability to insert a missing 20 bp region into an eGFP precursor (FIG. 23Q), leading to GFP expression.

[0069] FIG. 230 is a negative control and FIG. 23P is a positive control.

[0070] FIG. 24A is a schematic of computational pipeline used to discover and classify site-specific non-LTR retrotransposon systems. Figure discloses SEQ ID NOS 33548-33553 and 33553-33554, respectively, in order of appearance. FIG. 24B-C is a visual representation of a Phylogenetic tree of single-ORF non-LTR retrotransposons. Associations with putative target sites, including tandem repeats and conserved RNA families are shown. Full length ORF size is shown in the outermost ring with associated domains shown in inner rings. Labels of specific retrotransposons orthologs used in this study as well as previously described orthologs are listed above the outer ring with associated symbols labeled on the tree. Tandem repeat GC content percentage is shown as a color scale. Protein domains are colored according to different CDD/Pfam domains analyzed. Putative Myb and zinc finger domains from Prosite and Pfam (ZF) are colored according to the different configurations detected. The 9 families of RLE-containing non-LTR retrotransposons are shaded in different colors and labeled. SL1, corresponds to SL1 spliced-leader RNA. LSU, corresponds to large subunit rRNA (28S). SSU, corresponds to small subunit rRNA (18S). ZF motif labels correspond to different pfam IDs. CDD labels correspond to different CDD IDs.

[0071] FIG. 25 is a visual representation of the Size distribution of the ORFs from the first methionine for each of the 9 families of RLE containing non-LTR retrotransposons.

[0072] FIG. 26A is a schematic of chimeric non-LTR (nLTR) retrotransposon systems with flanking homologies targeting different insertion sites. E) Gaussia luciferase (Gluc) production via payload insertion of a synthetic exon 2 by selected non-LTR retrotransposons into a 28S plasmid reporter, normalized to a Cypridina luciferase (Cluc) control. FIG. 26B is a schematic of typical non-LTR retrotransposon insertion sites with target sites consistent on both sides of the retrotransposon.

[0073] FIG. 27A is a visual analysis of results from a multiple sequence alignment of different non-LTR retrotransposons using MUSCLE, with Pfam domain schematic above as determined by HHpred. FIG. 27B is a visual analysis of sequence identity similarity of chosen non-LTR retrotransposon family members using the MUSCLE protein alignment from E.

[0074] FIG. 28 is a visual analysis of the 5′ end of the R10Mbr locus with the microsatellite repeat region and alignment to the human 28S rDNA region highlighted. Figure discloses SEQ ID NOS 33555-33557, respectively, in order of appearance.

[0075] FIG. 29A is an analysis of Gaussia luciferase (Glue) production via payload insertion of a synthetic exon 2 by selected non-LTR retrotransposons into a 28S plasmid reporter, normalized to a Cypridina luciferase (Cluc) control. FIG. 29B is a schematic of payload homology and target sites used to evaluate R10Mbr insertion. Figure discloses SEQ ID NOS 33558-33562, respectively, in order of appearance. FIG. 29C is a visual analysis of the results of an experiment analyzing Gluc payload insertion by R10Mbr into a panel of luciferase reporters, as quantified by luciferase production, with R2Tg targeting the R2 28S sequence as control. Reporters with either similarity to the R2 28S region, or with similarity to the 28S homology region in the R10Mbr locus are used for evaluation of alternative insertion sites.

[0076] FIG. 30A is an analysis of EGFP payload insertion by wild type and domain inactivated mutants of R2Tg at the endogenous human 28S locus, analyzed at 5′ and 3′ junctions via gel electrophoresis. Mutants tested were D1274A (RLE inactivation), D877A/D878A/D884A (RT domain inactivation), and ZF2 domain inactivation (replacement of residues 262-275 with NCp7 ZF FNCGKEGHTARN (SEQ ID NO: 33379) (Rocquigny, et al., (1997) J. Biol. Chem. 272, 30753-30759) Red triangles denote faint insertion bands. Schematic above shows insert with the payload denoted in blue, UTRs denoted in black, 28S homology arms denoted red, and 28S locus denoted grey. Black primers are used to readout the left junction and gold primers are used to readout the right junction. FIG. 30B is an analysis of EGFP payload insertion by wild type and domain inactivated mutants of R2Tg into the endogenous 28S locus, quantified by next-generation sequencing. FIG. 30C is an analysis of Gluc production by wild type and domain inactivated mutants of R2Tg into a 28S plasmid reporter, normalized to a Cluc control.

[0077] FIG. 31A is graphical analysis of Gaussia luciferase exon 2 (Gluc) payload insertion by wild type and domain inactivated mutants of R2Tg into a 28S plasmid reporter, with editing outcomes profiled by next generation sequencing at the upstream (left) junction. Mutants tested are WT R2Tg and R2TgD1274A, R2TgD877A, _{D878A, D884A}, and R2TgZF2mut, and outcomes are classified as perfect insertions, insertions with indels, or WT locus indels. FIG. 31B is a graphical analysis of Gluc payload insertion by wild type and domain inactivated mutants of R2Tg into a 28S plasmid reporter, with editing outcomes profiled by next generation sequencing at the downstream (right) junction. Mutants tested are WT R2Tg and R2TgD1274A, R2TgD877A, _{D878A, D884A}, and R2TgZF2mut, and outcomes are classified as perfect insertions, insertions with indels, or WT locus indels. FIG. 31C are representative edits at the 5′-insertion junction, showing examples of indels in the outcome insertion products. Figure discloses SEQ ID NOS 33563-33565, respectively, in order of appearance.

[0078] FIG. 32A is a schematic of example N- and C-terminal R2Tg truncations for evaluating domain functionality. Not all truncations shown. FIG. 32B is a graphical analysis of Gluc payload insertion by wild type and N- or C-terminal truncations of R2Tg into a 28S plasmid reporter, quantified by next-generation sequencing.

[0079] FIG. 33A is a schematic of Cas9H840A-R2Tg insertion at the 28S target, allowing for rescue of R2TgZF2mut activity. FIG. 33B is a graphical analysis of guide-programmed Gluc payload insertion by SpCas9H840A-R2TgZF2mut into a 28S plasmid reporter, in combination with paired guides or single guides, quantified by next generation sequencing. Perfect insertions, insertions with indels, and pure indel outcomes of Cas9H840A-R2TgZF2mut fusion are compared to SpCas9H840A. FIG. 33C is a graphical analysis of Gluc payload insertion by WT R2Tg into a 28S plasmid reporter, with editing outcomes profiled by next generation sequencing. Outcomes are classified as perfect insertions, insertions with indels, or WT locus indels.

[0080] FIG. 34A is a graphical analysis of a Gluc payload insertion by dead SpCas9D10A, H840A-R2Tg and mutants with targeting and non-targeting guides into a 28S plasmid reporter, as quantified by luciferase production. FIG. 34B is a graphical analysis of a Gluc payload insertion by domain inactivated versions of SpCas9H840A-R2Tg into a 28S plasmid reporter and quantified by luciferase production and normalized to the corresponding SpCas9H840A guide condition. SpCas9H840A-R2Tg is combined with either dual, single, or nontargeting sgRNA combinations. Variants tested are R2TgD1274A and R2TgZF2mut. FIG. 34C is a graphical analysis of a Gluc payload insertion by wild type and domain inactivated mutants of SpCas9H840A-R2Tg fusion into a 28S plasmid reporter, quantified by luciferase production and normalized to SpCas9H840A.

[0081] FIG. 35A is a schematic for homology length titration of R2Tg payloads, with varying 5′ and 3′ homology lengths (red). The Gluc cargo is shown in blue. Hairpins denote the 5′ and 3′ UTRs. FIG. 35B is a graphical analysis of a Gluc payload insertion by R2Tg into a 28S plasmid reporter with payloads of different 5′ or 3′ homology lengths, profiled by next generation sequencing. Editing outcomes are quantified as perfect insertions, insertions with indels, and pure indels. FIG. 35C is a schematic for R2Tg insertion outcomes at the 28S target site, either with or without scars, with junction amplification primers for Sanger sequencing and gel readouts shown. Black and gold primers are used for 5′ and 3′ junction analyses, respectively. Schematic shows payload denoted in blue, UTRs denoted in black, 28S homology arms denoted red, and 28S locus denoted grey.

[0082] FIG. 36A is a schematic of R2Tg scarless payload designs, with permuted and deleted UTR domains. FIG. 36B Sanger sequencing of 5′ and 3′ insertion junctions at the 28S target for additional selected payload designs after R2Tg integration. Payload numbers correspond to those in FIG. 36A. Figure discloses SEQ ID NOS 33566-33567, respectively, in order of appearance. FIG. 36C is a visual depiction of Sanger sequencing of 5′ and 3′ insertion junctions at the 28S target for selected payload designs after R2Tg integration. Payload numbers correspond to those in 36A. Figure discloses SEQ ID NOS 33566, 33568-33569, 33568-33569, 33567, 33569, and 33567, respectively, in order of appearance.

[0083] FIG. 37A is a visual representation of edits at the 5′ insertion junction, showing examples of indels in the outcome insertion products. Figure discloses SEQ ID NOS 33563-33565, respectively, in order of appearance. FIG. 37B is a visual depiction of indels at the 5′ junction for R2Tg insertion at the 28S target for selected payloads. Non-templated Cs from reverse transcription in the bottom strand (G in the top strand) are highlighted with red boxes. Figure discloses SEQ ID NOS 33570-33571, 33564, 33572, 33571, 33564, 33582, and 33571, respectively, in order of appearance. FIG. 37C is a visual depiction of a size analysis by gel of 5′ and 3′ insertion junctions at the 28S target reporter for selected payload designs after R2Tg integration. Payload numbers correspond to those in FIG. 36A.

[0084] FIG. 38A is a graphical depiction of integration efficiency of R2Tg at the 28S target reporter with different payload designs. Integration is profiled by next-generation sequencing as perfect insertions, insertions with indels, or WT locus indels. Payload numbers correspond to those in FIG. 36A. FIG. 38B is a visual depiction of example indels at the WT 28S locus target for selected payloads. Non-templated Cs from reverse transcription in the bottom strand (Gin the top strand) are highlighted with red boxes. Figure discloses SEQ ID NOS 33563, 33565, 33564, 33571, 33564, 33573, 33571, 33564-33565, and 33573, respectively, in order of appearance. FIG. 38C is a schematic representation of additional payload variant with internal homology arms against the 28S target. FIG. 38D is a graphical representation of the Gaussia luciferase exon 2 (Gluc) payload insertion by wild type R2Tg into a 28S plasmid reporter with payload variants shown in part B, with editing outcomes profiled by next generation sequencing at the upstream (left) junction. Outcomes are classified as perfect insertions, insertions with indels, or WT locus indels.

[0085] FIG. 39A is a schematic for reprogramming of a R2Tg payload for insertion at the AAVS1 site with scarless insertion. FIG. 39 B is a graphical depiction of a payload insertion by SpCas9H840A-R2Tg into the endogenous NOLC1 and AAVS1 loci, mediated by either single, dual guides, or non-targeting guides and quantified by next generation sequencing. FIG. 39C is a schematic of AAVS1 targeting payload variations used in FIG. 39D. Payload is shown in blue, homology arms are shown in gold, 5′ 28S homology is shown in red, and UTRs are shown as hairpins. FIG. 39D is a graphical depiction of a Gluc payload insertion, with variations on UTR, 28S homology, and AAVS1 homology (100 nt), by SpCas9H840A-R2Tg at endogenous AAVS1 locus, using a single bottom strand nicking guide. Integration is profiled by next-generation sequencing as perfect insertions, insertions with indels, or indels.

[0086] FIG. 40A is a schematic of SpCas9H840A fused to N- and C-terminal truncations of R2Tg at different amino acid positions. Not all tested constructs are shown. FIG. 40B is a graphical depiction of a Gluc payload insertion by different SpCas9H840A-R2Tg fusions, according to the schematic in A, into the endogenous AAVS1 locus quantified by next generation sequencing. FIG. 40C is a graphical depiction of the payload insertion by SpCas9H840A-R2Tg fusion, SpCas9D10A,_{H840A}-R2Tg fusion, and SpCas9H840A and R2Tg in trans. Payloads are inserted at either AAVS1 or NOLC1 loci, with insertion at AAVS1 quantified by next generation sequencing and insertions at NOLC1 quantified by ddPCR.

[0087] FIG. 41A is a graphical depiction of a Gluc payload insertion by SpCas9H840A-R2Tg at the endogenous AAVS1 target site with a panel of dual and single guides, compared with SpCas9H840A. Payloads have 100 nt of homology to the target site. Editing outcomes are quantified as perfect insertions, insertions with indels, and indels at the unmodified target site. The optimized payload design is used with a 5′ 28S homology arm, truncated 5′ R2Tg UTR, and internal AAVS1 homology arms. FIG. 41B is a graphical depiction of the integration of Gluc payload at the endogenous AAVS1 locus by the SpCas9H840A-R2Tg fusion with a payload containing 50 nt homology arms.

[0088] FIG. 42A is a graphical depiction of a Gluc payload insertion into a 28S plasmid reporter by selected non-LTR retrotransposons fused to SpCas9H840A, with either targeting or non-targeting guides, quantified by Gluc production normalized to a control Cluc. Data is shown as ratio of targeting signal to non-targeting signal. FIG. 42B is a schematic of AAVS1 insertion with optimized payloads containing the cognate 5′ UTR corresponding to each non-LTR retrotransposon ortholog being evaluated. FIG. 42C is a graphical depiction of a Gluc payload insertion into the endogenous AAVS1 locus by selected non-LTR retrotransposons fused to SpCas9H840A, with either targeting or non-targeting guides, quantified by next generation sequencing. FIG. 42D Gluc payload insertion into the endogenous AAVS1 locus by selected non-LTR retrotransposons fused to SpCas9H840A, with either targeting or non-targeting guides, profiled by next generation sequencing. Editing outcomes are quantified as perfect insertions, insertions with indels, and indels at the unmodified WT target site.

[0089] FIG. 43A is a graphical depiction of EGFP payload insertion (50 nt homology arms) by STITCHR with SpCas9H840A-R2Toc into the endogenous NOLC1 locus, with combinations of single and dual guides, compared to SpCas9H840A and quantified by digital droplet PCR (ddPCR). Editing outcomes are quantified as total insertions, integrations with indels, and WT locus indels. FIG. 43B is a graphical depiction of a Gluc payload insertion by STITCHR with SpCas9H840A-R2Toc into the endogenous SERPINA1 locus (left homology 100 nt and right homology 50 nt), with combinations of single and dual guides, compared to SpCas9H840A and profiled by next generation sequencing. Editing outcomes are quantified as perfect insertions, insertions with indels, and WT locus indels. FIG. 43C is a graphical depiction of an EGFP payload insertion by STITCHR with SpCas9H840A-R2Toc into the endogenous NOLC1 locus, with combinations of single and dual guides, compared to a non-targeting guide control and quantified by digital droplet PCR (ddPCR). FIG. 43D is a graphical depiction of an EGFP payload insertion by STITCHR with SpCas9H840A-R2Toc into the endogenous NOLC1 locus, with combinations of single and dual guides, compared to a non-targeting guide control and profiled by next generation sequencing. Editing outcomes are quantified as perfect insertions, insertions with indels, and WT locus indels.

[0090] FIG. 44A is a graphical depiction of an EGFP payload insertion by STITCHR with SpCas9H840A-R2Toc into the endogenous NOLC1 locus, with a panel of payloads with 50 nt homology arms targeting NOLC1 or AAVS1 targets, or without homology. Payloads are evaluated with single, dual, or non-targeting guides and are compared to SpCas9H840A. Editing is quantified by ddPCR. N denotes the NOLC1 target. A denotes the AAVS1 target. FIG. 44B is a graphical depiction of an EGFP payload insertion by STITCHR with SpCas9H840A-R2Toc into the endogenous NOLC1 locus, with a panel of payloads with varying homology arm lengths. Payloads are evaluated with dual or non-targeting guides and are compared to SpCas9H840A. Editing is quantified by ddPCR. FIG. 44C is a graphical evaluation of gene integration at the AAVS1 locus with SpCas9H840A-R2Toc and SpCas9H840A using payloads of varying sized homology arms (100 nt, 75 nt, 50 nt, and 30 nt). Integration is evaluated with dual guides, single guides, and non-targeting guides. FIG. 44D is a graphical evaluation of gene integration at the SERPINA1 locus with SpCas9H840A-R2Toc and SpCas9H840A using payloads of varying sized homology arms (100 nt, 75 nt, 50 nt, and 30 nt). Integration is evaluated with dual guides, single guides, and non-targeting guides.

[0091] FIG. 45A is a schematic of STITCHR using SpCas9H840A-R2Toc to insert EGFP as a scarless in-frame fusion at the N-terminus of the human NOLC1 gene. The EGFP template is transcribed in a reverse complement manner to minimize background expression in the absence of insertion with 50 nt homology arms. FIG. 45B is an immunohistochemical analysis of STITCHR-mediated EGFP tagging of NOLC1, visualized by confocal microscopy, and compared to immunofluorescence staining of NOLC1. White scale bar denotes 10 μm. FIG. 45C is a graphical depiction of therapeutically relevant payload insertion by STITCHR with SpCas9H840A-R2Toc into the endogenous AAVS1 locus, with sizes and identities of payload panel members shown and 100 nt homology arms. Integration is quantified by next generation sequencing and compared to SpCas9H840A. FIG. 45D is a graphical depiction of therapeutically relevant payload insertion by STITCHR with SpCas9H840A-R2Toc into the endogenous AAVS1 locus, compared to SpCas9H840A. Integration is profiled by next-generation sequencing as perfect insertions, insertions with indels, or WT locus indels.

[0092] FIG. 46A is a graphical depiction of EGFP payload insertion (50 nt homology arms) by STITCHR with SpCas9H840A-R2Toc into the endogenous NOLC1 locus in cells treated with varying concentrations of aphidicolin. Integration is quantified by ddPCR and compared to SpCas9H840A. FIG. 46B is a graphical depiction of SpCas9-mediated HDR editing of the EMX1 gene in cells treated with varying concentrations of aphidicolin. Genome editing is quantified by next generation sequencing.

[0093] FIG. 47A is a graphical depiction of multiplexed gene integration by STITCHR with SpCas9H840A-R2Toc at NOLC1 and AAVS1 sites. EGFP payload insertion at NOLC1 is quantified by ddPCR, and Gluc insertion at AAVS1 is quantified by next generation sequencing. Targeting conditions are compared to non-targeting guide controls. FIG. 47B is a graphical depiction of multiplexed gene integration by STITCHR with SpCas9H840A-R2Toc at NOLC1 and AAVS1 sites, profiled by next generation sequencing. Total insertion for NOLC1 is quantified by ddPCR. Editing outcomes are quantified as perfect insertions, insertions with indels, and WT locus indels. N denotes NOLC1, whereas A denotes AAVS1.

[0094] FIG. 48 is a schematic representation of STITCHR, enabling programmable and modular scarless gene insertion with site-specific non-LTR (nLTR) retrotransposons.

[0095] FIG. 49 is a graphical representation of the results of an experiment in which an EGFP payload was inserted (50 nt homology arms) by STITCHR with SpCas9H840A-R2Toc into the endogenous NOLC1 locus, with a single fixed guide, compared to SpCas9H840A and quantified by digital droplet PCR (ddPCR). Homology arms on the templates are separated by 0, 50, 100, or 150 bp on the genome causing a deletion to occur followed by simultaneous insertion of the STITCHR EGFP payload. The payload arms are also shifted to match the locations of the single nicking guide and the desired end of the deletion to enable the deletion and subsequent insertion.

[0096] FIG. 50A is a graphical representation of payload insertion (50 nt homology arms) by STITCHR with SpCas9^{H840A}-R2Toc into the endogenous NOLC1 locus, with dual guides N4 and N8, compared to SpCas9^{H840A} and quantified by next generation sequencing. The introduced edit is either a mismatch to the genome to demonstrate single base corrections or are small insertions as noted in the x-axis of the plot. FIG. 50B is a graphical representation of payload insertion (50 nt homology arms) by STITCHR with SpCas9H840A-R2Toc into the endogenous NOLC1 locus, with dual guides N4 and N8, compared to SpCas9H840A and quantified by next generation sequencing. The introduced edit is either a mismatch to the genome to demonstrate single base corrections or are small insertions as noted in the x-axis of the plot. Cargo is driven by either the U6 promoter or the CAG promoter, showing that the CAG promoter expression of the cargo results in slightly higher editing.

[0097] FIG. 51 is a graphical representation of the results of an experiment in which EGFP payload was inserted (50 nt homology arms) by STITCHR with SpCas9H840A-R2Toc into the endogenous NOLC1 locus, with dual guides N4 and N8, compared to SpCas9H840A and quantified by digital droplet PCR (ddPCR). STITCHR insertion is also compared to SpCas9H840A and R2Toc being expressed separately (in trans).

[0098] FIG. 52 is a heatmap chart representation of nLTR families with diverging target preferences, with counts of co-occurring divergent Rfam annotation target pairs.

[0099] FIG. 53 are loci of nLTR system families with divergent target preferences as determined via Rfam analysis. Families are clustered by ORF identity.

[0100] FIG. 54A is a schematic representation of the insertion by non-LTR retrotransposons at the natural 28S target site, depicting initial nicking and strand invasion, target-primed reverse transcription, first strand synthesis, nicking-initiated second strand synthesis, and insertion of a payload sequence into the genome. 28S homology, UTR sequences, and payload sequence are indicated. FIG. 54B is a schematic representation of Gaussia luciferase (Gluc) production via payload insertion of a synthetic Gluc exon 2 by 12 selected non-LTR retrotransposons into a 28S plasmid reporter containing a synthetic Gluc exon 1, normalized to a constitutive Cypridina luciferase (Cluc) control. FIG. 54C is a schematic representation of Gluc exon 2 payload insertion by R2Tg into a 28S plasmid reporter with payloads of different 5′ or 3′ UTR deletions and homology site permutations, profiled by next generation sequencing. Schematic shows the payload design used with UTRs, 5′ 28S homology arms, 3′ 28S homology arms, and the Gluc exon 2 insert.

[0101] FIG. 55A are gel electrophoresis images of the analysis of 5′ and 3′ insertion junctions at the 28S target reporter using payload designs with permuted UTR and homology positions after R2Tg integration. Payload numbers correspond to those in FIG. 54C. FIG. 55B is a schematic representation of the Gluc exon 2 payload insertion by WT R2Tg, R2Tg^{D1274A,} or the RT domain deletion R2Tg^{Δ(874-884)} into a 28S plasmid reporter with payloads containing 28S or AAVS1 targeting homology arms, profiled by next generation sequencing. FIG. 55C is a graphical representation of the EGFP payload insertion at the NOLC1 target using R2Tg, R2Tg^{D1274A}, or R2Tg^{RTmut} and a payload containing the 5′ UTR and 50 nt NOLC1 homology arms, quantified by next-generation sequencing.

[0102] FIG. 56A is a schematic representation of the reprogramming of a R2Tg payload for insertion at a novel site with scarless insertion using SpCas9^{H840A}. FIG. 56B is a graphical representation of the payload insertion by SpCas9^{H840A}-R2Tg or SpCas9^{H840A}-R2Tg^{D1274A} into the endogenous NOLC1 locus, mediated by dual guides or non-targeting guides and quantified by ddPCR.

[0103] FIG. 57 is a schematic representation of the EGFP payload insertion, with variations on 5′ and 3′ UTR sequence by SpCas9^{H840A}-R2Tg at the endogenous NOLC1 locus, using dual guides. Integration is quantified by ddPCR. Schematic of payload variations used with the payload, homology arms, 5′ and 3′ UTRs are illustrated.

[0104] FIG. 58A is a graphical representation of the EGFP payload insertion by SpCas9^{H840A}-R2Tg (WT), SpCas9^{H840A}-R2Tg^{F875A/A876L/D877A/D878A/L879A/V880A/L881A} (RTmut), and SpCas9^{H840A}-R2Tg^{Δ(874-884)} (Δ(874-884)), and SpCas9^{H840A} at the endogenous NOLC1 target site with dual guides. FIG. 58B is a schematic representation of AAVS1 insertion with optimized payloads containing the cognate 5′ UTR corresponding to each non-LTR retrotransposon ortholog being evaluated. Gluc payload insertion into the endogenous AAVS1 locus by selected non-LTR retrotransposons fused to SpCas9^{H840A}, with either targeting or non-targeting (NT) guides, is quantified by next generation sequencing. The heatmaps correspond to Gluc integration efficiency (top) and the associated indels generated at the AAVS1 locus (bottom).

[0105] FIG. 59A is a schematic representation of the EGFP payload insertion (50 nt homology arms) by STITCHR with SpCas9^{H840A}-R2Toc into the endogenous AAVS1, LMNB1, EMX1, and NOLC1 loci, with combinations of single and dual guides, compared to SpCas9^{H840A}-R2TocRTmut and wild-type SpCas9. The left heatmap shows integration rate of the EGFP payload, whereas the right heatmap corresponds to indels detected at the corresponding loci. FIG. 59B is a schematic representation of different STITCHR edits evaluated ranging from single-base variants, small insertions, and large insertions. FIG. 59C is a graphical representation of the evaluation of different sized edits using STITCHR at the NOLC1 locus using either SpCas9^{H840A}-R2Toc or SpCas9^{H840A}.

[0106] FIG. 60A is a schematic representation of STITCHR-replace methodology involving replacement of a region of the genome while inserting the STITCHR payload. FIG. 60B is a graphical representation of the evaluation of STITCHR-replace at the NOLC1 locus using a single guide and homology arms spaced 50-150 bp apart on the genome.

[0107] FIG. 61 is a schematic representation of the natural reprogramming of RLE-containing non-LTR retrotransposons, incorporating flexible internal priming and UTR deletions that might occur during the process.

[0108] FIG. 62 is a graphical representation of the distribution of distances from candidate retrotransposons to detected Rfam annotation or tandem repeat targets for each of the 9 families of RLE containing non-LTR retrotransposons.

[0109] FIG. 63 is the phylogenetic tree representation of 9 families of RLE-containing nLTR systems showing majority of detected Rfam targets in the vicinity of the nLTR ORF.

[0110] FIG. 64A-E are the DNA sequence alignments of nLTR families with divergent target preferences in the noncoding areas surrounding the nLTR ORFs. Identified Rfam annotations in the surrounding locus are highlighted.

[0111] FIG. 65A is the graphical representation of the Gluc payload insertion by R2Tg reverse transcriptase domain deletions, RLE inactivation mutants (R1274A) and reverse transcriptase mutations (R2Tg^{F875A/A876L/D877A/D878A/L879A/V880A/L881A}, RTmut), at the 28S locus luciferase reporter, as quantified by luciferase. FIG. 65B is the graphical representation of the Gluc payload insertion by R2Tg reverse transcriptase domain mutations, including R2Tg^{F875A/A876L/D877A/D878A/L879A/V880A/L881A} (RTmut) and RLE inactivation mutants (R1274A), at the 28S locus luciferase reporter, as quantified by luciferase.

[0112] FIG. 66A is a schematic representation of the secondary structure analysis of the 5′ UTR of R2Tg, including the full length, 15 nt truncated variant, and the 15 nt truncated variant with the 50 nt 28S homology sequence upstream. Figure discloses SEQ ID NOS 33574-33576, respectively, in order of appearance. FIG. 66B is a graphical representation of the validation of the 3-primer NGS assay for analysis of AAVS1 integration via the left insertion junction. Standards consist of edited and WT amplicons that are mixed in the listed ratios (xaxis) and the measured editing is determined by the 3-primer NGS assay (y-axis). FIG. 66C is the schematic and graphical representation of the Gluc integration at the endogenous AAVS1 locus via the SpCas9^{H840A}-R2Tg fusion using payloads with the full length or 15-nt truncated 5′ UTR, an upstream 28S 50 nt sequence, and internal AAVS1 homology arms. Integration is quantified by next-generation sequencing.

[0113] FIG. 67A is a schematic representation of SpCas9^{H840A} fused to N- and C-terminal truncations of R2Tg at different amino acid positions. Not all tested constructs are shown. FIG. 67B is a graphical representation of the Gluc payload insertion by different SpCas9^{H840A}-R2Tg fusions, according to the schematic in FIG. 67A, into the endogenous AAVS1 locus quantified by next generation sequencing. FIG. 67C is a graphical representation of the Gluc integration at the endogenous AAVS1 target by SpCas9^{H840A}-R2Tg, SpCas9^{H840A}-R2Tg^{F875A/A876L/D877A/D878A/L879A/V880A/L881A}, and SpCas9^{H840A}-R2Tg^{Δ(874-884)}, and SpCas9^{H840A} alone.

[0114] FIG. 68 is a schematic representation of the Gluc payload insertion into the endogenous AAVS1 locus by selected non-LTR retrotransposons fused to SpCas9^{H840A}, with either targeting or nontargeting guides, profiled by next generation sequencing. Editing outcomes are quantified as perfect insertions, insertions with indels, and indels at the unmodified WT target site

[0115] FIG. 69A is a graphical representation of the Gluc payload insertion by STITCHR with SpCas9^{H840A}-R2Toc into the endogenous AAVS1 locus, with combinations of single and dual guides, compared to a non-targeting guide control and quantified by next generation sequencing. FIG. 69B is a graphical representation of the EGFP payload insertion by STITCHR with SpCas9^{H840A}-R2Toc into the endogenous LMNB1 locus, with combinations of single and dual guides, compared to a non-targeting guide control and SpCas9^{H840A} alone. Editing was quantified by digital droplet PCR (ddPCR). FIG. 69C is a graphical representation of the EGFP payload insertion by STITCHR with SpCas9^{H840A}-R2Toc into the endogenous EMX1 locus, with combinations of single and dual guides, compared to a non-targeting guide control and SpCas9^{H840A} alone. Editing was quantified by digital droplet PCR (ddPCR).

[0116] FIG. 70A is a graphical representation of the Gluc payload insertion by SpCas9^{H840A}-R2Toc (WT), SpCas9^{H840A}-R2Toc^{F811A, A812L, D813A, D814A, L815A, V816A, L817A}, SpCas9^{H840A}-R2Toc^{Δ(811-814)}, SpCas9^{H840A}-R2Toc^{Δ(810-820)}, and SpCas9^{H840A} at the endogenous AAVS1 target site. Editing is quantified by next generation sequencing. FIG. 70B is a graphical representation of the EGFP payload insertion by SpCas9^{H840A}-R2Toc (WT), SpCas9^{H840A}-R2Toc^{F811A, A812L, D813A, D814A, L815A, V816A, L817A}, SpCas9^{H840A}-R2Toc^{Δ(875-878)}, SpCas9^{H840A}-R2Toc^{Δ(874-884)}, and SpCas9^{H840A} at the endogenous NOLC1 target site. Editing is quantified by ddPCR. FIG. 70C is a graphical representation of the GFP payload insertion by SpCas9^{H840A}-R2Toc (WT), SpCas9^{H840A}-R2Toc^{D1210A}, and SpCas9^{H840A} at the endogenous NOLC1 target site. Editing is quantified by ddPCR.

[0117] FIG. 71 is a graphical representation of the GFP payload insertion by STITCHR with SpCas9^{H840A}-R2Toc into the endogenous NOLC1 locus in HepG2 cells, compared to SpCas9^{H840A}. Editing is quantified by ddPCR.

[0118] FIG. 72 is a graphical representation of the installation of small edits and insertions using STITCHR at the NOLC1 locus, using a U6 promoter for payload expression.

[0119] FIG. 73 are sequencing reads of the EGFP insertion site at NOLC1 for STITCHR replace, showing the desired 50-150 bp deletions. Figure discloses SEQ ID NOS 33577-33578, 33577, 33577, 33577, 33579, 33579, 33579, 33579-33580, 33580, 33580, 33580-33581, 33581, 33581, and 33581, respectively, in order of appearance.

[0120] FIG. 74A is a graphical representation of the EGFP payload insertion (50 nt homology arms) by STITCHR with SpCas9^{H840A}-R2Toc into the endogenous AAVS1 locus in cells treated with cell cycling inhibitor Mirin or double thymidine. Integration is quantified by next-generation sequencing and compared to SpCas9^{H840A}. FIG. 74B is a graphical representation of the SpCas9-mediated HDR editing of the EMX1 gene in cells treated with cell cycling inhibitor Mirin or double thymidine. Genome editing is quantified by next generation sequencing.

[0121] FIG. 75 is a graphical representation of 10 orthologs sampled from various nLTR families (1, 4, 5, 6, 7, 9) compared to R2Toc for programmed insertion at the AAVS1 locus. Orthologs were synthesized with mammalian codon optimization, and putative 5′ and 3′ UTR regions were cloned surrounding a luciferase payload. Protein and payload constructs were transfected along with a SpCas9 plasmid and guide plasmid into HEK293FT cells, and 3 days later cells were harvested and efficiency of insertion were quantified by next generation sequencing.

[0122] FIG. 76A-C are tables showing plasmid vectors for genome editing.

### DETAILED DESCRIPTION

[0123] The present disclosure is directed to site specific non-Long Terminal Repeat (LTR) retrotransposons and systems incorporating these non-LTR retrotransposons for inserting large nucleic acids at targeted locations within a genome. The present disclosure is also directed to site-specific non-LTR retrotransposons and related systems for performing small nucleotide changes in a genome. In some embodiments, a small nucleotide change comprises a point mutation. In some embodiments, a small nucleotide change comprises a small nucleotide insertion.

[0124] The present disclosure is also directed to modified R2 fusion proteins for inserting large nucleic acids at targeted locations within a genome. The present disclosure is also directed to Cas9 fusion proteins for inserting large nucleic acids at targeted locations within a genome, which includes Cas9-R2 fusion proteins. In some embodiments, the genome is a human genome.

[0125] The present disclosure is also directed to the insertion of exogenous R2 landing sites within a genome, such that a R2 protein, modified R2 protein, or R2 fusion protein that may target a non-28S locus for insertion of a large genetic element. In some embodiments, the R2 fusion protein is an R2-Cas9 fusion protein. In some embodiments, the R2 fusion protein is a Cas12-R2 fusion protein. In some embodiments, the R2 fusion protein is a TALEN-R2 fusion protein.

### Definitions

[0126] Unless stated otherwise, terms and techniques used within this application have the meaning generally known to one of skill in the art.

[0127] The term “about” as used herein is understood to modify the specified value. Unless explicitly stated otherwise, the term about is understood to modify the specified values +/−10%. As used herein, the term about applied to a range modifies both endpoints of the range. By way of example, a range of “about 5 to 10” is understood to mean “about 5 to about 10.”

[0128] Unless explicitly stated otherwise, the term “payload” as used herein means at least a nucleic acid that may be integrated into a host genome. Thus, “payload RNA” will be understood to comprise an RNA molecule comprising at least an insertion region, wherein the insertion region can be integrated into a host genome.

[0129] As used herein, “cell-specific,” or “cell-type specific,” would be understood by one of skill in the art to mean occurring or being expressed at a higher frequency or existing at an increased level in one cell type in contrast to other cell types.

[0130] As used herein, the terms “target site” and “landing site” are used interchangeably unless specified otherwise.

[0131] Unless explicitly stated otherwise, the term “nucleic acid” is understood to refer to both ribonucleic acid (RNA) and deoxyribonucleic acid (DNA) molecules. This may include chemically synthesized nucleic acid molecules, single stranded or double stranded nucleic acid molecules, linearized nucleic acid molecules, circularized nucleic acid molecules, chemically modified nucleic acid molecules, and nucleic acids with biochemical modifications.

### RLE Domain Containing Non-LTR Retrotransposon Families

[0132] In addition to canonical single-ORF RLE domain containing non-LTR retrotransposons, such as R2, R4, R5, R8, R9, Dong, and Cre families, retrotransposons for use in or as part of the genome editing system described herein may also be characterized as part of a larger phylogenetic family. The retrotransposons in these larger phylogenetic families contemplated for use in or as a part of the genome editing systems described herein include the 8,248 RLE-domain containing retrotransposon uncovered as part of the computational analysis described in Example 7. These 8,248 retrotransposon-like orthologs are divided into 9 families, termed RLED1-RLED9. In some embodiments, the non-LTR retrotransposon is a member of the RLED1 family. In some embodiments, the non-LTR retrotransposon is a member of the RLED2 family. In some embodiments, the non-LTR retrotransposon is a member of the RLED3 family. In some embodiments, the non-LTR retrotransposon is a member of the RLED4 family. In some embodiments, the non-LTR retrotransposon is a member of the RLED5 family. In some embodiments, the non-LTR retrotransposon is a member of the RLED6 family. In some embodiments, the non-LTR retrotransposon is a member of the RLED7 family. In some embodiments, the non-LTR retrotransposon is a member of the RLED8 family. In some embodiments, the non-LTR retrotransposon is a member of the RLED9 family. In some embodiments, the non-LTR retrotransposon is a member of the R1 family. In some embodiments, the non-LTR retrotransposon is a member of the R2 family. In some embodiments, the non-LTR retrotransposon is a member of the R4 family. In some embodiments, the non-LTR retrotransposon is a member of the R5 family. In some embodiments, the non-LTR retrotransposon is a member of the R6 family. In some embodiments, the non-LTR retrotransposon is a member of the R7 family. In some embodiments, the non-LTR retrotransposon is a member of the R8 family. In some embodiments, the non-LTR retrotransposon is a member of the R9 family. In some embodiments, the non-LTR retrotransposon is a member of the Cre family. In some embodiments, the non-LTR retrotransposon is a member of the NeSL family. In some embodiments, the non-LTR retrotransposon is a member of the HERO family. In some embodiments, the non-LTR retrotransposon is a member of the Utopia family.

### R2 Element Enzymes

[0133] Without limiting the instant disclosure to any one particular theory, R2 retrotransposons are thought to work via a mechanism known as target-primed reverse transcription, or “TPRT.” TPRT is a mechanism by which an endonuclease creates a nick in a first DNA strand at a specific location, creating a “primed” 3′ hydroxyl end for reverse transcription. After the initial DNA nick, an mRNA molecule is reverse transcribed by the reverse transcriptase.

[0134] In some embodiments, the R2 element enzyme is modified. In some embodiments, the R2 element enzyme is modified by an N-terminal truncation of the R2 element enzyme sequence, a C-terminal truncation of the R2 element enzyme sequence, or both an N-terminal and a C-terminal truncation of the R2 element enzyme sequence.

[0135] In some embodiments, the R2 element enzyme is a fusion protein. In some embodiments, the R2 element enzyme comprises a fusion of an R2 protein with a Cas9 protein. In some embodiments, the R2 element enzyme comprises a fusion of an R2 protein with a Cas12 protein. In some embodiments, the R2 element enzyme comprises a fusion of an R2 protein with a Cas9 protein, wherein the Cas9 portion and the R2 protein portion are connected by a linker. In some embodiments, the R2 element enzyme comprises a fusion of an R2 protein with a Cas12 protein, wherein the Cas12 portion and the R2 protein portion are connected by a linker.

### Protein Binding Elements

[0136] Protein binding elements of the disclosure can come in a multitude of forms. In one embodiment, a protein binding element may be an endogenous nucleic acid sequence. In one embodiment, a protein binding element may be an exogenous or introduced nucleic acid sequence. In one embodiment, the protein binding element may be a synthesized nucleic acid sequence.

### Guide Elements

[0137] In some embodiments the genome editing system comprises a guide RNA. In some embodiments, the genome editing system comprises multiple guide RNAs. In some embodiments, the genome editing system comprises paired guide RNAs.

### Genomic Insertion Sites and Targets

[0138] The R2 element naturally targets the 28S rRNA locus. The instant disclosure contemplates the insertion of payloads into either the 28S rRNA locus or into other genomic loci. In some embodiments, the insertion site is a targeted genomic insertion site. In some embodiments, the insertion site is targeted by a targeting domain in a fusion protein. In some embodiments, the insertion site has been exogenously introduced to the genome. In some embodiments, the insertion site has been exogenously introduced by a site-directed genome editing system that is not capable of delivering large genetic insertions. In some embodiments, the targeted genomic site is targeted for a point mutation. In some embodiments, the targeted genomic site is targeted for a small nucleotide insertion.

[0139] The instant disclosure also contemplates additional non-LTR site-specific retrotransposons for use in or as part of the genome editing system described herein that do not target the 28S rRNA locus. In some embodiments, the genome is targeted for a large genetic insertion. In some embodiments, the insertion site is a targeted genomic insertion site. In some embodiments, the insertion site is targeted by a targeting domain in a fusion protein. In some embodiments, the insertion site has been exogenously introduced to the genome. In some embodiments, the insertion site has been exogenously introduced by a site-directed genome editing system that is not capable of delivering large genetic insertions. In some embodiments, the targeted genomic site is targeted for a point mutation. In some embodiments, the targeted genomic site is targeted for a small nucleotide insertion.

### Payloads

[0140] Payloads of the instant disclosure may encode proteins, such as enzymes. In some embodiments, the payload may act as a regulatory element. Thus, if an embodiment of the disclosure states, by way of example, that “the payload comprises a therapeutic protein,” it is generally understood that the payload comprises a template that, upon insertion, will lead to expression of a therapeutic protein encoded by the template. Exemplary vectors for expression are shown in FIG. 76.

[0141] In some embodiments, the insertion region comprises a template for a reporter gene. In some embodiments, the reporter gene encodes a fluorescent protein. In some embodiments, the reporter gene encodes a green fluorescent protein. In some embodiments, the reporter gene encodes eGFP.

[0142] In some embodiments, the insertion region comprises a template for a transcription factor gene.

[0143] In some embodiments, the insertion region comprises a template for a transgene.

[0144] In some embodiments, the insertion region comprises a template for an enzyme gene, or a therapeutic gene. In some embodiments, the therapeutic protein can be used in conjunction with another therapeutic.

[0145] In some embodiments, the payload comprises a protein that is capable of converting one cell type to another.

[0146] In some embodiments, the payload comprises a protein that is capable of killing a specific cell type. In some embodiments, the payload comprises a protein that is capable of killing a tumor cell. In some embodiments, the payload comprises an immune modulating protein.

[0147] In some embodiments, the payload comprises a 5′UTR. In some embodiments, the payload comprises a 3′UTR. In some embodiments, the payload comprises a 5′UTR and a 3′ UTR. In some embodiments, the payload consists of a 5′UTR. In some embodiments, the payload consists of a 3′UTR. In some embodiments, the payload comprises a 5′UTR and a 5′ homology region. In some embodiments, the payload comprises a 3′UTR and a 3′ homology region. In some embodiments, the payload comprises a 5′UTR, a 5′ homology region, a 3′UTR and a 3′ homology region. In some embodiments, the payload comprises a 5′ homology region, a 3′UTR and a 3′ homology region. In some embodiments, the payload comprises a 5′UTR, a 5′ homology region, and a 3′ homology region. In some embodiments, the payload comprises a 5′ homology region and a 3′ homology region. In some embodiments, the 3′ homology region comprises less than 30 base pairs. In some embodiments the 3′ homology region comprises less than 20 base pairs. In some embodiments, the 3′ homology region comprises less than 10 base pairs. In some embodiments, the 3′ homology region comprises less than 5 base pairs.

### Programmable Nucleases, Nickases, and DNA Binding Proteins

[0148] The instant disclosure contemplates programmable nucleases or nickases for use in or as a part of the genome editing systems described herein. In some embodiments, the programmable nuclease or nickase is a Cas9 protein. In some embodiments, the programmable nuclease or nickase is a Cas12 protein. In some embodiments the programmable nuclease or nickase is IscB. In some embodiments, the programmable nuclease or nickase is IsrB. In some embodiments, the programmable nuclease or nickase is TnpB. In some embodiments, the programmable nuclease or nickase is a TALEN nuclease. In some embodiments, the programmable nuclease or nickase is fused to the non-LTR site-specific retrotransposon element. In some embodiments, the programmable nuclease or nickase is non-covalently linked to the non-LTR site-specific retrotransposon element. In some embodiment, the programmable nuclease or nickase acts in cis with the non-LTR site-specific retrotransposon element. In some embodiments, the programmable nuclease or nickase acts in trans with the non-LTR site-specific retrotransposon element.

### Therapeutic Gene Insertions

[0149] In some embodiments, the payload results in the insertion of a therapeutic gene into a host genome. In some embodiments, the therapeutic gene is intended to treat a neurological disorder or a neurodegenerative disorder. In some embodiments, the therapeutic gene is intended to treat cancer. In some embodiments, the therapeutic gene is intended to treat an autoimmune disorder.

[0150] In some embodiments, the payload results in the insertion of a therapeutic gene for treating a genetically inherited disease. In some embodiments, the genetically inherited disease is Meier-Gorlin syndrome. In some embodiments, the genetically inherited disease is Seckel syndrome 4. In some embodiments, the genetically inherited disease is Joubert syndrome 5. In some embodiments, the genetically inherited disease is Leber congenital amaurosis 10. In some embodiments, the genetically inherited disease is Charcot-Marie-Tooth disease, type 2. In some embodiments, the genetically inherited disease is leukoencephalopathy. In some embodiments, the genetically inherited disease is Usher syndrome, type 2C. In some embodiments, the genetically inherited disease is spinocerebellar ataxia 28. In some embodiments, the genetically inherited disease is glycogen storage disease type III. In some embodiments, the genetically inherited disease is primary hyperoxaluria, type I. In some embodiments, the genetically inherited disease is long QT syndrome 2. In some embodiments, the genetically inherited disease is Sjögren-Larsson syndrome. In some embodiments, the genetically inherited disease is hereditary fructosuria. In some embodiments, the genetically inherited disease is neuroblastoma. In some embodiments, the genetically inherited disease is amyotrophic lateral sclerosis type 9. In some embodiments, the genetically inherited disease is Kallmann syndrome 1. In some embodiments, the genetically inherited disease is limb-girdle muscular dystrophy, type 2L. In some embodiments, the genetically inherited disease is familial adenomatous polyposis 1. In some embodiments, the genetically inherited disease is familial type 3 hyperlipoproteinemia. In some embodiments, the genetically inherited disease is Alzheimer's disease, type 1. In some embodiments, the genetically inherited disease is metachromatic leukodystrophy. In some embodiments, the genetically inherited disease is cancer. In some embodiments, the genetically inherited disease is Uveitis. In some embodiments, the genetically inherited disease is SCA1. In some embodiments, the genetically inherited disease is SCA2. In some embodiments, the genetically inherited disease is FUS-Amyotrophic Lateral Sclerosis (ALS). In some embodiments, the genetically inherited disease is MAPT-Frontotemporal Dementia (FTD). In some embodiments, the genetically inherited disease is Myotonic Dystrophy Type 1 (DM1). In some embodiments, the genetically inherited disease is Diabetic Retinopathy (DR/DME). In some embodiments, the genetically inherited disease is Oculopharyngeal Muscular Dystrophy (OPMD). In some embodiments, the genetically inherited disease is SCAB. In some embodiments, the genetically inherited disease is C9ORF72-Amyotrophic Lateral Sclerosis (ALS). In some embodiments, the genetically inherited disease is SOD1-Amyotrophic Lateral Sclerosis (ALS). In some embodiments, the genetically inherited disease is SCA6. In some embodiments, the genetically inherited disease is SCA3 (Machado-Joseph Disease). In some embodiments, the genetically inherited disease is Multiple system Atrophy (MSA). In some embodiments, the genetically inherited disease is Treatment-resistant Hypertension. In some embodiments, the genetically inherited disease is Myotonic Dystrophy Type 2 (DM2). In some embodiments, the genetically inherited disease is Fragile X-associated Tremor Ataxia Syndrome (FXTAS). In some embodiments, the genetically inherited disease is West Syndrome with ARX Mutation. In some embodiments, the genetically inherited disease is Age-related Macular Degeneration (AMD)/Geographic Atrophy (GA). In some embodiments, the genetically inherited disease is C9ORF72-Frontotemporal Dementia (FTD). In some embodiments, the genetically inherited disease is Facioscapulohumeral Muscular Dystrophy (FSHD). In some embodiments, the genetically inherited disease is Fragile X Syndrome (FXS). In some embodiments, the genetically inherited disease is Huntington's Disease. In some embodiments, the genetically inherited disease is Glaucoma. In some embodiments, the genetically inherited disease is Acromegaly. In some embodiments, the genetically inherited disease is Achromatopsia (total color blindness). In some embodiments, the genetically inherited disease is Ullrich congenital muscular dystrophy. In some embodiments, the genetically inherited disease is Hereditary myopathy with lactic acidosis. In some embodiments, the genetically inherited disease is X-linked spondyloepiphyseal dysplasia tarda. In some embodiments, the genetically inherited disease is Neuropathic pain (Target: CPEB). In some embodiments, the genetically inherited disease is Persistent Inflammation and injury pain (Target: PABP). In some embodiments, the genetically inherited disease is Neuropathic pain (Target: miR-30c-5p). In some embodiments, the genetically inherited disease is Neuropathic pain (Target: miR-195). In some embodiments, the genetically inherited disease is Friedreich's Ataxia. In some embodiments, the genetically inherited disease is Uncontrolled gout. In some embodiments, the genetically inherited disease is Inflammatory pain (Target: Nav1.7 and Nav1.8). In some embodiments, the genetically inherited disease is Choroideremia. In some embodiments, the genetically inherited disease is Focal epilepsy. In some embodiments, the genetically inherited disease is Alpha-1 Antitrypsin deficiency (AATD). In some embodiments, the genetically inherited disease is Androgen Insensitivity Syndrome. In some embodiments, the genetically inherited disease is Opioid-induced hyperalgesia (Target: Raf-1). In some embodiments, the genetically inherited disease is Neurofibromatosis type 1. In some embodiments, the genetically inherited disease is Stargardt's Disease. In some embodiments, the genetically inherited disease is Dravet Syndrome. In some embodiments, the genetically inherited disease is Retinitis Pigmentosa. In some embodiments, the genetically inherited disease is Hemophilia A (factor VIII). In some embodiments, the genetically inherited disease is Hemophilia B (factor IX). In some embodiments, the genetically inherited disease is Parkinson's Disease.

### Linkers

[0151] In some embodiments, the linker is a polypeptide linker. In some embodiments, the linker is a non-peptide linker. In some embodiments, the linker comprises a polypeptide portion and a non-peptide portion. In some embodiments, the linker comprises an extended recombinant polypeptide (XTEN). In some embodiments, the linker comprises the amino acid sequence (Gly₄Ser)ₙ (SEQ ID NO: 33380), where n is an integer. In some embodiments, the linker comprises the amino acid sequence (Gly₄Ser)ₙ, wherein n is 1, 2, 3, 4, 5, 6, 7, 8, 9, or 10 (SEQ ID NO: 33381). In some embodiments, the linker comprises the amino acid sequence (Gly₄Ser)ₙ, wherein n is greater than 10 (SEQ ID NO: 33382). In some embodiments, the linker comprises a synthetic portion. In some embodiments, the linker comprises polyethylene glycol (PEG). In some embodiments, the linker is a synthetic linker. In some embodiments (Gly₂Ser)ₙ, wherein n is an integer. In some embodiments, the linker comprises the amino acid sequence (Gly₂Ser)ₙ, wherein n is 1, 2, 3, 4, 5, 6, 7, 8, 9, or 10 (SEQ ID NO: 33383). In some embodiments, the linker comprises the amino acid sequence (Gly₂Ser)ₙ, wherein n is greater than 10 (SEQ ID NO: 33384). In some embodiments, the linker comprises the amino acid sequence (Ser-Gly-Gly-Ser)ₙ (SEQ ID NO: 33385), where n is an integer. In some embodiments, the linker comprises the amino acid sequence (Ser-Gly-Gly-Ser)ₙ, wherein n is 1, 2, 3, 4, 5, 6, 7, 8, 9, or 10 (SEQ ID NO: 33386). In some embodiments, the linker comprises the amino acid sequence (Ser-Gly-Gly-Ser)ₙ, wherein n is greater than 10 (SEQ ID NO: 33387). In some embodiments the linker comprises the amino acid sequence (Glu-Ala-Ala-Ala-Lys)ₙ (SEQ ID NO: 33388), wherein n is an integer. In some embodiments, the linker comprises the amino acid sequence (Glu-Ala-Ala-Ala-Lys)ₙ, wherein n is 1, 2, 3, 4, 5, 6, 7, 8, 9, or 10 (SEQ ID NO: 33389). In some embodiments, the linker comprises the amino acid sequence (Glu-Ala-Ala-Ala-Lys)ₙ, wherein n is greater than 10 (SEQ ID NO: 33390). In some embodiments, the linker comprises a proline linker.

### Methods of the Disclosure

[0152] The present disclosure relates to a method of editing a genome using a genome editing system. The present disclosure also relates to the method of editing a genome using a genome editing system, wherein the genome editing system comprises i) an R2 element enzyme, and ii) a payload RNA; wherein the payload RNA comprises one or more of a 5′ homology region, a 3′ homology region, a protein binding element, and an insertion region; wherein the insertion region comprises a template for a small or large nucleic acid insertion into the genome; and wherein the R2 element enzyme comprises a targeting domain, a reverse transcriptase domain, and a nickase domain.

[0153] In some embodiments, the target genome is in a eukaryotic cell. In some embodiments, the targeted genome is in a mammalian cell. In some embodiments, the targeted genome is in a dividing mammalian cell. In some embodiments, the targeted genome is in a non-dividing cell. In some embodiments, the targeted genome is in a quiescent cell.

[0154] In some embodiments, the genome editing system targets a genomic position for deletion rather than editing. In some embodiments, the genome editing system targets a genomic site for deletion that is between 1 and 150 nucleotides. In some embodiments, the genome editing system comprises a payload RNA with a 5′ homology region and a 3′ homology region, wherein the 5′ homology region and the 3′ homology region, wherein the 5′ homology region and the 3′ homology region are positioned to delete the genomic target. In some embodiments, the genome editing system is capable of deleting a genomic target and inserting a novel nucleic acid region into the genome concurrently.

### Compositions

[0155] The present disclosure relates to compositions, wherein the composition comprises a cell, and wherein the cell comprises a genome that has been edited using a genome editing system.

### Sequences

[0156] Exemplary sequences of payload UTRs and target homologies are provided in Table 1.

TABLE 1
Exemplary payload UTRs and target homologies.

| | |
|---|---|
| Name | Sequence |

28S 5’ sequence

| | |
|---|---|
| 50 bp | ATTCAATGAAGCGCGGGTAAACGGCGGGAGTAACTATGAC |
| | TCTCTTAAGG (SEQ ID NO: 33391) |
| 30 bp | ACGGCGGGAGTAACTATGACTCTCTTAAGG (SEQ ID NO: |
| | 33392) |

5’ UTRs

| | |
|---|---|
| Full length 5’ UTR | GTCTAGTTACAACTGGGCATCGCTGCAGAGATCGCACCTC |
| R2Tg | CTCGTGGTCCCGCTGGTAGCCCTTCGAAGGGTGACTAAGT |
| | CGATCTCTGCCCCAGGTACGGAGCCGTTGGGACTCACCAG |
| | TCCAACGTAACTCCTGCCTAAATTCGGTGAAACAAATTCCT |
| | CGGTAAAAAGCCCC (SEQ ID NO: 33393) |
| truncated 5’ UTR | GTCTAGTTACAACTG (SEQ ID NO: 33394) |
| R2Tg | |
| Full length 5’ UTR | TCTAGTTACAACTGGGCATAGCTGCAGAGATCTCACCTCCT |
| R2Toc | CGTGGTCCCGCTGGTAAGCCCTTAACAGGGTGACTAAGTA |
| | GATCTCTGCCCCAGTCAAGGAGCCGCTGGGAATCACCAGC |
| | CCAGCGATTCCTTTCAAATTTAGGTGAAACAAATTTCTCGG |
| | TGTGGGTCGCAAGACTTACTACCTAAAACCTGGCCCCACG |
| | GTCTGACAGGGGCAACGGGTTCGGAGAT (SEQ ID NO: |
| | 33395) |
| truncated 5’ UTR | TCTAGTTACAACTGG (SEQ ID NO: 33396) |
| R2Toc | |
| Full length 5’ UTR | TCGGCGATGCTGAACCACCTCCTCGTGGTGCCGACTGGGC |
| nLTR1Mbr | AGCTTTGGAGAAATCCTAAGCTGGCTAAGAGTTCAGCAAC |
| | TCCTG (SEQ ID NO: 33397) |
| 28S/5' UTR truncation | gttgacgcgatgtgatttctgcccagtgctctgaatgtcaaagtgaagaaattcaatgaagcgcg |
| 1 | (SEQ ID NO: 33398) |
| 28S/5' UTR truncation | attcaatgaagcgcgggtaaacggcgggagtaactatgactctcttaaggtctagttacaactgg |
| 2 | (SEQ ID NO: 33399) |
| 28S/5' UTR truncation | atgactctcttaaggtctagttacaactgggcatcgctgcagagatcgcacctcctcgtggtccc |
| 3 | (SEQ ID NO: 33400) |
| 28S/5’ UTR truncation | cgctgcagagatcgcacctcctcgtggtcccgctggtagcccttcgaagggtgactaagtcgatc |
| 4 | (SEQ ID NO: 33401) |
| 28S/5' UTR truncation | gtagcccttcgaagggtgactaagtcgatctctgccccaggtacggagccgttgggactcacca |
| 5 | g (SEQ ID NO: 33402) |
| 28S/5' UTR truncation | cccaggtacggagccgttgggactcaccagtccaacgtaactcctgcctaaattcggtgaaacaa |
| 6 | (SEQ ID NO: 33403) |
| 28S/5' UTR truncation | gactcaccagtccaacgtaactcctgcctaaattcggtgaaacaaattcctcggtaaaaagcccc |
| 7 | (SEQ ID NO: 33404) |

Target homologies

| | |
|---|---|
| AAVS1 cargo 100 bp | AGGGCCGGTTAATGTGGCTCTGGTTCTGGGTACTTTTATCT |
| 5’ homology | GTCCCCTCCACCCCACAGTGGGGCCACTAGGGACAGGATT |
| | GGTGACAGAAAAGCCCCAT (SEQ ID NO: 33405) |
| AAVS1 cargo 100 bp | CCTTAGGCCTCCTCCTTCCTAGTCTCCTGATATTGGGTCTA |
| 3’ homology | ACCCCCACCTCCTGTTAGGCAGATTCCTTATCTGGTGACAC |
| | ACCCCCATTTCCTGGAGC (SEQ ID NO: 33406) |
| NOLC1 cargo 50 bp 5’ | TCCTGAGTCGTGCTGCGTCGACAACGGTAGTGACGCGTAT |
| homology | TGCCTGGAGG (SEQ ID NO: 33407) |
| NOLC1 cargo 50 bp 3’ | GCGGACGCCGGCATTCGCCGCGTGGTTCCCAGCGACCTGT |
| homology | ATCCCCTCGT (SEQ ID NO: 33408) |
| LMNB1 cargo 50 bp 5’ | GCCATGGCGACTGCGACCCCCGTGCCGCCGCGGATGGGCA |
| homology | GCCGCGCTGG (SEQ ID NO: 33409) |
| LMNB1 cargo 50 bp 3’ | CGGCCCCACCACGCCGCTGAGCCCCACGCGCCTGTCGCGG |
| homology | CTCCAGGAGA (SEQ ID NO: 33410) |
| EMX1 cargo 50 bp 5’ | GAGGACATCGATGTCACCTCCAATGACTAGGGTGGGCAAC |
| homology | CACAAACCCA (SEQ ID NO: 33411) |
| EMX1 cargo 50 bp 3’ | CGAGGGCAGAGTGCTGCTTGCTGCTGGCCAGGCCCCTGCG |
| homology | TGGGCCCAAG (SEQ ID NO: 33412) |

[0157] Exemplary sequences of Cas9 guides are provided in Table 2.

TABLE 2
Exemplary Cas9 guides

| Name | Sequence | SEQ ID NO: |
|---|---|---|
| AAVS1_guide_1 A1 | gAAGGAGGAGGCCTAAGGATG | 33413 |
| AAVS1_guide_2 A2 | gCTGTCCCCTCCACCCCACAG | 33414 |
| AAVS1_guide_3 A3 | gATATCAGGAGACTAGGAAGG | 33415 |
| AAVS1_guide_4 A4 | gAGGGCCGGTTAATGTGGCTC | 33416 |
| AAVS1_guide_5 A5 | gCTAGTGGCCCCACTGTGGGG | 33417 |
| AAVS1_guide_6 A6 | GAAGGAGGAGGCCTAAGGAT | 33418 |
| AAVS1_guide_7 A7 | GGAAGGAGGAGGCCTAAGGA | 33419 |
| AAVS1_guide_8 A8 | GTCCCCTCCACCCCACAGTG | 33420 |
| AAVS1_guide_9 A9 | gACTAGGAAGGAGGAGGCCTA | 33421 |
| NOLC1_guide_1 N1 | GAGTCGTGCTGCGTCGACAA | 33422 |
| NOLC1_guide_2 N2 | gCGGTAGTGACGCGTATTGCC | 33423 |
| NOLC1_guide_3 N3 | gTAGTGACGCGTATTGCCTGG | 33424 |
| NOLC1_guide_4 N4 | GACGCGTATTGCCTGGAGGA | 33425 |
| NOLC1_guide_5 N5 | GCGTATTGCCTGGAGGATGG | 33426 |
| NOLC1_guide_6 N6 | GCCTGGAGGATGGCGGACGC | 33427 |
| NOLC1_guide_7 N7 | GCCGGCGTCCGCCATCCTCC | 33428 |
| NOLC1_guide_8 N8 | GGGAACCACGCGGCGAATGC | 33429 |
| NOLC1_guide_9 N9 | gACAGGTCGCTGGGAACCACG | 33430 |
| NOLC1_guide_10 N10 | gACGAGGGGATACAGGTCGCT | 33431 |
| NOLC1_guide_11 N11 | gCACGAGGGGATACAGGTCGC | 33432 |
| NOLC1_guide_12 N12 | gAGCCGAGCACGAGGGGATAC | 33433 |
| LMNB1 g1 | GCTGTCTCCGCCGCCCGCCA | 33434 |
| LMNB1 g2 | gCTGCGACCCCCGTGCCGCCG | 33435 |
| LMNB1 g3 | GACCCCCGTGCCGCCGCGGA | 33436 |
| LMNB1 g4 | gACCCCCGTGCCGCCGCGGAT | 33437 |
| LMNB1 g5 | gCCGCGGATGGGCAGCCGCGC | 33438 |
| LMNB1 g6 | gCGGATGGGCAGCCGCGCTGG | 33439 |
| LMNB1 g7 | gTGGGGCTCAGCGGCGTGGTG | 33440 |
| LMNB1 g8 | gCGTGGGGCTCAGCGGCGTGG | 33441 |
| LMNB1 g9 | GACAGGCGCGTGGGGCTCAG | 33442 |
| LMNB1 g10 | GGAGCCGCGACAGGCGCGTG | 33443 |
| LMNB1 g11 | gTGGAGCCGCGACAGGCGCGT | 33444 |
| LMNB1 g12 | gCCTTCTCCTGGAGCCGCGAC | 33445 |
| EMX1 g1 | GGGCAACCACAAACCCACGA | 33446 |
| EMX1 g2 | gAAGCAGCACTCTGCCCTCGT | 33447 |
| EMX1 g3 | gCAAGCAGCACTCTGCCCTCG | 33448 |
| EMX1 g4 | gCTTGGGCCCACGCAGGGGCC | 33449 |
| EMX1 g5 | gTCCAGCTTGGGCCCACGCAG | 33450 |
| EMX1 g6 | GTCCAGCTTGGGCCCACGCA | 33451 |
| EMX1 g7 | GAGTGGCCAGAGTCCAGCTT | 33452 |

[0158] Exemplary sequences of NGS, gel primers, and Sanger primers are provided in Table 3.

TABLE 3
Exemplary NGS, gel primers, and Sanger primers.

| Name | Sequence | SEQ ID NO: |
|---|---|---|
| GLuc cargo reporter 28S 5′ | ACACTCTTTCCCTACACGACGCTCT | 33453 |
| junction stagger 1 Forward | TCCGATCTCCAGGTAAGTATCAAGG | |
| | TTACAAGACAGG | |
| GLuc cargo reporter 28S 5′ | ACACTCTTTCCCTACACGACGCTCT | 33454 |
| junction stagger 2 Forward | TCCGATCTACCAGGTAAGTATCAAG | |
| | GTTACAAGACAGG | |
| GLuc cargo reporter 28S 5′ | ACACTCTTTCCCTACACGACGCTCT | 33455 |
| junction stagger 3 Forward | TCCGATCTGACCAGGTAAGTATCAA | |
| | GGTTACAAGACAGG | |
| GLuc cargo reporter 28S 5′ | ACACTCTTTCCCTACACGACGCTCT | 33456 |
| junction stagger 4 Forward | TCCGATCTTGACCAGGTAAGTATCA | |
| | AGGTTACAAGACAGG | |
| GLuc cargo reporter 28S 5′ | GTGACTGGAGTTCAGACGTGTGCTC | 33457 |
| junction in 5′ Tg UTR | TTCCGATCTCTGGTGAGTCCCAACG | |
| Reverse | GCTC | |
| GLuc cargo reporter 28S 5′ | GTGACTGGAGTTCAGACGTGTGCTC | 33458 |
| junction scarless Reverse | TTCCGATCTCACAGATCGACCTGTG | |
| | GAGAGAAAG | |
| GLuc cargo reporter 28S 5′ | GTGACTGGAGTTCAGACGTGTGCTC | 33459 |
| junction non-inserted | TTCCGATCTGAGGGATCTGCGGCCG | |
| Reverse | CTT | |
| Genomic AAVS1 5′ junction | ACACTCTTTCCCTACACGACGCTCT | 33460 |
| Forward | TCCGATCTCCGAGCTGGGACCACCT | |
| | TATATTC | |
| Genomic AAVS1 5′ junction | GTGACTGGAGTTCAGACGTGTGCTC | 33461 |
| scarless Reverse | TTCCGATCTCGTTGGCAAGCCCTTT | |
| | GAGGCA | |
| Genomic AAVS1 5′ junction | GTGACTGGAGTTCAGACGTGTGCTC | 33462 |
| non -inserted Reverse | TTCCGATCTCCCTCCCAGGATCCTC | |
| | TCTGGC | |
| Genomic NOLC1 5′ junction | ACACTCTTTCCCTACACGACGCTCT | 33463 |
| Forward | TCCGATCTCAATGACGTAACACAGG | |
| | CCCGC | |
| Genomic NOLC1 5′ junction | GTGACTGGAGTTCAGACGTGTGCTC | 33464 |
| scarless Reverse | TTCCGATCTTCCTGTCGCTTTGGCG | |
| | AACTTATTG | |
| Genomic NOLC1 5′ junction | GTGACTGGAGTTCAGACGTGTGCTC | 33465 |
| non-inserted Reverse | TTCCGATCTCGAGCACGAGGGGATA | |
| | CAGGTC | |
| pMax cargo genomic 28S 5′ | CCCACCCCACGTCTCGTCGCG | 33466 |
| junction gel Forward | | |
| pMax cargo genomic 28S 5′ | CCGAAGTGGTAGAAGCCGTAGC | 33467 |
| junction gel Reverse | | |
| pMax cargo genomic 28S 3′ | GCCCGCACCTTCAGCCTOCGC | 33468 |
| junction gel Forward | | |
| pMax cargo genomic 28S 3′ | TCCGATCTGCCGGGGGCCTCCCACT | 33469 |
| junction gel Reverse | TATT | |
| GLuc cargo reporter 28S 5′ | CCAGGTAAGTATCAAGGTTACAAGA | 33470 |
| junction Forward | CAGG | |
| GLuc cargo reporter 28S 5′ | CCACCTGGCCCTGGATOTTGCTGGC | 33471 |
| junction Reverse | AAAG | |
| GLuc cargo reporter 28S 3′ | TAAGGAGACCAATAGAAACTGGGCT | 33472 |
| junction Forward | TGTCGAGACAGAGAAG | |
| GLuc cargo reporter 28S 3′ | CACCGGCCTTATTCCAAGCGGCTTC | 33473 |
| junction Reverse | GGC | |

[0159] Exemplary sequences of ddPCR primers and probes are provided in Table 4.

TABLE 4
Exemplary ddPCR primers and probes.

| | | SEQ ID |
|---|---|---|
| Name | Sequence | NO: |
| NOLC1 Endogenous locus | TGGAGCCCACCCTTTCCGT | 33474 |
| ddPCR Forward | | |
| LMNB1 Endogenous locus | TCCTTATCACGGTCCCGCT | 33475 |
| ddPCR Forward | CG | |
| EMX1 Endogenous locus | GCATTGCCACGAAGCAGG | 33476 |
| ddPCR Forward | | |
| EGFP R2 cargo ddPCR | GAACTCCACGCCGTTCA | 33477 |
| Reverse | | |
| EGFP R2 cargo ddPCR | /56-FAM/CC ATG AAG | 33478 |
| FAM probe | A/ZEN/T CGA GTG CCG | |
| | CAT CA/3IABkFQ/ | |

[0160] Having now described the present disclosure in detail, the same will be more clearly understood by reference to the following examples. The following examples are included solely for purposes of illustration and are not considered limiting embodiments. All patents and publications referred to herein are expressly incorporated by reference.

### EXAMPLES

### Example 1. Insertion of Non-Human R2 into the 28S Locus of the Human Genome

[0161] To determine the ability of animal R2 elements to integrate into the human genome, HEK293FT cells were transfected with specific plasmids containing the zebra finch (Taeniopygia guttata) R2 element (R2Tg), a payload, or both the R2tg plasmid and a payload plasmid. Following isolation of DNA from transfected cells, those cells transfected with an R2Tg plasmid and an eGFP payload (eGFP flanked by UTR regions and 100 bp homology to the human R2 locus), showed a distinct PCR product (FIG. 1, lane 1), indicating integration of the eGFP payload into the human genome through R2Tg. When cells were transfected with R2Tg without a payload (FIG. 1, lane 2), payload alone with no R2 (FIG. 1, lanes 3, 8, 9), or other R2 orthologs from Geospiza fortis (Gfo; FIG. 1, lane 3-5) with or without payloads, no PCR product is identified These results demonstrate that R2Tg can successfully integrate payloads into the human genome.

### Example 2. Modification of the Target Landing Site

[0162] Following successful insertion of an eGFP payload, the features of the R2 system that could increase integration efficiency were examined. In the following experiments, unless otherwise stated, three plasmids are used. The first plasmid contains at least an R2 protein. The second plasmid contains at least a portion of a payload reporter. The third plasmid contains at least R2 landing sites.

[0163] The R2 landing site plasmids contain R2 landing sites of variable size. This size is indicated in the format 26/3 (FIG. 2), where the first number indicates the number of base pairs upstream of the insertion site, and the second number indicates the number of base pairs downstream of the insertion site.

[0164] Following transfection of these three plasmids with varying length of R2 landing sites, integration was measured by luminescence, indicating integration of the luminescent payload (FIG. 2). of an artificial luciferase exon (introduced only with the payload) that allows the inserted reporter to splice and reconstitute a functional luciferase gene (FIG. 2). The payload, which is RNA, is transcribed from a DNA (payload plasmid template) where an artificial luciferase exon is flanked by 5′ and 3′ UTRs as and 5′ and 3′ homologies. Two negative controls (FIG. 2, lanes 11-12) exhibited little luminescence. The landing site which proved to be the most efficient for integration was 26/6 (FIG. 2, lane 6; 26 bp upstream, 6 bp downstream of the insertion site). Given that the normal target site at the 28S locus in the human genome is hundreds of base pairs, it is unexpected that the shorter landing sites tested here provided such efficient integration.

[0165] Next, the tolerability of mutations within the R2 landing sites was tested. FIG. 3A displays the predicted zinc finger binding sites (red) within the R2 landing sites and the mutations tested (orange, lowercase bases). FIG. 3 B shows that there is a great deal of tolerability within the R2 landing sites that still allows for integration. FIG. 4 shows additional mutations that may be tolerated. However, mutation of all three, predicted zinc finger binding sites results in abrogated insertion efficiency (FIG. 4B, target_37_23_mut_10). Based on this evidence, a great degree of tolerability for mutations away from the traditional R2 landing sites is found and can help in the development of exogenous landing sites.

### Example 3. Modification of the Payload Homology Regions

[0166] After determining that short landing sites could provide for efficient integration, the effect of insertion homology length (to the landing sites) on integration efficiency was evaluated. To test the effect of homology length on integration efficiency, HEK293FT cells were transfected with three separate plasmids. The first plasmid contained an R2 protein encoding region, the second plasmid encoded a partial (inactive) luciferase reporter region and R2 landing sites, and the third plasmid encoded a luciferase insertion as well as regions of homology of varying number of base pairs homologous to the R2 landing site in the second plasmid. Cells were then treated with aphidicolin, which blocks cell division and thus also stops Homology Directed Repair (HDR). Without being bound to any one theory, by blocking HDR, integration is more likely to occur due to an R2 related mechanism.

[0167] When treated with 1 μm, 5 μm, or 25 μm aphidicolin (or DMSO control) (FIG. 5), plasmids with either 60 base pair homology (FIG. 5, columns 1-4) or 40 base pair homology (FIG. 5, columns 5-8) still exhibited successful integration, indicating that the integration of these payloads occurs by an HDR-independent mechanism.

[0168] When flanking regions (UTR and additional homology region) were increased in size to 100 bp (FIG. 6, columns 1-4), 200 bp (FIG. 6, columns 5-8), or 300 bp (FIG. 6, columns 9-12) and treated with aphidicolin at 1 μm, 5 μm, or 25 μm (or DMSO control), a significant improvement in integration efficiency is exhibited with longer flanking regions (FIG. 6). When transfected with Cas9 only, no integration was seen. Cells were also transfected with a 300 bp flanking template and no R2 protein (FIG. 6, lanes 13-16) to measure the level of HDR in the system.

[0169] An overview of the role homology of the payload plays in integration efficiency (as measured by luminescent readout) is seen in FIG. 7. Greater 5′ homology (y-axis) to the R2 landing site is associated with more efficient integration. This is not the case for 3′ homology (x-axis), which is less clear, but indicates that shorter homology results in more efficient integration in some cases.

[0170] Also, the effect of truncations of the 5′ and 3′UTRs from the payload portion (FIG. 8) on integration efficiency was examined. Three plasmids were transfected into HEK293FT cells. The first plasmid contained a partial luciferase reporter with wild-type R2 landing sites (wtR2) of 26/22 bp. The second plasmid encoded an R2 protein. The third plasmid contained a luciferase payload with the UTR modifications listed along the x-axis. Generally, 3′ UTR (FIG. 8, columns 16-29) truncations resulted in greater integration efficiency (as measured by luminescence readout) than 5′ UTR truncations (FIG. 8, columns 3-15). The greatest increases in integration efficiency were seen in truncations greater than 90 base pairs. Nearly all truncations, however, retained some form of integration activity.

[0171] Next, we evaluated how solely altering the 3′ homology regions would affect integration efficiency. In this experiment, HEK293FT cells were transfected with 3 plasmids. The first plasmid contained an R2 protein encoding region. The second plasmid contained a partial luciferase reporter with wtR2 landing sites. The third plasmid contained a luciferase insertion with alterations to the 3′ UTR, as named on the x-axis (FIG. 9A) and described visually in FIG. 9B. HDV is an HDV ribozyme, which cleaves the insertion region directly after the 3′ UTR. mutHDV is an inactive HDV, incapable of cleaving the homology region just beyond the 3′UTR. All modifications retained significant activity, except for the HDV only modification This indicates that cleavage directly beyond the 3′UTR in the homology region (i.e., no further homology region remains), dramatically decreased integration efficiency (FIG. 9A, column 3). This is in concert with the discoveries above, where a minimal (but not absent) 3′ homology region is required for significant integration efficiency.

### Example 4. Modification of the R2 Enzyme

[0172] Next, we evaluated whether modifications to the R2 protein could increase integration efficiency. First, permissible domains within the R2 protein into or onto which various additional moieties could be fused were identified. As before, three plasmids were introduced into HEK293FT cells. The first plasmid contained an R2 protein which contained different GFP variants at different points along the R2 protein. The second plasmid encoded a partial (inactive) luciferase reporter region and R2 landing sites, and the third plasmid encoded a luciferase insertion as well as regions of homology to the R2 landing site in the second plasmid.

[0173] These variant R2 proteins were modified by inserting GFP variants throughout the length of the protein, beginning from the N-terminus. By example, LNK1_1 is located closer to the N-terminus than is LNK1_7. LNK_nt indicates a fusion to the N-terminus, while LNK_ct indicates a fusion to the C-terminus. As seen in FIG. 10, an N-terminal fusion of eGFP resulted in the greatest integration efficiency, suggesting that this fusion may be ideal for additional fusion molecules. However, multiple “permissive insertion sites” were identified in FIG. 10, including R2Tg_LNK1_1, R2Tg_LNK1_2, R2Tg_LNK1_3, R2Tg_LNK1_4, R2Tg_LNK1_5, R2Tg_LNK2_1, R2Tg_LNK2_3, R2Tg_LNK2_9 and R2Tg_LNK2_10 (FIG. 10).

[0174] The matter of whether R2 could integrate a payload using a “short target”-truncated R2 landing sites (26/3 bp) was investigated. FIG. 11 exhibits the ability of R2 to deliver a payload even given this short landing site (FIG. 11, column 1).

[0175] Also, the matter of whether the addition of a nuclear localization signal would increase integration efficiency at the Beta-actin locus of HEK293FT cells (FIG. 12) was examined. HEK293FT cells were transfected with four separate plasmids. The first plasmid encoded an R2 protein. The second plasmid contained pMAX as a payload (including 5′ and 3′ UTRs, as well as 5′ and 3′ homologies) for R2-dependent insertion. The third plasmid encoded a prime editor protein, and the fourth plasmid expressed a prime editing guideRNA. The prime editor first inserts a 48 bp (28S) target site in ACTB to then, in a second step, R2-dependent insertion of the pMAX payload.

[0176] After determining the ability of a nuclear localization signal to boost integration, the primary localization of transfected R2 proteins into HEK293FT cells was evaluated. FIG. 13A shows that R2 does not primarily localize to the nucleus of the cell. However, when HEK293Ft cells were transfected with two plasmids (the first an R2 protein, the second a payload protein) into cells that had been stably transfected to integrate a portion of the splice reporter, addition of a nuclear localization signal to the N- and C-terminus of the R2 protein dramatically increased payload insertion efficiency (FIG. 13B).

[0177] Thus, modifying the R2 protein portion can allow for greater integration efficiency. To further study integration efficiency, a fluorescent GFP reporter responsive to R2 activity (FIG. 14) was developed. The R2 reporter that was developed has a single GFP exon and promoter that is not activated until the R2 payload, with a second GFP exon, is integrated (FIG. 14A, B). Thus, R2 integration can be read by a fluorescent readout.

[0178] Using this fluorescent readout approach, the efficiency of integration was evaluated using flow cytometry. HEK293FT cells were transfected with specific plasmids. These samples were wild-type R2 (FIG. 15A, column 1), a negative control (FIG. 15A, no R2 protein; column 2), 300 ng of R2 with a nuclear localization signal (FIG. 15A, column 3), 200 ng of R2 with a nuclear localization signal (FIG. 15A, column 4), 100 ng of R2 with a nuclear localization signal (FIG. 15A, column 5), 50 ng of R2 with a nuclear localization signal (FIG. 15A, column 5), and untransfected cells as a percentage of all cells in each sample. The results shown in FIG. 15A clearly demonstrate the increased integration efficiency of R2 proteins with a nuclear localization signal compared to wild type R2 without a nuclear localization signal. This increase persists when the GFP+ cells are normalized to only those cells that were successfully transfected (FIG. 15B).

[0179] Next, the matter of whether the truncation of the R2 protein resulted in alteration of integration efficiency was studied. The N-terminal portion of the R2 protein was serially truncated, as indicated by the vertical lines in FIG. 16B. These truncations did not result in any significant drop in integration efficiency until reaching NT_7, which demarcates the current limit of truncation for a single R2 protein to maintain integration efficiency.

[0180] Also, the matter of whether C-terminal truncations of the R2 protein may result in viable R2 proteins that sustain integration efficiency (FIG. 17) was evaluate. However, even the shortest C-terminal truncation resulted in a drastic decrease in integration efficiency, highlighting the importance of the C-terminal domains in contrast to the somewhat expendable N-terminal domains (FIG. 17A, 17B).

[0181] The issue that ablation of the restriction-like endonuclease (RLE) domain would affect integration activity was then studied. HEK293FT cells were transfected by three plasmids. The first plasmid contains a partial luciferase reporter with wtR2 landing sites (26/22 bp). The second plasmid encodes either a wild type R2 protein or an RLE deficient R2 protein. The third plasmid encodes a luciferase payload. Absence of the RLE domain in the R2 protein almost completely abolishes the integration efficiency of a wild-type R2 protein (FIG. 18, column 3).

[0182] Finally, the matter of whether certain other domains of the R2 protein could be removed or modified without adverse effect. was evaluated. FIG. 19. Displays the results of an experiment in which HEK293FT cells were transfected with 3 plasmids. The first plasmid encoded a partial luciferase reporter with wtR2 landing sites. The second plasmid encoded a luciferase payload. The third plasmid encoded an R2 protein with various modifications, including to the −1 domain, 0 domain, zinc finger domains, or to add C- or N-terminal fusions. Three payloads were examined for each modified group of plasmids. A wild type luciferase payload (orange), a luciferase payload in which the MS2 binding site replaces the 5′UTR, and a luciferase payload in which the 5′ and 3′UTRs are replaced with MS2 binding sites. Deletion of the −1 domain (FIG. 19, columns 1-3), of the −1 and 0 domains (FIG. 19, columns 4-6) and of the 0 domain alone (FIG. 19, columns 7-9) significantly impaired integration efficiency. Further, replacing the 0 domain with an eGFP (FIG. 19, columns 10-12) or with an MCP domain (FIG. 19, columns 13-15) also significantly decrease integration efficiency, as did deleting a zinc finger domain (FIG. 19, columns 19-21). However, fusing the truncated N-terminus of the R2 protein to an MCP domain (i.e., a targeting domain) did show some integration efficiency, though not to the level of wild type. This experiment helps to define the indispensable domains for the R2 protein, and where modifications may be made.

### Example 5. Modification of Payloads

[0183] This Example tested whether the payload itself could be modified to sustain nuclear localization. FIG. 20 sets out the relative insertion efficiency of payloads with various nuclear retention elements appended to the payload. Nuclear retention signals have varying levels of effect on the integration efficiency of the R2 payloads, indicating that nuclear localization may be important for optimal integration activity.

[0184] Further, whether the UTR elements of the payload were necessary for their integration, or if they may be modified, was studied. In this experiment, HEK293FT cells were transfected with three plasmids. The first plasmid encoded an R2 protein. The second plasmid encoded a partial luciferase reporter and wtR2 landing sites. The third plasmid contained the luciferase payload and any of many UTR modifications (FIG. 21). UTRs were replaced by MS2 binding sites (FIG. 21, columns 1, 2, and 4), the 3′UTR was deleted (FIG. 21, column 3), the 5′ UTR replaced by an MS2 binding site while the 3′UTR is deleted (FIG. 21, column 5), the 5′ and 3′ UTR were both deleted (FIG. 21, column 6), the 5′UTR is deleted and the 3′UTR is replaced with an MS2 binding site (FIG. 21, column 7), as well as positive and negative controls (FIG. 21, columns 8 and 9, respectively). In each situation some integration activity was confirmed. Importantly, this also occurred in which both the 5′ and 3′ UTRs were deleted without any replacement (FIG. 21, column 6).

### Example 6. Linkers and Fusion Proteins

[0185] Also, the evaluation of R2 fusion proteins and fusion proteins with linkers were viable for use in genome editing was carried out. In this experiment, HEK293FT cells were transfected with 3 plasmids. The first plasmid contained an R2 protein (with or without an NLS) fused to a Cas9 protein connected by an XTEN linker (16 amino acids in length) at various points through the N-terminal portion of the R2 protein (see FIG. 22B). The second plasmid contains a luciferase reporter that is designed to indicate cleavage by Cas9. The third plasmid expresses a single guide RNA. Multiple Cas9-R2 fusion proteins exhibited the ability to cleave the Cas9 target protein, either with or without the nuclear localization signal (FIG. 22A).

[0186] Lastly, the determination of whether these Cas9-R2 fusion proteins were capable of editing human genomes was carried out. HEK293FT cells were stably transfected with a eGFP precursor gene with a 20 bp deletion. As such, the reporter is inactive until the 20 base pairs are inserted into the precursor. FIG. 23A-N exhibit integration and editing efficiency based on the expression of eGFP in these cells. This indicates that the large-scale insertion mechanism of R2 can function in concert with the targeted editing enzyme Cas9 for editing a human genome.

### Example 7. Computational Analysis of Single-ORF Retroelements

[0187] The ORFs of 4,464 eukaryotic assemblies (animals and protists) from GenBank for RT, CCHC zinc finger, and RLE domains of known retroelements were also examined. Using a computational pipeline (FIG. 24A) we searched for single protein site-specific non-LTR retrotransposons based on their stereotyped architecture of C-terminal RLE and RT domains as a signature. We identified 8,248 RLE-domain containing representative orthologs (FIG. 24) with diverse RT domains, ZF motifs, and predicted insertion preferences, which clustered into 9 families based on phylogenetic analysis and the presence or absence of flanking rRNA sequences, microsatellite repeats, tRNA genes, or splicing RNAs (Table 1).

[0188] We found that families varied in length, with the longer family 3 and 5 ORFs having mean lengths of 1,390 and 1,280 residues, respectively, and family 4 containing shorter ORFs, with a mean length of 966 residues (FIG. 24B, 24C; FIG. 25; Table 1).

[0189] The distance to the predicted insertion site, which is indicative of UTR length, also varied substantially, with family 1, 8, and 9 having the least distance between up and downstream annotations and ORF, suggesting shorter UTR lengths (Fig. S1C). While families 1, 3, 5, 6, 7, 8, and 9 associate with previously identified orthologs and subfamilies, families 2 and 4 had no association to known subfamilies (Table 5).

TABLE 5
Summary of characteristics of non-LTR RLE containing retrotransposon families

| | Mean | Mean | | | | | |
|---|---|---|---|---|---|---|---|
| | Length | Length for | Mean | | | | |
| | for full | ORF | distance to | Association | | | 5′ and 3′ |
| | ORF | starting at | target | with known | Integration | RT | homology |
| Family | (bp) | Methioine | (UTR) (bp) | orthologs? | target | architecture | agree? |
| 1 | 1108 | 1055 | 91 | ✓ | 28S, 18S | Non-LTR | x |
| 2 | 1027 | 983 | 778 | x | unknown | Non-LTR | ✓ |
| 3 | 1558 | 1390 | 818 | ✓ | 5S, leader | RT-like | ✓ |
| 4 | 988 | 966 | 666 | x | Tandem | RT-like | ✓ |
| | | | | | repeat | | |
| 5 | 1403 | 1280 | 704 | ✓ | snRNA, | Non-LTR | x |
| | | | | | tRNA | | |
| 6 | 1103 | 1016 | 845 | ✓ | Tandem | Non-LTR | ✓ |
| | | | | | repeat | | |
| 7 | 1185 | 1138 | 584 | ✓ | tRNA | Non-LTR | ✓ |
| 8 | 1262 | 1220 | 351 | ✓ | 28S | Non-ETR | ✓ |
| 9 | 1199 | 1200 | 411 | ✓ | Tandem | Non-LTR | ✓ |
| | | | | | repeat | | |

[0190] We next examined the preferred integration sites for these families. Family 1 exhibited a preference for integrating into 28S and 18S rRNA gene sites; family 3 exhibited a preference for integrating into 5S and likely spliced leader sequences; families 4, 6, and 9 exhibited a preference for integrating into tandem repeats and microsatellites, including novel repeat sequences; family 5 exhibited a preference for integrating into snRNA gene loci and some tRNA preferences; family 7 exhibited a preference for integrating into tRNA; and family 8 exhibited a preference for integrating into 28S loci (Table 1). Family 2 has an unknown integration site preference. Accordingly, the zinc finger motifs across these different families are divergent (FIG. 24B, 24C).

[0191] Clusters showed two reverse transcriptase (RT) architectures, with families 3 and 4 containing broad RT-like domains, and all other families containing more specific non-LTR retrotransposon RT domains (FIG. 24A, 24B). In contrast to previous efforts profiling RLE-containing non-LTR retrotransposon diversity (Kojima, et al., PLoS One. 11, e0163496 (2016); Eickbush et al., PLoS One. 8, e66441 (2013); Luchetti, et al., PLoS One. 8, e57076 (2013)), our computational expansion covers an order of magnitude more orthologs than the 418 surveyed before (Kojima et al., Genes Genet. Syst. 94, 233-252 (2020); Bao et al., Mob. DNA. 6, 11 (2015).), allowing discovery of families with multiple integration preferences, such as in family 1, where 5S rDNA preferences are interspersed between 28S preferences, or families with discordance between 5′ and 3′ site predictions, such as in family 5.

[0192] We next investigated retroelements which had discordant 5′ and 3′ homologies. We found multiple instances of discordant homologies, including in family 1, which has members with 5′ small subunit rRNA preferences and 3′ large subunit rRNA preferences, and family 5 which contains systems with 5′ SL1 splicing leader preferences and 3′ U2 small nuclear RNA (snRNA) target preferences (FIG. 26). Our analysis revealed two broad classes of insertions, which we termed Class 1 and Class 2 based on the nature of surrounding elements (FIG. 26A, 26B). Class 1 insertions include ORFs with a canonical target site on one side and a different target gene on the other side. In contrast, Class 2 insertions involve canonical integration into a target site flanking the ORF retrotransposon, with additional putative insertion targets nearby.

[0193] To elucidate divergent target preferences, Rfam annotations were made around all members (FIG. 24A-B, 62, 63) and the results show 188 systems clustering into 39 groups with divergent target preferences (FIG. 52, 53). Many of these divergent protein families show one dominant target site preference with a subset of member systems displaying new preferences such as a change from a 5S to tRNA site preference (FIG. 53).

[0194] We also heterologously reconstituted site-specific retrotransposition in human cells to model integration preferences and retargeting in eukaryotic genomes. We synthesized a panel of 12 retrotransposon ORFs from our computational exploration, selecting a sample that included R2 elements with demonstrated activity in mammalian cells (R2Ol) (A. Kuroki-Kami, et al. 2019 Mob. DNA. 10, 23; Su, et al., 2019. RNA. 25, 1432-1438), experimentally characterized retrotransposon groups without proven activity in mammalian cells (R2Bm), previously computationally described retrotransposons (R2Ci, R2Tg, R2Is, R2Pap, R2Dr, R2Tsp, HeroDr) (Kojima et al., 2016 PLoS One. 11, e0163496), and novel retrotransposons (R10Mbr, R2Toc, R2Mes) (Table 6), which all ranged in sequence similarity between 13%-67% (FIG. 27, 64A-E). R10Mbr, which occurs in the genome of Myotis brandtii, appeared to integrate in GTA microsatellites (FIG. 28) and lacked similarity to integration preferences to other families. As such it was designated as a putative R10 family member.

[0195] To evaluate the native targeting capacity of these candidates for the 28S loci, we developed a plasmid reporter containing 200 bp of the 28S target with upstream expression of the N-terminus of Gaussia luciferase (Gluc) and delivered a payload containing an exon with 28S homology, predicted UTRs for corresponding orthologs, and a C-terminal Gluc fragment. This system enabled readout of insertion efficiency by luciferase production, and we found that only a limited subset (R2Bm, R2Tg, and R2Mes) had native activity from insertion of this heterologous Gluc cargo in HEK293FT cells (FIG. 29A) as measured by luciferase reporter reconstitution. Interestingly, R2Ol, which has previously been demonstrated to be active for 28S genome insertion (Su, et al., 2019. RNA. 25, 1432-1438), did not have activity in the luciferase reconstitution assay (FIG. 29A). As suggested by the predicted R10Mbr preference for microsatellites, we did not see any production of luciferase in these conditions. To confirm that R10Mbr did not integrate into any putative 28S sites, we evaluated a panel of 28S sites known to have insertion by various site-specific retroelements and found no insertion at the tested 28S targeting sites, including in a 28S region with similarity to sequence flanking the R10Mbr locus (FIG. 29B-C, 65A-B), validating our assignment to a novel R10 family that prefers GTA microsatellites, which do not occur in the human genome (Subramanian et al., 2003. Genome Biol. 4, R13). R10Mbr and R2Toc, which occurs in the Talpa occidentalis genome, are both found in mammalian genomes.

TABLE 6
Exemplary non-LTR retrotransposon orthologs

| | | | SEQ | | SEQ | | SEQ | |
|---|---|---|---|---|---|---|---|---|
| Host | | | ID | Predicted | ID | Predicted | ID | |
| Name | Abvn | Protein | NO: | 5′ UTR | NO: | 3′ UTR | NO: | Accession |
| Daniorerio | Hero | MTTHRAEVTTSGKTQEE | 33479 | TTCAAGCCTG | 33491 | TGATCAACCC | 33501 | LR812084.1 |
| | DR | PGPEATHSAQSLLVSPT | | GCGCAGCCAG | | CGGCTGGGTC | | |
| | | PAAGRSP | | TGACTCCTAG | | ACCTGGGTGA | | |
| | | ATQSCPQVTAAHNSPQS | | GAATAGACTA | | GAGTGTATGA | | |
| | | PQSQQVAVTRSDCVPLA | | GGTGGCAACC | | TGTTGAGAGA | | |
| | | QPRIQWP | | AAGAATAGTT | | CCCGAAACAC | | |
| | | QSSKKAEWLQFDKDVNQ | | TGGTCGACTA | | TCAATGATCC | | |
| | | ILEVTGKGGVDQRLSTM | | CTGGAGAGAC | | CAGGATACAT | | |
| | | TTLIVNI | | AGTTGACGGC | | CACTGATGAT | | |
| | | AAERFGTVTPKPTPSTY | | ACGGAAAGAC | | GTGTCCCAAA | | |
| | | TPSHRVKEIKRLRKELK | | GGCACTTGGG | | TGCATCCATG | | |
| | | LLKRQYK | | ACAGTATGGG | | AGATGTTTCT | | |
| | | AAGEVERAGLEDLRGIL | | TTAGCACCCC | | TGCATAA | | |
| | | RKQLVNLCRAEYHRKRR | | GACCTGTGTC | | | | |
| | | RERARKR | | TTTCGTGAGA | | | | |
| | | AAFLANPFKLTKQLLGQ | | GAGAACCCAA | | | | |
| | | KRTGKLTCSKEAINNHL | | ACAAGCTACG | | | | |
| | | KATYSDP | | GAAAGCCCCA | | | | |
| | | NREQPLGPCGALLTPPE | | CAGAGATATA | | | | |
| | | PTSEFNMKEPCRSEVEE | | CCCCCAGGAG | | | | |
| | | VVRRARS | | ATCCCGAGAG | | | | |
| | | SSAPGPSGVPYKVYKNC | | GGGGGGAGGA | | | | |
| | | PKLLHRLWKALKVIWRR | | TGAGATCTCC | | | | |
| | | GKIAQPW | | AATCGGACGG | | | | |
| | | RYAEGVYIPKEEKSENI | | ATCAAAGGTT | | | | |
| | | DQFRVISLLSVESKIFF | | A | | | | |
| | | SIVAKRL | | | | | | |
| | | SNFLLSNKYIDTSMQKG | | | | | | |
| | | GIPGVPGCLEHTGVVTQ | | | | | | |
| | | LIREARE | | | | | | |
| | | GRGDLAVLWLDLTNAYG | | | | | | |
| | | SIPHKLVEVALEKHHVP | | | | | | |
| | | QKVKDLI | | | | | | |
| | | IDYYSKFSLRVSSGQLT | | | | | | |
| | | SDWHQLEVGIITGCTIS | | | | | | |
| | | VTLFALA | | | | | | |
| | | MNMMVKAAETECRGPLS | | | | | | |
| | | KSGVRQPPIRAFMDDLT | | | | | | |
| | | VTTTSVP | | | | | | |
| | | GARWILQGLERLVAWAR | | | | | | |
| | | MSFKPAKSRSLVLRKGK | | | | | | |
| | | VRDEFRF | | | | | | |
| | | RLGQHQIPSVTERPVKS | | | | | | |
| | | LGKAFNCSLNDRDSIRE | | | | | | |
| | | TSTAMEA | | | | | | |
| | | WLKAVDKSGLPGRFKAW | | | | | | |
| | | VYQHGILPRLLWPLLIY | | | | | | |
| | | EVPMTW | | | | | | |
| | | EGFEQKVSSYLRRWLGL | | | | | | |
| | | PRSLSNIALYGNTNKLK | | | | | | |
| | | LPFGSVR | | | | | | |
| | | EEFIVARTREHLQYSGS | | | | | | |
| | | RDAKVSGAGIVIRTGRK | | | | | | |
| | | WRAAEAV | | | | | | |
| | | EQAETRLKHKAILGAVA | | | | | | |
| | | QGRAGLGSLAATRYDSA | | | | | | |
| | | SGRERQR | | | | | | |
| | | LVQEEVRASVEEERTSR | | | | | | |
| | | AVAMRQQGAWMKWEQAM | | | | | | |
| | | ERNVTWK | | | | | | |
| | | DIWTWNPLRIRFLIQGV | | | | | | |
| | | YDVLPSPSNLYIWGRVE | | | | | | |
| | | TPACPLC | | | | | | |
| | | SKPGTLEHILSSCSKAL | | | | | | |
| | | GEGRYRWRHDQVLKSIA | | | | | | |
| | | EAISKGI | | | | | | |
| | | KDSRYRQATAKVIQFIK | | | | | | |
| | | EGQRPERTAKNCSAGLL | | | | | | |
| | | STARDWV | | | | | | |
| | | MTVDLERQLKIPPHITQ | | | | | | |
| | | STLRPDIILVSEATKQL | | | | | | |
| | | ILLELTV | | | | | | |
| | | PWEERMEEAQERKRGKY | | | | | | |
| | | QELVEQCRANGWRTRCM | | | | | | |
| | | PVEVGSR | | | | | | |
| | | GFASYTLSKAYGTLGIT | | | | | | |
| | | GTNRRRALSNNVEAAEK | | | | | | |
| | | ASRWLWL | | | | | | |
| | | KRGEQWGQ | | | | | | |
| Myotis | R10Mbr | MGLTTPPGFIVLVTIET | 33480 | TGCCGACTGG | 33492 | GGATCTGCAA | 33502 | NW_005337413.1 |
| brand | | ENDISPGVPTPAYTSTQ | | GCAGCTTTGG | | TTTACCATTG | | |
| | | EGRAEL | | AGAAATCCTA | | GTTCAACTCC | | |
| | | ACGSCGKICKSKAGLVS | | AGCTGGCTAA | | GTGTGACGGG | | |
| | | HRKVHVQGNANSQSGCP | | GAGTTCAGCA | | CACATCGTGC | | |
| | | FTDVDR | | ACTCCTG | | CCCGATGTGT | | |
| | | TCRICDRQFSSKSGLTQ | | | | GAGCCTGGAC | | |
| | | HKRHRHPEARNQEKLSC | | | | TGTGGTAGCA | | |
| | | MKTAGS | | | | CTTCGGTGCA | | |
| | | HWTEQESTALLRIATKL | | | | CTTGAAGAGC | | |
| | | APTCSNLRSLYCRLEHD | | | | AATGTCAGTT | | |
| | | FPGRSA | | | | GTCCGTGTAT | | |
| | | CSIKTRLRTLNWKPTRV | | | | TCTTCATTCT | | |
| | | TLPDDVCVASQESTNND | | | | TCGAAC | | |
| | | TQRIEW | | | | | | |
| | | ASKTVDVAIRQLKDSPQ | | | | | | |
| | | ESLRSADLLAMAESFQR | | | | | | |
| | | GAIDSQ | | | | | | |
| | | QLLSLLEMHAVSTFPHR | | | | | | |
| | | WRMNTKGHARRANATYK | | | | | | |
| | | NRKQIR | | | | | | |
| | | RANYASLQALYHQRRKD | | | | | | |
| | | AATAVFSGTWKDAHLST | | | | | | |
| | | RGLPDN | | | | | | |
| | | SDKYWQDILSAPSHCDN | | | | | | |
| | | RPCRSVTPIDWSLIEPI | | | | | | |
| | | HHEEVT | | | | | | |
| | | SAVKQMGNTAPGLDKIR | | | | | | |
| | | PAELKHYSSKALAGYFN | | | | | | |
| | | LLLLSE | | | | | | |
| | | GCPEHLCLSRITLVPKV | | | | | | |
| | | PNPSCPSELRPIAVSSS | | | | | | |
| | | IIRCFH | | | | | | |
| | | KIIADRWNSRLSLPSLQ | | | | | | |
| | | FAFLKRDGCLEATSTLH | | | | | | |
| | | AILRHS | | | | | | |
| | | CSTGSGLSVAFIDVAKA | | | | | | |
| | | FDSVSHETIIRSAKAFG | | | | | | |
| | | APPPLT | | | | | | |
| | | QYLTTSYERAAAAISTS | | | | | | |
| | | TVKCHRGVRQGDPLSPL | | | | | | |
| | | LFIMAM | | | | | | |
| | | DEVLSSSMPQLGYQFHD | | | | | | |
| | | TLVDGFAYADDLIIMAE | | | | | | |
| | | NLPRLQ | | | | | | |
| | | EKLDAASVALGFAGMKI | | | | | | |
| | | NAKKTKLLDIRGARKPY | | | | | | |
| | | VTATCE | | | | | | |
| | | TPVSFQNEEIKPLSSTE | | | | | | |
| | | TLTYLGIPFTSKGKASI | | | | | | |
| | | NHRRQL | | | | | | |
| | | QEVLSQIRKAPLKPQQR | | | | | | |
| | | LELTREHLIPKYTHTLV | | | | | | |
| | | LGNAHR | | | | | | |
| | | NTLKRMDNAIRQSLRDW | | | | | | |
| | | LRLPPDTPTAYFHTACS | | | | | | |
| | | LGGLGV | | | | | | |
| | | PCLSTTIPLYKKTRMEK | | | | | | |
| | | LLTATCPVLRNVVNSGS | | | | | | |
| | | FKPIIK | | | | | | |
| | | ELSIPIRVHGTIVTDKE | | | | | | |
| | | GAREAWHEHLLSSVDGR | | | | | | |
| | | GLRDVA | | | | | | |
| | | KSPLSNAWLIRPERIFP | | | | | | |
| | | RIFLRAVHLRCNLLRTK | | | | | | |
| | | VRSARG | | | | | | |
| | | GRGDQSVLCRGNCGQPE | | | | | | |
| | | SLAHILQSCWVTHDARC | | | | | | |
| | | ARHNRV | | | | | | |
| | | AKELARRLRKLGYSVFE | | | | | | |
| | | ELRVPTSHSFIKPDLIV | | | | | | |
| | | VQDTSA | | | | | | |
| | | FVLDVSIVGDGRMQSAW | | | | | | |
| | | SEKVEKYSTEAHTAAIS | | | | | | |
| | | SMLSSI | | | | | | |
| | | GKPVEHVFHEPVIFSFR | | | | | | |
| | | GVCYSRSVKSIIRLGLP | | | | | | |
| | | RYSISD | | | | | | |
| | | LCLLTIIGSLRTYDTFM | | | | | | |
| | | RGTWK | | | | | | |
| Phlebotomus | R2PaP | METNRENIYSRDEAGVN | 33481 | AACTATGACG | 33493 | CCTACGGCGA | 33503 | AJVK01060896.1 |
| papatasi | | SLGSRPQMRPRSQTMER | | TATGTTATAG | | AGTTTGCGGC | | |
| | | SIVEAG | | GGAGTTTTAT | | GTTACCATTC | | |
| | | CDQNEFGCDLCDRRFRT | | TAGTTAAGGT | | TGGGTGCTAA | | |
| | | TRGLGQHFRHSHPREHN | | TGGGTGCGTG | | GACTGAACAA | | |
| | | DRLNTD | | GAGTCGGATC | | GGCATTGATG | | |
| | | RIKARWSPEEEYLLALE | | GTTGAAGTCT | | GGTTCCATTG | | |
| | | EVRATSRGIRFLNQHLA | | TCATTGACCT | | TCTAAGGTTG | | |
| | | EAFPNR | | AAATGTATCG | | CTTTTATATT | | |
| | | TIEAIKCHRRQRTYKEL | | TTGACCATCG | | GAGGTGTGCC | | |
| | | VANLLVRASSARESQTS | | TAGCCCTTCA | | GTCGAGCACC | | |
| | | YAGRLG | | AGTGTCCATC | | TGGTAGCATT | | |
| | | ETSSSVSAELVVEVNRL | | TGACGCCCCC | | CATTCTTATG | | |
| | | IDYLAIHPVRKYFSDEL | | TCATGGCGAC | | GGCGAAAGAA | | |
| | | VAAAHA | | CGCTGGGGAT | | TGATAAATAT | | |
| | | AIIGDVECDELILSWLQ | | TGCTTTCGAG | | GATGATCGCG | | |
| | | KAFRIRHGLRPSTSTAA | | CATGAGCTAA | | AGATCATGAT | | |
| | | GNPGSY | | GAGCAGTGGA | | CCACTTTCTT | | |
| | | RSGSDRPLSNRKRRRQD | | TGCGGGGGTG | | GGCGTAATGT | | |
| | | YARVQRLWNKSVKKAAR | | GTACAGGCGT | | GGAAAGTCTA | | |
| | | GILEGS | | ATCACCCTTA | | GCATGGTAAT | | |
| | | DEANSGESVHPTPERML | | AAAAGAAAGT | | GGGGTAAAGT | | |
| | | RYWSDIFKQEGPIIPDR | | CGATC | | TGGGTCTCTG | | |
| | | TNQSPR | | | | ATCCAGGCTA | | |
| | | NEELKDMWEPITIDEVK | | | | TACCTATGAT | | |
| | | LARLDPGSAAGIDRISV | | | | GAGAAACCCT | | |
| | | QQFQRC | | | | AGTTCACTTG | | |
| | | PVHVRVLLFNVLLLVGH | | | | CTCAATTCTA | | |
| | | LPGRMSCARTVFLPKVE | | | | TTTGTCGTAA | | |
| | | GSSDPK | | | | GACTTATGGA | | |
| | | DYRPISITSVITRQFHK | | | | AATAAGTGAC | | |
| | | ILAARLTSMHAWDERQA | | | | AAAACGATCT | | |
| | | GFLPVD | | | | AGACTATTTC | | |
| | | GCGENLAILNELIRFSR | | | | TGAGGGTA | | |
| | | VNRRELHLASLDISKAF | | | | | | |
| | | DMVPRQ | | | | | | |
| | | AIINSVAQLGAPQNLVE | | | | | | |
| | | YLKGLYANNQTTLEYGG | | | | | | |
| | | SELYCR | | | | | | |
| | | VKRGVRQGDPLSPLLFN | | | | | | |
| | | LVMESALVRLDKKLSFS | | | | | | |
| | | LYGVSV | | | | | | |
| | | NGLAYADDVILVASTSG | | | | | | |
| | | GLQKNTESFLGALREIG | | | | | | |
| | | LDLNLA | | | | | | |
| | | KCKSLSLKPSGRDKRCK | | | | | | |
| | | VLSESQLSIGGTSVPQV | | | | | | |
| | | DLVGFW | | | | | | |
| | | RYLGIWFSGPRVVSPEQ | | | | | | |
| | | LSMGVYLERISKAPLKP | | | | | | |
| | | QQRIRI | | | | | | |
| | | LVDYLLPKYTHGSVLGR | | | | | | |
| | | YTRKTYKAMDAQIRSYV | | | | | | |
| | | RKWLHL | | | | | | |
| | | PLDTTLGYFYAPVMSGG | | | | | | |
| | | LGIPNFEMTVPLMKVER | | | | | | |
| | | NRKLLS | | | | | | |
| | | SARGTIRAVMHGSPLIR | | | | | | |
| | | DTERTASWLLTRLPALD | | | | | | |
| | | IECYKG | | | | | | |
| | | YWIKSLYESSDGRDNRA | | | | | | |
| | | INGVRGSIGWSRKFSNK | | | | | | |
| | | LTGRDF | | | | | | |
| | | VHFHQIRINALDSKART | | | | | | |
| | | LRGRGVDVRCRAGCLDR | | | | | | |
| | | ETPYHI | | | | | | |
| | | VQRCFRSHGGRVLRHDN | | | | | | |
| | | SVQLLCSEMTRKGYNVA | | | | | | |
| | | VERQLQ | | | | | | |
| | | TVEGMRKPDLIAVKDGR | | | | | | |
| | | AAVIDMQVVSGGSMESS | | | | | | |
| | | HREKVE | | | | | | |
| | | KYQRIPGYTELVKEAFG | | | | | | |
| | | VASVEYRAATISWRGIW | | | | | | |
| | | FKPSYD | | | | | | |
| | | SLTRLGVGERCLGSICC | | | | | | |
| | | QVMRGSYLNFVRFKQST | | | | | | |
| | | QMVWSAV | | | | | | |
| Bombymori | R2Bm | MMASTALSLMGRCNPDG | 33482 | GGGCGATACG | 33494 | GCCTTGCACA | 33504 | AB076841.1 |
| | | CTRGKHVTAAPMDGPRG | | CATAATTTTA | | GTAGTCCAGC | | |
| | | PSSLAG | | ATTTCCCGAT | | GGTAAGGGTG | | |
| | | TFGWGLAIPAGEPCGRV | | TGAAATCCAG | | TAGATCAGGC | | |
| | | CSPATVGFFPVAKKSNK | | TCGTCTTAAT | | CCGTCTGTTT | | |
| | | ENRPEASG | | CTGGTGACCA | | CTTCCCCGGA | | |
| | | LPLESERTGDNPTVRGS | | GTGGCGCGGT | | GCTCGCTCCC | | |
| | | AGADPVGQDAPGWTCQF | | CACCAGTATA | | TTGGCTTCCC | | |
| | | CERTFST | | GTGCACAGGA | | TTATATTTAA | | |
| | | NRGLGVHKRRAHPVETN | | CGTGAATGGC | | CATCAGAAAC | | |
| | | TDAAPMMVKRRWHGEEI | | TCCGAGGCTG | | AGACATTAAA | | |
| | | DLLARTE | | GCGGAGTCAc | | CATCTACTGA | | |
| | | ARLLAERGQCSGGDLFG | | tcactataag | | TCCAATTTCG | | |
| | | ALPGFGRTLEAIKGQRR | | tgtgagagac | | CCGGCGTACG | | |
| | | REPYRALV | | gatgtcctgt | | GCCACGATCG | | |
| | | QAHLARFGSQPGPSSGG | | gccaagtata | | GGAGGGTGGG | | |
| | | CSAEPDFRRASGAEEAV | | cgtccaaccc | | AATCTCGGGG | | |
| | | EERCAED | | taacgggtta | | ATCTTCCGAT | | |
| | | AAAYDPSAVGQMSPDAA | | agtgaaatta | | CCTAATCCAT | | |
| | | RVLSELLEGAGRRRACR | | gttgctcata | | GATGATTACG | | |
| | | AMRPKTA | | acagggacgg | | ACCTGAGTCA | | |
| | | GRRNDLHDDRTASAHKT | | tgtacctgtt | | CTAAAGACGA | | |
| | | SRQKRRAEYARVQELYK | | tgctcgtggc | | TGGCATGATG | | |
| | | KCRSRAA | | tggctatcga | | ATCCGGCGAT | | |
| | | AEVIDGACGGVGHSLEE | | atggacggga | | GAAAA | | |
| | | METYWRPILERVSDAPG | | ccaatacacc | | | | |
| | | PTPEALHA | | cccctgttag | | | | |
| | | LGRAEWHGGNRDYTQLW | | taatggggta | | | | |
| | | KPISVEEIKASRFDWRT | | agagagagcg | | | | |
| | | SPGPDGIR | | gtctgaaact | | | | |
| | | SGQWRAVPVHLKAEMFN | | atggccgaaa | | | | |
| | | AWMARGEIPEILRQCRT | | tcacgacgcc | | | | |
| | | VFVPKVE | | ccactcctac | | | | |
| | | RPGGPGEYRPILIASIP | | ccataacctg | | | | |
| | | LRHFHSILARRLLACCP | | cacgtggtac | | | | |
| | | PDARQRGFIC | | cgccgcacat | | | | |
| | | ADGTLENSAVLDAVLGD | | tgaccgatac | | | | |
| | | SRKKLRECHVAVLDFAK | | gggaggaggg | | | | |
| | | AFDTVSHE | | gcagcacttg | | | | |
| | | ALVELLRLRGMPEQFCG | | aatcacgtag | | | | |
| | | YIAHLYDTASTTLAVNN | | tcttggtgta | | | | |
| | | EMSSPVKVG | | gccattgcgg | | | | |
| | | RGVRQGDPLSPILFNVV | | gactacagcc | | | | |
| | | MDLILASLPERVGYRLE | | ctcgtaagtg | | | | |
| | | MELVSALAY | | ccgccttaga | | | | |
| | | ADDLVLLAGSKVGMQES | | acgcaacggg | | | | |
| | | ISAVDCVGKQMGLRLNC | | gcaataggtg | | | | |
| | | RKSAVLSM | | ggccggggcg | | | | |
| | | IPDGHRKKHHYLTERTF | | ctagcggggg | | | | |
| | | NIGGKPLRQVSCVERWR | | ggagtaatct | | | | |
| | | YLGVDFEA | | cccctgttgg | | | | |
| | | SGCVTLEHSISSALNNI | | cgtgcaccgc | | | | |
| | | SRAPLKPQQRLEILRAH | | actgctccca | | | | |
| | | LIPRFQHGFV | | ctgggggcag | | | | |
| | | LGNISDDRLRMLDVQIR | | tgtcatccgg | | | | |
| | | KAVGQWLRLPADVPKAY | | aaacaggtgg | | | | |
| | | YHAAVQDG | | gccggggcgc | | | | |
| | | GLAIPSVRATIPDLIVR | | caccaggggg | | | | |
| | | RFGGLDSSPWSVARAAA | | gagcaatccc | | | | |
| | | KSDKIRKKLR | | tcctg | | | | |
| | | WAWKQLRRFSRVDSTTQ | | | | | | |
| | | RPSVRLFWREHLHASVD | | | | | | |
| | | GRELRES | | | | | | |
| | | TRTPTSTKWIRERCAQI | | | | | | |
| | | TGRDFVQFVHTHINALP | | | | | | |
| | | SRIRGSRGR | | | | | | |
| | | RGGGESSLTCRAGCKVR | | | | | | |
| | | ETTAHILQQCHRTHGGR | | | | | | |
| | | ILRHNKIV | | | | | | |
| | | SFVAKAMEENKWTVELE | | | | | | |
| | | PRLRTSVGLRKPDIIAS | | | | | | |
| | | RDGVGVIVD | | | | | | |
| | | VQVVSGQRSLDELHREK | | | | | | |
| | | RNKYGNHGELVELVAGR | | | | | | |
| | | LGLPKAE | | | | | | |
| | | CVRATSCTISWRGVWSL | | | | | | |
| | | TSYKELRSIIGLREPTL | | | | | | |
| | | QIVPILALRGS | | | | | | |
| | | HMNWTRFNQMTSVMGGG | | | | | | |
| | | VG* | | | | | | |
| Mesoligia | R2Mes | MGVAFDDNNELYGRTSG | 33483 | ATCTTGTTGC | 33495 | TCGGATTCCT | 33505 | OU744815.1 |
| furuncula | | LPQEPEASTLKPVSPTA | | TCACGTCTGG | | GTGTCGCGGG | | |
| | | RSPPRSG | | GGATGTGTAC | | CCGCCGCCGG | | |
| | | RGEGEWTCPECSRAFRT | | CCTCTTTGCT | | GCCCAGGGGT | | |
| | | KTGLGVHKRRAHPVTAN | | GCCGCTATCA | | CGAAGCTCCC | | |
| | | AAAAPPQ | | GTTAATTGGG | | ACCTTTGGCT | | |
| | | VKRRWLEEEGELLAQTE | | AAAGAGCTGT | | TCACCTGGTT | | |
| | | ARLVRAGGSASTINQQL | | TCACAGACGT | | AATTTTTGTA | | |
| | | MRELPQLG | | CAATGTCCTA | | CCAACTTCGA | | |
| | | RSLEAIKGYRRKEAYKS | | GCGATACGAC | | CCTCGCCAGA | | |
| | | RVQACLADLAQPPSPST | | TAAATGGGGG | | GATCCCACCG | | |
| | | PGEANLPIR | | TTGATGTCGC | | GCGTAATTTC | | |
| | | STPIAGTAESSTPEQPL | | TAGGAAACTC | | GACAGTTAGG | | |
| | | VWAEPPSEVLPVSVSLQ | | CTATCCTTGG | | TGACGGTAGG | | |
| | | SPDLSEALD | | CCTGCCCGTG | | GGACGTGGGA | | |
| | | HVKIVEDLLASSEARMA | | GCGCCGCTGC | | GTCCTGTCAC | | |
| | | RGASDGKRRGRPRRKGQ | | TTCGCGAACA | | AACAATCTGT | | |
| | | SPEETQIA | | AGGGGGGGGG | | GATGATTATA | | |
| | | FARLSARKRRRMEYARV | | GGGGCAATCA | | TTACGTTCAC | | |
| | | QELYKTCRSRAAAEVID | | CTAATATATG | | TAAGACGATG | | |
| | | GQTRGVSH | | GACTGGATAG | | GCACTGTTCG | | |
| | | SLSELEAYWRPVMEAVS | | CAAGGACAGT | | AGC | | |
| | | DAPGLTPEVLGALQRSE | | CCGTTAAAAG | | | | |
| | | QYGGSRD | | CATCTCATGG | | | | |
| | | YSQLWTPFTSDEVKACR | | TGGTAGACCC | | | | |
| | | VDNRSGPGPEGILPGAW | | TAATACAAGT | | | | |
| | | NTLSSAT | | TGAGGTGTCG | | | | |
| | | QAEIFNAWLMAGEVPEK | | CGCATACCTC | | | | |
| | | LRGCRTVFVPKTETPAG | | CCCGACTTGA | | | | |
| | | PGEYRPISI | | CCAGAAGACG | | | | |
| | | ASVPLRHMHSVLAKRLE | | CGAGTCTGAT | | | | |
| | | ACCPPDARQRGFICADG | | GGTCCTAGGG | | | | |
| | | TLENSAVL | | GTACGGTGAG | | | | |
| | | DAVLGDCGKKLRECHVA | | CCTGGAGACC | | | | |
| | | VLDFAKAFDTVSHAALI | | TTGGTCACGA | | | | |
| | | DLLRKRGLP | | AATCGGATCA | | | | |
| | | EGFCNYVARLYDTSETV | | AGGTGCGCAA | | | | |
| | | LVANGARSGPARVGQGV | | ACACGCGAAA | | | | |
| | | RQGDPLS | | GGTGCATATC | | | | |
| | | PLLFNMAMDVILAALPR | | CAGGACAGGC | | | | |
| | | EVGYGLEGENVSALAYA | | TCTGGGGGAA | | | | |
| | | DDLVLLAGS | | GGTCTCAGAG | | | | |
| | | KVGMQSSIDCVWRTGRM | | AAGCCCCGAT | | | | |
| | | MGLFISHAKSAVLSMVP | | GGGAGTCCTT | | | | |
| | | DGKRKKV | | GGGCTCCAAA | | | | |
| | | HFLTDRTFKVGSRWLRQ | | TCTAGCAGCT | | | | |
| | | VSCVERWRYLGVDFKAS | | CGCATGGCTG | | | | |
| | | GCVTLEH | | GGGCGTACAC | | | | |
| | | DVKVALNNITKAPLKPQ | | GAGAGCTGTG | | | | |
| | | QRLEILRVHLIPRFLHG | | GGTGAACCTG | | | | |
| | | FVLGIITDDRL | | TGGATAGGGC | | | | |
| | | RMLDVQIRRAVRTWLRL | | TAGCCACCCT | | | | |
| | | PKDVPVGYFHAATADGG | | ACCACAATAG | | | | |
| | | LAIPSLRT | | GTATTAAGGT | | | | |
| | | CVPDLIKKRFGRLDSSR | | GTTGCTTTCG | | | | |
| | | WPVARAAARSERIRRKL | | ATGATAATAA | | | | |
| | | QWADKQLR | | TGAGTTGTAT | | | | |
| | | KFTAENPKSGERTTAMY | | GGTCGAACCT | | | | |
| | | WREALHASVDGLELREC | | CCGGCCTCCC | | | | |
| | | PRVPASTK | | ACAGGAGCCG | | | | |
| | | WMRERSMQYTGRDFVQF | | GAGGCGTCGA | | | | |
| | | VHTHINALPSRVRNTRG | | CCCTTAAACC | | | | |
| | | RRTGVAS | | TGTAAGTCCG | | | | |
| | | ELNCRAGCMVRETTAHT | | ACTGCTCGAT | | | | |
| | | IQQCHRTHGGRIKRHNC | | CTCCGCCTCG | | | | |
| | | VADVVCSA | | GTCGGGGCGG | | | | |
| | | MEDKGWTVVKEPKVRTA | | GGGGAAGGCG | | | | |
| | | LGLRKPDIIASRNGVGV | | AGTGGACCTG | | | | |
| | | IVDAQVVS | | TCCGGAATGT | | | | |
| | | GQRPLDELHREKRNKYG | | AGCAGGGCAT | | | | |
| | | NHAELVEKVADILGLPC | | TCCGGACCAA | | | | |
| | | KESVHSTS | | AACAGGGTTG | | | | |
| | | CTLSWRGVWSLASYREL | | GGCGTGCACA | | | | |
| | | KRFVGLDEGVLAGVPSL | | AGCGGCGCGC | | | | |
| | | VLRGSHIN | | ACACCCTGTG | | | | |
| | | WTRFNRMTTVSTESGSE | | ACGGCAAACG | | | | |
| | | | | CCGCAGCCGC | | | | |
| | | | | CCCACCGCAG | | | | |
| | | | | GTGAAGCGGA | | | | |
| | | | | GATGGCTTGA | | | | |
| | | | | AGAAGAGGGT | | | | |
| | | | | GAGCTTCTTG | | | | |
| | | | | CGCAGACGGA | | | | |
| | | | | GGCGCGTCTG | | | | |
| | | | | GTTAGAGCCG | | | | |
| | | | | GAGGCAGTGC | | | | |
| | | | | CAGTACAATT | | | | |
| | | | | AACCAGCAAT | | | | |
| | | | | TA | | | | |
| Cionaintes | R2Ci | MGEWPWVSWSLTVLVEK | 33484 | CGACGGTGAA | 33496 | TGACAGTAAT | 33506 | AB097122.1 |
| tinalis | | WRPFTILQPYPMPGQLR | | CCACCTTGTC | | ATGAAAACAT | | |
| | | VDVYLPR | | GCGGTGTAAG | | CACATCTGAC | | |
| | | KTSYLMDKNIYENTTSP | | AGCTTTAGTG | | CGGCACAGAA | | |
| | | GGGPLCGEKTHRSDVII | | TCTCGAACAA | | TCACCATGCC | | |
| | | PPPGFAPST | | GAAATAGCTT | | GTAATGCACC | | |
| | | DTASNTLGENVDASATT | | GTGTGCTGTC | | CAACTAAGGA | | |
| | | SSANPLSQEPGWCESCS | | CTTCTGGGCG | | TTCCAATGGG | | |
| | | KLFKSQR | | GTGCACATAC | | TAAAAAAAAA | | |
| | | GLRVHQRSKHPELYHSQ | | TTCTTAACCT | | AAAAAAAAAA | | |
| | | NQPLPRSKARWSDEEMV | | CCCGAGGCCA | | AAAAAAAAAA | | |
| | | IFAREELA | | TGCCGGCGGG | | AAAAAAAAAA | | |
| | | NRKIRFINQHLHKVFPH | | GGCTTTAGCC | | AA | | |
| | | RTLESIKGLRGKNVRYA | | CCCGGCAGGT | | | | |
| | | RIMADLEAEM | | TTTACCATGC | | | | |
| | | TSQPEAATSLCTETSEN | | CGGACGGGTT | | | | |
| | | LASSNVLPQTRGWAENL | | CGAGAGGTAG | | | | |
| | | VENIDTAHL | | AGGCCAAACT | | | | |
| | | ANLGPLSQFEPGKPSSS | | AAGAGTTCAC | | | | |
| | | TKEAINTEYNDWISKWL | | CAGCAGACTT | | | | |
| | | PSGAAHRE | | CGCACGCGGC | | | | |
| | | RRANPPSTKLNARATRR | | TGGCCACTGG | | | | |
| | | LQYSRIQNLYKLNRSAC | | CCGAAGTTTA | | | | |
| | | AQEVLSGA | | AACAACAGGG | | | | |
| | | WKVQSGELNLKEVQPFW | | CCGCATCTTC | | | | |
| | | EKMFRKESAKDRRKPKP | | CCAAACTCAA | | | | |
| | | TGEVLW | | TATATGGTGT | | | | |
| | | GLMEPLTIAEVGSTLKS | | TAAGTGAACC | | | | |
| | | TTPSAPGPDKLTLDGVK | | GTGCCG | | | | |
| | | RIPIAELVSH | | | | | | |
| | | YNLWLYAGYQPEGLREG | | | | | | |
| | | ITTLIPKIKGTRDPAKL | | | | | | |
| | | RPITVSSFICR | | | | | | |
| | | IFHRCLAQRMETSLPLG | | | | | | |
| | | ERQKAFRKVDGICHNIW | | | | | | |
| | | SLRSLIHNS | | | | | | |
| | | KDNLKELNITFLDVRKA | | | | | | |
| | | FDSISHKSLGIAAARLG | | | | | | |
| | | LPPPLITYISNL | | | | | | |
| | | YPNCSTKLKVNGKISKP | | | | | | |
| | | IEVRRGVRQGDPLSPLL | | | | | | |
| | | FNAVMDWA | | | | | | |
| | | LSELDPRVGVQIGEQRI | | | | | | |
| | | NHLAFADDIILVSSTKI | | | | | | |
| | | GMVSSINTLSR | | | | | | |
| | | HLAKSGLEISAGKEGKS | | | | | | |
| | | ASMAIVVDGKKKMWTVD | | | | | | |
| | | PLPRFKVN | | | | | | |
| | | SQKIPALSITQQYKYLG | | | | | | |
| | | INIDAQGARNDAARILT | | | | | | |
| | | EGLAELSRAPL | | | | | | |
| | | KPQQRLYLLRVHLLPKL | | | | | | |
| | | QHGLVLSSCAKRALTYL | | | | | | |
| | | DKSVRSAIR | | | | | | |
| | | RWLTLPKDTPTAFYHAK | | | | | | |
| | | ACDGGLGITRLEHTIPI | | | | | | |
| | | LKRNRMMKL | | | | | | |
| | | TLSEDPVIMELVKLTYF | | | | | | |
| | | TNLLHKYSNVKLLNSWP | | | | | | |
| | | VTDKDSLAR | | | | | | |
| | | AEASMLHTSVDGRGLSN | | | | | | |
| | | CSDVPRQSDWVTNGASL | | | | | | |
| | | LSGRDFI | | | | | | |
| | | GAIKVRGNLLPTKVSAA | | | | | | |
| | | RGRQREITCDCCRRPES | | | | | | |
| | | LGHILQTCP | | | | | | |
| | | RTWGPRISRHDSLLKRV | | | | | | |
| | | RNQACLKNWTPIIEPSI | | | | | | |
| | | PTNIGLRRPD | | | | | | |
| | | LVLAKGNIAFLVDATVV | | | | | | |
| | | ADNANMQLQHEAKVEKY | | | | | | |
| | | NNSDIKEWI | | | | | | |
| | | KVHCPGVDEVRVTSLTA | | | | | | |
| | | NWRGCLYGGSASFLTED | | | | | | |
| | | LGLPKAEL | | | | | | |
| | | SLLSAKINEKGYYLWCA | | | | | | |
| | | HYRGTARLWNRPLRS | | | | | | |
| Ixodes | R21s | MQCTSRLADAPRFARVG | 33485 | GTTCCAAAGG | 33497 | TAGTGTGACG | 33507 | GCA_016920785.2 |
| scapularis | | VEGEGVGASGNGTDAQL | | AAGGCACTCC | | GAGTCCTCAA | | |
| | | WYGCTG | | TTTGGTTCGT | | GCCCCCACAA | | |
| | | CDEAFSSLRGLRIHAAQ | | GATGAGATGT | | GTGCCTGCCA | | |
| | | KKHGNQDGLLRLPAGRP | | TCATGGTGCT | | GGTGGCAGGA | | |
| | | RKRRVGKS | | TGCCTAGCTG | | AAGGGCAACT | | |
| | | TTAGASDRVTTDPVPAP | | GAGAAATCCG | | ACTGGTGAGC | | |
| | | VPESPGLLPGLPGPSLP | | ACTCACACCT | | GACCCAAGCA | | |
| | | GCSDLPPG | | GCACGTGGTC | | AGGCGGAGCC | | |
| | | VLPGGWSASPGPLSWPP | | CCTGCCGCCT | | AAGACCAAGC | | |
| | | SLDAGPLPGPSRVSPGP | | GCCAGTATGC | | TGGAGCCAAG | | |
| | | SRPSPGK | | CGAGGAAACG | | AGCAACTCCA | | |
| | | PTGPPSLDAGPLPGPSR | | GGTGCAACTT | | GGAGGCAGGG | | |
| | | VSPGPSRPSPGKPPGTP | | AATCCGTGGA | | GTGGATATCA | | |
| | | EPLPGSP | | TACTGGTAGC | | AGAGCAACCC | | |
| | | GGRRGVSPGQPGSRTDP | | AACGTGAGCA | | CAAGGGACAC | | |
| | | SSSAGAGHFVCPQCSRA | | ACGGTACGGT | | AGACCACGGG | | |
| | | FSSKIGM | | CCTTCGCGGA | | CAACTACTGG | | |
| | | SQHQKHAHLEEYNAGIN | | CCACCCTGGG | | TGAGCGCCCA | | |
| | | ITRTKARWDPEETYLLA | | CGTTCGGGTT | | AGACAGGGGT | | |
| | | RLEATLNPD | | GCCAGCCCGT | | GGATATTAAG | | |
| | | HKNINQTLHAALPRGSC | | TCGCCCGAAA | | AACAGCCCCA | | |
| | | RTLESIKAHRKQAAYRD | | TATCTTGGCC | | CAAAGTGTTA | | |
| | | LVTSLRSAR | | CTGAAACTAA | | CCTATATTAA | | |
| | | ESSEAQHVPDRPLETPE | | AAGAAAA | | CAATAAAGTT | | |
| | | PQTPANPQRDSKQAVIE | | | | GAAGCCTCAA | | |
| | | ALQSLIGRA | | | | CCACGCATTG | | |
| | | PPGSFQGARLWDIARQA | | | | CGGGTTAGAT | | |
| | | TRGTNILPLLNSYLRDV | | | | GGCGTGGCTT | | |
| | | FTLPTKPTR | | | | GGCCCGCCGC | | |
| | | KKPAVRPARSRRKQKKQ | | | | CATGATGAGC | | |
| | | EYARTQDLFRKKQSDCA | | | | TGGAACCCTC | | |
| | | RAVLDGP | | | | CACCTGGTGG | | |
| | | TSSSVPGTGAFLQTWRE | | | | GCCGCACGAG | | |
| | | IMTGPSPALEAPPLPTR | | | | ACCACCGGCT | | |
| | | GEVDLFFPA | | | | CTTTCTACTA | | |
| | | TAQEIQSAEIAVNSAAG | | | | AGGCCGGTCT | | |
| | | PDGFSARLLKSVPALLL | | | | CCGTGACTGC | | |
| | | RVMVNLLLLV | | | | GGTTGGGATA | | |
| | | RRVPAALRDARTTFIPK | | | | AACTCCAAGC | | |
| | | VPDAVDPSQFRPITVAS | | | | ACTGAGCGGT | | |
| | | VLQRLLHRIL | | | | AAAAAAAAAA | | |
| | | AKRALEAIPLNFRQRAF | | | | AAAAAAAAAA | | |
| | | QPVDGCAENIWLLSTAL | | | | AAAAAAA | | |
| | | NEARTRRRP | | | | | | |
| | | LHMASVDLTKAFDRVTT | | | | | | |
| | | DAILRGARRAGLSGEFI | | | | | | |
| | | GYLKELYTTS | | | | | | |
| | | RTLLQFQGESLLVEPTT | | | | | | |
| | | GVRQGDPLSPILFNLVL | | | | | | |
| | | DEYLSSLDP | | | | | | |
| | | DISFVSGDLRLDAMAFA | | | | | | |
| | | DDLIVFASTPAGLQDRL | | | | | | |
| | | DALVEFFDP | | | | | | |
| | | RGLRVNVKKSFTLSLQP | | | | | | |
| | | GRDKKVKVVCDQIFTIG | | | | | | |
| | | GTPLPASKV | | | | | | |
| | | ATPWRYLGMTFTPQGSI | | | | | | |
| | | NKGTSEQLDLLLTRTSK | | | | | | |
| | | APLKPQQR | | | | | | |
| | | LVVLRNYLLPRLYHRLV | | | | | | |
| | | LGPWSAALLLKMDTTIR | | | | | | |
| | | GAIRRWMDL | | | | | | |
| | | PHDTPLGFFHAPVTEGG | | | | | | |
| | | LGINSLRASIPAMVLQR | | | | | | |
| | | LDGLHFSTH | | | | | | |
| | | PGAEVAIQLPFLTGLHR | | | | | | |
| | | RAEAAAQYQGQRLLSKA | | | | | | |
| | | DVHRMWSA | | | | | | |
| | | RLHGSCDGRPLRESKRV | | | | | | |
| | | PAAHRWAAEGTRLLSGR | | | | | | |
| | | DFISITKLK | | | | | | |
| | | INALPTLERTSRGQHKD | | | | | | |
| | | IQCRAGCQAVESLGHVL | | | | | | |
| | | QACHRGHR | | | | | | |
| | | GRIRRHDNIARYVCGRL | | | | | | |
| | | TQIGWAVKWEPHYSVAG | | | | | | |
| | | RTLKPDIVA | | | | | | |
| | | HRGAETVVLDAQVVGTS | | | | | | |
| | | MRLGFHHAQKKEKYSLP | | | | | | |
| | | DLLHQVC | | | | | | |
| | | EGRRDAARVSTITLNFR | | | | | | |
| | | GVWAPESAQDLKSLGLT | | | | | | |
| | | DNDLKLLTV | | | | | | |
| | | RCLQGGAQCFRLHRRMT | | | | | | |
| | | TVVKATGDEANALPAHS | | | | | | |
| | | GLPPTQL | | | | | | |
| | | GGRTLGPSAHNQSARTT | | | | | | |
| Trichinella | R2TsP | MSNRLANTAAAGGVPEK | 33486 | CTCCTGACTA | 33498 | TGAGGTTTTT | 33508 | CP032378.1 |
| spiralis | | TSGTLDIPGQPSSSGEK | | ACCTGATTTC | | GTTTTCTTTT | | |
| | | RAISYPGP | | GTCCGTGCGG | | TTCCTTTTAC | | |
| | | FGCNSCSFTSTTWLSLE | | CGGCGTTTTC | | CATTCTTGTT | | |
| | | LHFKSVHNIRDFVFLCS | | TTTTCGCTCT | | CCATTGTTGT | | |
| | | KCKKSWPSI | | CCGCTCGTCG | | TATTTGCTTT | | |
| | | NSVASHYPRCKGSVKAA | | AAATTTGCTG | | AATCCTGTAT | | |
| | | VVPTSLANTCTTCGSSF | | TAGTTGATTC | | TTTACCGCCG | | |
| | | GTFSGLQL | | GCTTTTCTTT | | GCAATTCCAT | | |
| | | HRKRAHPDVFAASCSKK | | GCGTTTTCTT | | TGTTATTATT | | |
| | | TKARWSNDEFTLLARLE | | CTACTTTCGC | | ACTGTTACTG | | |
| | | AGLDPACK | | AGTTTTTTCT | | TTATTATTGT | | |
| | | NINQVLAERLMEYNITR | | GCATTGCCAC | | TACTATTGTT | | |
| | | GVEMIKGQRRKDQYKAL | | G | | TTTACTTTTA | | |
| | | VRQLRSNS | | | | CTTACTACTG | | |
| | | ETQQCVGLAGSMDSNVP | | | | TTATTATACT | | |
| | | ANDTSSSVASEVSITYP | | | | TTAATTCGTT | | |
| | | EYGAVMSC | | | | AACTTACGTT | | |
| | | DLIKEATGMAIVDINEL | | | | ATTGTTACCA | | |
| | | QSNLRKAFLSGRKLPMK | | | | CTACTTACTT | | |
| | | FHGARETAQ | | | | TGCTCTCTCG | | |
| | | KKMANPRVAKFKRFQRL | | | | CAAACGTTCG | | |
| | | FRSNRRKLASHIFDKAS | | | | TTGTTGTTTC | | |
| | | LEQFGGSID | | | | TTTTGGACCA | | |
| | | EASDHLEKFLSRPRLES | | | | GGTTTAGAGA | | |
| | | DSYSVISGDKSIGVAHP | | | | AATCGCACGC | | |
| | | ILAEEVELEL | | | | ACAGCGGAAC | | |
| | | KASRPTAVGPDGIALED | | | | TGGACCGCTT | | |
| | | IKKLNTYDIASLFNLWL | | | | AAGCCAGAAA | | |
| | | KAGDLPASVK | | | | TAGTAAAGTA | | |
| | | ASRTIFLPKSDGTTDIS | | | | ACAA | | |
| | | NCRPITIASAMYRLFSR | | | | | | |
| | | IITRRLAARLEL | | | | | | |
| | | NVRQKAFRPEMNGVFEN | | | | | | |
| | | SAILYALIKDAKVRSRE | | | | | | |
| | | ICVTTLDLAK | | | | | | |
| | | AFDTVPHSRILRALRKN | | | | | | |
| | | NVDPESVDLISKMLTGT | | | | | | |
| | | TYAEIKGLQG | | | | | | |
| | | KLIPIRNGVRQGDPLSP | | | | | | |
| | | LLFSLFIDEIIGRLQAC | | | | | | |
| | | GPAYDFHGEKI | | | | | | |
| | | CILAFADDLTLVADSAA | | | | | | |
| | | GMKILLKAACDFLEESG | | | | | | |
| | | MSLNAEKCR | | | | | | |
| | | TLCITRSPRSRKTFVNP | | | | | | |
| | | AAKFIISDWKTGISSEI | | | | | | |
| | | PSLCATDTFRF | | | | | | |
| | | LGHTFDGEGKIHIDTEE | | | | | | |
| | | IRSMLKSVKSAPLKPEQ | | | | | | |
| | | KVALIRSHLL | | | | | | |
| | | PRLQFLFSTAEADSRKA | | | | | | |
| | | WLIDSIIRGCVKEILHS | | | | | | |
| | | VKAGMCTDIF | | | | | | |
| | | YIPSRDGGMGFTSLGEF | | | | | | |
| | | SLFSRQKALAKMAGSSD | | | | | | |
| | | PLSKRVAE | | | | | | |
| | | FFIERWNIARDPKVIEA | | | | | | |
| | | ARRVYQKKRYQRFFQTY | | | | | | |
| | | QSGGWNEF | | | | | | |
| | | SGNTIGNAWLTNGRARG | | | | | | |
| | | RNFIMAVKFRSNTAATR | | | | | | |
| | | AENLRGRP | | | | | | |
| | | GTKECRFCKSATETLAH | | | | | | |
| | | ICQRCPANHGLVIQRHD | | | | | | |
| | | AWTFLGEV | | | | | | |
| | | ARKEGYQVMIEPKVSTP | | | | | | |
| | | VGALKPDLLLIKADTAF | | | | | | |
| | | IVDVGIAWEG | | | | | | |
| | | GRPLKLVNKMKCDKYKT | | | | | | |
| | | AIPAILETFHVGHAETY | | | | | | |
| | | GVILGSRGC | | | | | | |
| | | WLKSNDKALASIGLNIT | | | | | | |
| | | RKMKEHLSWLTFEIIFI | | | | | | |
| | | TQISRIYNSFMKK | | | | | | |
| Taeniopygia | R2Tg | MASCPKPGPPVSAGAMS | 33487 | GTCTAGTTAC | 33393 | TTCAGGTTAT | 33509 | XR_005978890.1 |
| guttata | | LESGLTTHSVLAIERGP | | AACTGGGCAT | | TTAGATGCTT | | |
| | | NSLANSGS | | CGCTGCAGAG | | AGTTTTTGTA | | |
| | | DFGGGGLGLPLRLLRVS | | ATCGCACCTC | | CCTTTCTTGT | | |
| | | VGTQTSRSDWVDLVSWS | | CTCGTGGTCC | | TTTGTTTAGG | | |
| | | HPGPTSK | | CGCTGGTAGC | | ATTTTGATAG | | |
| | | SQQVDLVSLFPKHRVDL | | CCTTCGAAGG | | TGTTAGTATT | | |
| | | LSKNDQVDLVAQFLPSK | | GTGACTAAGT | | TTTATATTTT | | |
| | | FPPNLAEN | | CGATCTCTGC | | TGTACGATTG | | |
| | | DLALLVNLEFYRSDLHV | | CCCAGGTACG | | CATAATGTTC | | |
| | | YECVHFAAHWEGLSGLP | | GAGCCGTTGG | | TTTTTTATAC | | |
| | | EVYEQLAP | | GACTCACCAG | | AGTTCTGTTT | | |
| | | QPCVGETLHSSLPRDSE | | TCCAACGTAA | | TAATAAAATA | | |
| | | LFVPEEGSSEKESEDAP | | CTCCTGCCTA | | GACGATAGCT | | |
| | | KTSPPTPG | | AATTCGGTGA | | AGAGACGTTA | | |
| | | KHGLEQTGEEKVMVTVP | | AACAAATTCC | | GGGCAGCCAC | | |
| | | DKNPPCPCCGTRVNSVL | | TCGGTAAAAA | | AAGCCAGTTA | | |
| | | NLIEHLKV | | GCCCC | | GGTAGCGGAT | | |
| | | SHGKRGVCFRCAKCGKE | | | | AGTAGGTAGG | | |
| | | NSNYHSVVCHFPKCRGP | | | | AACAGACTTT | | |
| | | ETEKAPA | | | | TACTATTTCA | | |
| | | GEWICEVCNRDFTTKIG | | | | TAACGCGTCA | | |
| | | LGQHKRLAHPAVRNQER | | | | ATTACCACCT | | |
| | | IVASQPKE | | | | GATTTGGACC | | |
| | | TSNRGAHKRCWTKEEEE | | | | AATTCACGGG | | |
| | | LLIRLEAQFEGNKNINK | | | | ATTTGTCCAA | | |
| | | LIAEHITTKT | | | | GGTGGACGGG | | |
| | | AKQISDKRRLLSRKPAE | | | | CCACCTTTAC | | |
| | | EPREEPGTCHHTRRAAA | | | | TTAACCCGGA | | |
| | | SLRTEPEM | | | | AAAGGAACAT | | |
| | | SHHAQAEDRDNGPGRRP | | | | ATATAATTTA | | |
| | | LPGRAAAGGRTMDEIRR | | | | TGTGTGTTCG | | |
| | | HPDKGN | | | | ATAAA | | |
| | | GQQRPTKQKSEEQLQAY | | | | | | |
| | | YKKTLEERLSAGALNTF | | | | | | |
| | | PRAFKQVM | | | | | | |
| | | EGRDIKLVINQTAQDCF | | | | | | |
| | | GCLESISQIRTATRDKK | | | | | | |
| | | DTVTREKHPK | | | | | | |
| | | KPFQKWMKDRAIKKGNY | | | | | | |
| | | LRFQRLFYLDRGKLAKI | | | | | | |
| | | ILDDIECLSC | | | | | | |
| | | DIPLSEIYSVFKTRWET | | | | | | |
| | | TGSFKSLGDFKTYGKAD | | | | | | |
| | | NTAFRELITA | | | | | | |
| | | KEIEKNVQEMSKGSAPG | | | | | | |
| | | PDGITLGDVVKMDPEFS | | | | | | |
| | | RTMEIFNL | | | | | | |
| | | WLTTGKIPDMVRGCRTV | | | | | | |
| | | LIPKSSKPDRLKDINNW | | | | | | |
| | | RPITIGSILLR | | | | | | |
| | | LFSRIVTARLSKACPLN | | | | | | |
| | | PRQRGFIRAAGCSENLK | | | | | | |
| | | LLQTIIWSAK | | | | | | |
| | | REHRPLGVVFVDIAKAF | | | | | | |
| | | DTVSHQHIIHALQQREV | | | | | | |
| | | DPHIVGLVSN | | | | | | |
| | | MYENISTYITTKRNTHT | | | | | | |
| | | DKIQIRVGVKQGDPMSP | | | | | | |
| | | LLFNLAMDPL | | | | | | |
| | | LCKLEESGKGYHRGQSS | | | | | | |
| | | ITAMAFADDLVLLSDSW | | | | | | |
| | | ENMNTNISI | | | | | | |
| | | LETFCNLTGLKTQGQKC | | | | | | |
| | | HGFYIKPTKDSYTINDC | | | | | | |
| | | AAWTINGTP | | | | | | |
| | | LNMIDPGESEKYLGLQF | | | | | | |
| | | DPWIGIARSGLSTKLDF | | | | | | |
| | | WLQRIDQAP | | | | | | |
| | | LKPLQKTDILKTYTIPR | | | | | | |
| | | LIYIADHSEVKTALLET | | | | | | |
| | | LDQKIRTAVKEW | | | | | | |
| | | LHLPPCTCDAILYSSTR | | | | | | |
| | | DGGLGITKLAGLIPSVQ | | | | | | |
| | | ARRLHRIAQS | | | | | | |
| | | SDDTMKCFMEKEKMEQL | | | | | | |
| | | HKKLWIQAGGDRENIPS | | | | | | |
| | | IWEAPPSS | | | | | | |
| | | EPPNNVSTNSEWEAPTQ | | | | | | |
| | | KDKFPKPCNWRKNEFKK | | | | | | |
| | | WTKLASQ | | | | | | |
| | | GRGIVNFERDKISNHWI | | | | | | |
| | | QYYRRIPHRKLLTALQL | | | | | | |
| | | RANVYPTREF | | | | | | |
| | | LARGRQDQYIKACRHCD | | | | | | |
| | | ADIESCAHIIGNCPVTQ | | | | | | |
| | | DARIKRHNYI | | | | | | |
| | | CELLLEEAKKKDWVVFK | | | | | | |
| | | EPHIRDSNKELYKPDLl | | | | | | |
| | | FVKDARALW | | | | | | |
| | | DVTVRYEAAKSSLEEAA | | | | | | |
| | | AEKVRKYKHLETEVRHL | | | | | | |
| | | TNAKDVTFV | | | | | | |
| | | GFPLGARGKWHQDNFKL | | | | | | |
| | | LTELGLSKSRQVKMAET | | | | | | |
| | | FSTVALFS | | | | | | |
| | | SVDIVHMFASRARKSMV | | | | | | |
| | | M | | | | | | |
| Talpaocci- | R2ToC | MLAPRSDRGNGFGDGPA | 33488 | TCTAGTTACA | 33395 | TGACTGTTTA | 33510 | NW_023605038.1 |
| dentalis | | THPVPVNEIGQEPIDPD | | ACTGGGCATA | | GAGTAGGATT | | |
| | | PFLGGENC | | GCTGCAGAGA | | TTTTATTTGA | | |
| | | GLPLRLFGVSVGTQTSQ | | TCTCACCTCC | | TATTATGTAT | | |
| | | EDLTPIPTKLAVNELDV | | TCGTGGTCCC | | GTTTTATACC | | |
| | | LVNFSFEVY | | GCTGGTAAGC | | TTGTACTTTG | | |
| | | RSDLKGYVGGVHFPVNL | | CCTTAACAGG | | TTCATTTATA | | |
| | | EVLEGFPEVYEHLEPQP | | GTGACTAAGT | | TTGTATTGGG | | |
| | | CQGDNLD | | AGATCTCTGC | | GGGATTTTTT | | |
| | | PSPPDDGVQVVLGREEG | | CCCAGTCAAG | | GTAGCATGGG | | |
| | | KKEREGAPEALPPVQRG | | GAGCCGCTGG | | ATTGTTTTTA | | |
| | | HSEQVPD | | GAATCACCAG | | TTGTATGACC | | |
| | | DIVKVTVPDKNPPCPCC | | CCCAGCGATT | | TTTTTGATAT | | |
| | | STRLNSVLALIDHLKGS | | CCTTTCAAAT | | TTTTAATAAA | | |
| | | HGKRRVCFR | | TTAGGTGAAA | | CTAGACGGTA | | |
| | | CAKCGRENFNHHSTVCH | | CAAATTTCTC | | GCTATGGGGG | | |
| | | FAKCKGPSEEKPPVGEW | | GGTGTGGGTC | | TTAGGGCACG | | |
| | | ICEVCGR | | GCAAGACTTA | | CCACAAGCCA | | |
| | | DFTTKIGLGQHKRLAHP | | CTACCTAAAA | | GTTAGGGCGC | | |
| | | MVRNQERIDASQPKETS | | CCTGGCCCCA | | TCATAGTGAG | | |
| | | NRGAHKKC | | CGGTCTGACA | | TAGGGACAGT | | |
| | | WTKEEEELLARLEVQFE | | GGGGCAACGG | | AATTTTAATT | | |
| | | GHKNINKLIAEHITTKT | | GTTCGGAGAT | | CACAACGCGT | | |
| | | NKQISDKRRQ | | | | CAATTACCAT | | |
| | | MTRKDKGEGGAAGKLGP | | | | CTGATTCGGA | | |
| | | DTGRGNHSQAKVGNNGL | | | | CCAATCTTAC | | |
| | | GGNQLP | | | | CTGACTTGTA | | |
| | | GGPAATKDKAGCHLDKE | | | | CTAAGTTACC | | |
| | | EGNRIAISQQKKGRLQG | | | | GGATTTGTCC | | |
| | | RYHKEIKR | | | | CAGGTGGACG | | |
| | | RLEEGVINTFTKAFKQL | | | | GGCCACCTTT | | |
| | | LECQEVQPLINKTAQDC | | | | ACTTAACCCG | | |
| | | FGLLESACHI | | | | GAAAAGGAAC | | |
| | | RTALRGKNKKETQEKPT | | | | ATGTATTTTA | | |
| | | GGQCLKWMKKRAVKKGN | | | | TATATGTGTT | | |
| | | YLRFQRL | | | | | | |
| | | FHLDRGKLARIILDDIE | | | | | | |
| | | CLSCDIAPSEIYSVFKA | | | | | | |
| | | RWETPGQFAGL | | | | | | |
| | | GNFKSTGKADNKAFSDL | | | | | | |
| | | ITAKEIKKNVQEMSKGS | | | | | | |
| | | APGPDGIAI | | | | | | |
| | | GDIKGMDPGYSRTAELF | | | | | | |
| | | NLWLTSGEIPDMVRGCR | | | | | | |
| | | TVLIPKSTQ | | | | | | |
| | | PERLKDINNWRPITIGS | | | | | | |
| | | ILLRLFSRIITARMTKA | | | | | | |
| | | CPLNPRQRGFI | | | | | | |
| | | RAAGCSENLKLLQTIIR | | | | | | |
| | | TAKSEHRPLGVVFVDIA | | | | | | |
| | | KAFDTVSHQH | | | | | | |
| | | ILHVLQQRGVDPHIIGL | | | | | | |
| | | VSNMYKDISTFVTTKKD | | | | | | |
| | | THTDKIQIRVG | | | | | | |
| | | VKQGDPLSPLLFNLAMD | | | | | | |
| | | PLLCKLEESGNGFHRGG | | | | | | |
| | | HTITAMAF | | | | | | |
| | | ADDLVLLSDSWENMEKN | | | | | | |
| | | IEILEAFCDLTGLKTQG | | | | | | |
| | | QKCHGFYIK | | | | | | |
| | | PTKDSYTVNNCAAWTIY | | | | | | |
| | | GTPLNMINPGDSEKYLG | | | | | | |
| | | LQIDPWTGI | | | | | | |
| | | ARSNISSKLDSWLERIN | | | | | | |
| | | QAPLKPLQKLDILKTYT | | | | | | |
| | | IPRLTYMVDH | | | | | | |
| | | SEMKAGALEALDLQIRS | | | | | | |
| | | AVKDWLHLPSCTCDAIL | | | | | | |
| | | YVSTKDGGL | | | | | | |
| | | GVTKLAGLIPSIQARRL | | | | | | |
| | | HRIAQSPDETMKAFLDK | | | | | | |
| | | EQMEKQYAK | | | | | | |
| | | LWVQAGGKREKIPSIWD | | | | | | |
| | | ALPTPVLLTTSDTLSEW | | | | | | |
| | | EAPNPKSKY | | | | | | |
| | | PRPCNWRRKEFEKWTKL | | | | | | |
| | | QCQGRGIQNFKGDVISN | | | | | | |
| | | NWIQNYR | | | | | | |
| | | RIPHRKLLTAVQLRANV | | | | | | |
| | | YPTREFLGRGRGDDCVK | | | | | | |
| | | FCRHCEVD | | | | | | |
| | | LETCGHIISYCPVTKEA | | | | | | |
| | | RIKRHNRICERLIEEAE | | | | | | |
| | | KKDWWFKEP | | | | | | |
| | | HIRDAVKELFKPDLIFV | | | | | | |
| | | KEDRALVVDVTVRFEAT | | | | | | |
| | | TTSLEEAAIEK | | | | | | |
| | | VDKYKRLETEVRSLTNA | | | | | | |
| | | KDVLFMGFPLGARGKWY | | | | | | |
| | | QGNFKLLD | | | | | | |
| | | MLGLSESRQVTVAKTLS | | | | | | |
| | | TDALISSVDIVHMFASK | | | | | | |
| | | ARKMNLVTV | | | | | | |
| Daniorerio | R2Dr | MESTAKGKSYWMARRPV | 33489 | AATCCCCCCT | 33499 | AAATCCCAGC | 33511 | AB097126.1 |
| | | EGATEGSLGRVPFVTRD | | ACCCAATCCC | | GGGATACAGC | | |
| | | PKRKPEA | | CCCGTCGTGA | | AAGAAGGTAT | | |
| | | KRTLTHGLGLRECSVVL | | CCTCCAGGCC | | CGGATCTAAT | | |
| | | TRLIEGRRGRDHTPSGW | | AGGAATCACG | | AAGGTTGAGC | | |
| | | NAQRGMP | | AGCGTACGAC | | GAGGAGAGGG | | |
| | | NDESSVEEPNGPIPSNP | | AGTGGCCATC | | TGGAGATCCT | | |
| | | IPTGTQALPEPMADGEQ | | CGGCAATGAC | | TTGGGGGGGG | | |
| | | GEHPGVW | | AATAGCGTGA | | TCGGGCTAAG | | |
| | | TLPLRDLNCPLCGGSAS | | CTAACGACAA | | TTCCCCTCTC | | |
| | | TAVKVQRHLAFRHGTVP | | TGAGTCAGAT | | GGGTCCTCCC | | |
| | | VRFSCESC | | CCATGACCCT | | ACGGTGACGC | | |
| | | GKTSPGCHSVLCHIPKC | | TGGAGTGGGT | | TCTACCCCTC | | |
| | | RGPTGEPPEKVVKCEGC | | TAACCTCCGC | | CCTCCTCGCT | | |
| | | SRTFGTRR | | CTCTTTAAAA | | CGTAGAACCC | | |
| | | ACSIHEMHVHSEIRNRK | | AC | | AACGGTGAAC | | |
| | | RIAQDRQEKGTSTDGEG | | | | ACGGTTGGCA | | |
| | | RAGVERAD | | | | GGATGAAGTG | | |
| | | AGEGPSGEGIPPKRPRR | | | | ACGTGAGGGG | | |
| | | ARTPREPSEPPANPPIL | | | | TAAGACATGC | | |
| | | SPQPDLPP | | | | GTACGTGAGC | | |
| | | GGLRDLLREVASGWVRA | | | | GCGCATTTTT | | |
| | | ARDGGTVIDSVLAAWLD | | | | GCTGTTCTCT | | |
| | | GNDRLPE | | | | GGACTGGGTT | | |
| | | LVDAATQRTLQGLPAGR | | | | TCGTCCCCCT | | |
| | | LARRPATFVAPNRRRGR | | | | CACAACCATC | | |
| | | WGRRLKL | | | | ACTTACACTA | | |
| | | LAKRRAYHDCQIRFRKD | | | | TAGGGGCACA | | |
| | | PARLAANILDGKSETSC | | | | GCGGCTCCTA | | |
| | | PINEQAIHEH | | | | CCTCCCTCCC | | |
| | | FRNKWANPSPFGGLGRF | | | | TATGACCCCC | | |
| | | GTENRANNAHLLGPISK | | | | CCTTCCCATA | | |
| | | SEVQTSLR | | | | CCGATCCATG | | |
| | | NASNASTPGPDGVGKRD | | | | GCTGTTCTAG | | |
| | | ISNWDPECETLTQLFNM | | | | TCTGGACCGA | | |
| | | WWFTGVI | | | | GGGTCGGACG | | |
| | | PSRLKKSRTVLLPKSSD | | | | GGGCATTTGA | | |
| | | PGAEMEIGNWRPITIGS | | | | AGGTAGCTGG | | |
| | | MVLRLFTRVI | | | | AATCCTCCGC | | |
| | | NTRLTEACPLHPRQRGF | | | | TGCTGCGAGC | | |
| | | RRSPGCSENLEVLECLL | | | | CTGAGGTCGA | | |
| | | RHSKEKRS | | | | TGGTTAGAGG | | |
| | | QLAVVFVDFAQAFDTVS | | | | TGAAATACTT | | |
| | | HEHMLSVLEQMNVDPHM | | | | GGGAGGAGAC | | |
| | | VNLIREIYT | | | | ACAGCCTCCG | | |
| | | NSCTSVELGRKEGPDIP | | | | GAGAGCCCCT | | |
| | | VRVGVKQGDPLSPLLFN | | | | CCCGGGTGGT | | |
| | | LALDPLIQS | | | | CATCATGGCA | | |
| | | LERTGKGCEAEGHKVTA | | | | ACCGGGTGAA | | |
| | | LAFADDLALVAGSWEGM | | | | ACCTTACGGT | | |
| | | AHNLALV | | | | TTCACTTACG | | |
| | | DEFCLTTGLTVQPKKCH | | | | AAACAGCACC | | |
| | | SFMVRPCRGAFTVNDCP | | | | ATAACAGCGC | | |
| | | PWVLGGK | | | | CGTAATAGCG | | |
| | | ALQLTNIENSIKYLGVK | | | | CACCGGTGTG | | |
| | | VNPWAGIEKPDLTVALD | | | | ACTACTGTCC | | |
| | | RWCKRIGKSL | | | | AGTGCTGATA | | |
| | | LKPSQKVYILNQFAIPR | | | | TTCTCATCTG | | |
| | | LFYLADHGGAGDVMLQN | | | | GAGAATACAA | | |
| | | LDGTIRKAV | | | | CACGGGTAAT | | |
| | | KKWLHLPPSTCNGLLYA | | | | GGCAGAGTAT | | |
| | | RNCNGGLGICKLTRHIP | | | | TCAAAACCCA | | |
| | | SMQARRMF | | | | AATGTTTACG | | |
| | | RLANSSDPLMKAMMRGS | | | | ATCGACCAAC | | |
| | | RVEQKFKKAWMRAGGEE | | | | GGAGTCGTTC | | |
| | | SALPRV | | | | CCTTGCATCT | | |
| | | FGANQYQEGEEVANDLV | | | | AGGCCGGACC | | |
| | | PRCPMPSDWRLEEFQHW | | | | CGAAACTGCC | | |
| | | MGLPIQ | | | | GTAATTGCCC | | |
| | | GVGIAGFFRNRVANGWL | | | | GTCCCCAAGG | | |
| | | RKPAGFKERHYIAALQL | | | | TAGCCTCTTA | | |
| | | RACVYPTL | | | | GAAAACCGAA | | |
| | | EFQQRGRSKAGAACRRC | | | | GCCCGGTCGG | | |
| | | SSRLESSSHILGKCPAV | | | | GGCGGTGGTT | | |
| | | QGARIRRH | | | | GCGGCGGCGC | | |
| | | NKICDLLKAEAETRGWE | | | | TGCGGGGGCC | | |
| | | VRREWAFRTPAGELRRL | | | | TGCTGCTCGG | | |
| | | DLVLILGDE | | | | GCGGCGTCGG | | |
| | | ALVIDVTVRYEFAPDTL | | | | TGTGCCGCGG | | |
| | | QNAGKDKVSYYGPHKEA | | | | TGGTTGCGGT | | |
| | | IARELGVRR | | | | GGTGCGGCGG | | |
| | | VDIHGFPLGARGLWLAS | | | | GGATCTCGGT | | |
| | | NSKVLELMGLSRERVKV | | | | CCTTGCGGTG | | |
| | | FSRLLSRR | | | | CCGCTGTGCC | | |
| | | VLLYSIDIMRTFYATLQ | | | | GCCGCGGTCG | | |
| | | | | | | CGTCGGTGGC | | |
| | | | | | | GCTGGGGTGG | | |
| | | | | | | TGGCCCGAGT | | |
| | | | | | | GGCGTCGGCG | | |
| | | | | | | TGCCACTGCC | | |
| | | | | | | CATAGTCGCC | | |
| | | | | | | CGCGGGGGCG | | |
| | | | | | | ACCGATCTGG | | |
| | | | | | | AGGGGCGAGG | | |
| | | | | | | GGGCTCGCGG | | |
| | | | | | | GACTTTAACG | | |
| | | | | | | AGAAACGGAA | | |
| | | | | | | CGCAACTTCT | | |
| | | | | | | CGCATCGCTC | | |
| | | | | | | CCGGGACTTT | | |
| | | | | | | CCCCCCTCGT | | |
| | | | | | | TCAGCCGAGG | | |
| | | | | | | GATGCCAAAA | | |
| | | | | | | GGCATGAAAG | | |
| | | | | | | GTAAGTACCA | | |
| | | | | | | TACCGGTCCG | | |
| | | | | | | CAAAACTCTC | | |
| | | | | | | TTCTGACTCG | | |
| | | | | | | GTTCTCTGTT | | |
| | | | | | | GGTTTTCTAG | | |
| | | | | | | AGTAACAACG | | |
| | | | | | | AGGTGGAGGA | | |
| | | | | | | GAGGGACATG | | |
| | | | | | | GCAGGGACTC | | |
| | | | | | | CCATTCGTGC | | |
| | | | | | | CAGCGGGTGG | | |
| | | | | | | GGACAGATCG | | |
| | | | | | | AAGGAACGGT | | |
| | | | | | | TCGAGGGCGT | | |
| | | | | | | AACAGACGAG | | |
| | | | | | | AGGGAATCCG | | |
| | | | | | | GTCACACATT | | |
| | | | | | | GATGCCATGC | | |
| | | | | | | CTAAATAGGC | | |
| | | | | | | GAGGTTTGTA | | |
| | | | | | | TTTCTACTTT | | |
| | | | | | | GTGGGTTCAG | | |
| | | | | | | TATAGTCGGA | | |
| | | | | | | GCATATGGTC | | |
| | | | | | | GGTTGTCCCG | | |
| | | | | | | TTGTTTTCAC | | |
| | | | | | | GGCGGGCAAG | | |
| | | | | | | CGACTATCAT | | |
| | | | | | | GATAAAGTAG | | |
| | | | | | | AATGGGAGAC | | |
| | | | | | | GGGCTCCCTG | | |
| | | | | | | ACAAACCCGG | | |
| | | | | | | AAAGGCGCCC | | |
| | | | | | | CCCCGTGGTT | | |
| | | | | | | CGTAGCAGCT | | |
| | | | | | | GACGGATCAC | | |
| | | | | | | GCTCGAAGAA | | |
| | | | | | | AAATGAGTGA | | |
| | | | | | | GAGGGGACGC | | |
| | | | | | | CGCAACCAC | | |
| Oryzias | R201 | MGTDTVYVGQDYPSGLS | 33490 | CGCACAGGGG | 33500 | GGGGGACAGC | 33512 | LC349444.1 |
| latipes | | KRVPARLVAGPMLRERS | | ACACAGAGCC | | TGGGAGTCTC | | |
| | | CHAHVFR | | TGCCCAAGTA | | GGCATGATTA | | |
| | | AGHMWNWRTSLPSGRWD | | CCGCTCCCGA | | CAAATCTTGC | | |
| | | QPALEKSRVLTRSVATA | | GGGAGCGGGA | | GCTGCACTCG | | |
| | | TDPEITS | | AACGGGGGGG | | GATGTCGTCC | | |
| | | YPGKSVSTSTQVQEEDW | | TGACTATCCC | | CCGTGACGGA | | |
| | | CSRESGWISPGLAPEEP | | CTGGGGTCCG | | CACATTAATC | | |
| | | SWSEITA | | GCGAGAGCGC | | CGGAAAGCGA | | |
| | | SMVATMRVATEEVVLEP | | TGGTCTACGG | | GTGGTGACTC | | |
| | | QPEQVVTILPEHGRNVP | | ACCAGGGGTG | | GCCTCAAG | | |
| | | PGLAEQDT | | GCTGTGGGCA | | | | |
| | | ASPIEVSVLLPDLAENC | | GGCTGCTCCT | | | | |
| | | PLCGVPSGGLRLLGKHF | | CAGGCCAGTT | | | | |
| | | AVRHAGVPV | | GATTAGTTAC | | | | |
| | | TYECRKCAWRSPNSHSI | | GCATGGGCTG | | | | |
| | | SCHVPKCRGRARMPSGD | | TACCTCCACG | | | | |
| | | PGIACDL | | TGGTCCCGCT | | | | |
| | | CEARFATEVGVAQHKRH | | GGTAACGACT | | | | |
| | | VHPVEWNKVRLERRGAR | | TGTCGGCTAA | | | | |
| | | GGGIKAT | | ATCAGCCCGC | | | | |
| | | KLWSVAEVETLIRLIRE | | CCACCATCTG | | | | |
| | | HGDSGATYQLIADELGR | | GGATATGGTT | | | | |
| | | GKTAEQVRS | | GACCGTCTAA | | | | |
| | | KKRLLRIDTASNSPDDA | | CCCCAGTACT | | | | |
| | | EVEEERLESLAVRSSSR | | CAGGTCACAA | | | | |
| | | SPPSLVATR | | ACAAA | | | | |
| | | VREAVARGESEGGEEIR | | | | | | |
| | | AIAALIRDVDQNPCLIE | | | | | | |
| | | TSASDIISKLG | | | | | | |
| | | RRVDGPKRPRPVVREQT | | | | | | |
| | | QEKGWVRRLARRKREYR | | | | | | |
| | | EAQYLYS | | | | | | |
| | | RDQARLAAQILDGAASQ | | | | | | |
| | | ECALPVDQVYGAFREKW | | | | | | |
| | | ETVGQFH | | | | | | |
| | | GLGEFRTGARADNWEFY | | | | | | |
| | | SPILAAEVKENLMRMAN | | | | | | |
| | | GTAPGPD | | | | | | |
| | | RISKKALLDWDPRGEQL | | | | | | |
| | | ARLYTTWLIGGVIPRVF | | | | | | |
| | | KECRTKLLP | | | | | | |
| | | KSSDPVELQDIGGWRPV | | | | | | |
| | | TIGSMVTRLFSRILTMR | | | | | | |
| | | LTRACPINP | | | | | | |
| | | RQRGFLASSSGCAENLL | | | | | | |
| | | IFDEIVRRSRRDGGPLA | | | | | | |
| | | VVFVDFARA | | | | | | |
| | | FDSISHEHILCVLEEGG | | | | | | |
| | | LDRHVIGLIRNSYVDCV | | | | | | |
| | | TRVGCVEGM | | | | | | |
| | | TPPIQMKVGVKQGDPMS | | | | | | |
| | | PLLFNLAMDPLIHKLET | | | | | | |
| | | AGTGLKWG | | | | | | |
| | | DLSIATLAFADDLVLVS | | | | | | |
| | | DSEEGMGRSLGILEKFC | | | | | | |
| | | QLTGLRVQP | | | | | | |
| | | RKCHGFFMDKGVVNGCG | | | | | | |
| | | TWEICGSPIHMIPPGES | | | | | | |
| | | VRYLGVQV | | | | | | |
| | | GPGRGVMEPDLIPTVHT | | | | | | |
| | | WIERISEAPLKPSQRMR | | | | | | |
| | | VLNSFALPR | | | | | | |
| | | IIYQADLGKVTVTKLAQ | | | | | | |
| | | IDGIVRKAVKKWLHLSP | | | | | | |
| | | STCNGLLYSR | | | | | | |
| | | NRDGGLGLLKLERLIPS | | | | | | |
| | | VRTKRIYRMSRSPDIWT | | | | | | |
| | | RRMTSHSVS | | | | | | |
| | | KSDWEMLWVQAGGERGS | | | | | | |
| | | APVMGAVEAAPTDVERS | | | | | | |
| | | PDYPDW | | | | | | |
| | | RREENLAWSALRVQGVG | | | | | | |
| | | ADQFRGDRTSSSWIAEP | | | | | | |
| | | ASVGFAQ | | | | | | |
| | | RHWLAALALRAGVYPTR | | | | | | |
| | | EFLARGKEKSGAACRRC | | | | | | |
| | | PARLESCS | | | | | | |
| | | HILGQCPFVQANRIARH | | | | | | |
| | | NKVCVLLATEAERFGWT | | | | | | |
| | | VIREFRLED | | | | | | |
| | | AAGGLKIPDLVCKKADT | | | | | | |
| | | VLIVDVTVRYEMDGETL | | | | | | |
| | | KRAASEKVK | | | | | | |
| | | HYLPVGQQITDKVGGRC | | | | | | |
| | | FKVMGFPVGARGKWPAS | | | | | | |
| | | NNTVLAE | | | | | | |
| | | LGVPAGRMRTFARLVSR | | | | | | |
| | | RTLLYSLDILRDFMREP | | | | | | |
| | | AGRGTRVA | | | | | | |
| | | LIPAATGAAN | | | | | | |

### Example 8. Examination of R2Tg Activity

[0196] As R2Tg had the highest insertion activity, we continued to explore the programmability of this R2 system. The characterization of R2Tg enzymatic activities and payload flexibility at the 28S locus and a reprogrammed target in human cells were assessed (FIG. 30A-C, 32, 54A-C, 55A-C). We tested R2Tg for heterologous activity at the endogenous 28S locus by designing an EGFP payload flanked by the cognate R2Tg 5′ and 3′ UTRs and 28S homology arms. Co-transfection of this engineered payload together with wild-type R2Tg resulted in EGFP insertion into endogenous 28S loci, as determined by left and right PCR junctional analysis (FIG. 30A). To verify dependence on the retrotransposition mechanism, we introduced inactivating mutations in the RLE endonuclease domain (R2Tg_{D1274A}) and ZF domain (R2Tg_{ZF2mut}), and found these mutations ablated insertion activity (FIG. 30B). Alternatively, mutations introduced at catalytic residues in the RT domain (R2Tg_{D877A,D878A,D884A}) significantly reduced, but did not eliminate, insertion activity (FIG. 30B), which we confirmed by quantifying insertion events using next generation sequencing of targeting amplicons (NGS) (FIG. 30C). We validated these findings on inactivating mutations with our plasmid reporter assay by both luciferase production and editing by NGS (FIG. 30D and FIG. 31A-B). Based on NGS reads and gel electrophoresis readouts, all R2Tg insertions were found to be full length (FIG. 30), in contrast to observed partial insertions with R2Ol (Su et al., 2019 RNA. 25, 1432-1438). However, R2Tg integration was accompanied by indels at the 28S target, consistent with the previously observed non-templated addition of deoxycytidines by the RT domain (Bibillo, et al., 2004. Journal of Biological Chemistry. 279, pp. 14945-14953.) (FIG. 31C). To finely profile boundaries of functional domains, we tested N- and C-terminal truncations, finding that no C-terminal truncations were tolerated, likely due to loss of the RLE domain, whereas N-terminal truncations were tolerated up to the ZF motifs (FIG. 32). These results show the necessity of the ZF and RLE domains for activity and demonstrate that the N-terminal domain upstream of the ZF motifs does not critically contribute to the insertion process.

[0197] Having determined that the R2TgZF2mut mutant ablated integration, we speculated that supplementing additional DNA binding or nicking activity could rescue R2 integration activity at the 28S target site. We mutated Cas9 from Streptococcus pyogenes to generate either nickase (SpCas9H840A) or dead (SpCas9D10A,H840A) variants and fused these Cas9 variants via an XTEN linker to the N-terminus of R2TgΔ1-184,ZF2mut, which contains both a truncation that retains activity (Δ1-184) and the inactivating ZF2 domain mutation (ZF2mut). We then designed Cas9 guides against the 28S target region and coupled these with the R2Tg variants (FIG. 33A). We found that both single guides and paired guides around the target site were able to recruit with SpCas9H840A-R2TgZF2mut and restore integration at the locus, up to 72% of that of WT R2Tg (FIG. 33B-C). However, fusions of SpCas9D10A,H840A with the ZF2 mutant failed to restore activity, implying that the ZF2 binding was necessary for successful nicking (FIG. 34A). We also observed that SpCas9H840A fusion to the RLE deficient mutant R2TgD1274A failed to rescue insertion activity, suggesting involvement of the native nicking of the RLE domain in insertion process, perhaps for second strand nicking or initiation of second strand synthesis (FIG. 34B). These observations held over a larger panel of mutations in the RT and RLE domains as well (FIG. 34C). Therefore, the insertion process involving the RLE and RT domains can be rescued when combined with SpCas9H840A nickase, suggesting a possible route for evolutionary retargeting dependent on ZF evolution or reengineering via Cas9 supplementation.

### Example 9. Identification of Factors Affecting Integration Dynamics

[0198] Given that the homology of the RNA template is a strong determinant of the target site, we probed the necessary homology for integration. We tested iterative truncations of either the 5′ or 3′ homology regions (FIG. 35A), finding that, while the 5′ region was sensitive to truncation and required a minimum homology between 20 and 40 nt, the 3′ region was robust to truncations, allowing efficient integration even in the absence of homology (FIG. 35B). This leniency may be due in part to promiscuous priming of the R2 systems, suggesting an avenue for evolving preferences to new loci via asymmetric acquisition of homology that would be compatible with Class 1 insertions observed in our computational exploration.

[0199] The malleable constraints of RNA cargo homology, especially at the 3′ end, prompted us to test cargo components. We next tested whether priming could occur internally to cargo, which would allow for successful integration after swapping the UTR and homology regions. Successful insertion from internal homology allows for scarless integration, with significant gene editing applications (FIG. 35C). We evaluated a panel of cargo permutations (FIG. 36A), swapping or duplicating homology elements to investigate whether internal homology could allow for template insertion. Moving homology internal to the UTR resulted in successful scarless insertions (FIG. 36C and FIG. 36B), as confirmed by sanger sequencing, suggesting flexible template priming. Traces of payloads with homology external to the 5′ UTR, had a loss of phasing at the 5′ junction due to multiple populations, and next generation sequencing confirmed these were due to non-templated addition of nucleotides, similar to what we observed at the wildtype 28S locus (FIG. 37A-B). Analysis of cross-junctional PCR products of insertion products with cargos having internal homology showed a reduction of size corresponding to a complete absence of the UTR region (FIG. 37C, FIGS. 38A-D, and 60), confirming scarless insertion, the flexibility of the retrotransposon cargo architecture, and the efficiency of scarless integration especially with cargo 6 (FIG. 38C-D). These results highlight that priming off the template is very flexible, implying a very direct path for an expressed retrotransposon to acquire new priming sequences by landing in new areas via promiscuous priming of novel target sites or acquiring nearby targets and supporting both the Class 1 and Class 2 insertion mechanism.

[0200] While permutations of cargo components and complete removal of the 3′ UTR were tolerated, deletion of the 5′ UTR region resulted in significantly lower integration rates (FIG. 38A); as integration was not completely eliminated, this suggests that some element of the 28S homology region is still recognized by R2Tg for integration. All tested payloads also had some amount of residual indel formation (FIG. 37B, FIG. 38A-B). Overall, moving homology regions internal to the UTRs could produce scarless insertion at both 5′ and 3′ junctions while still maintaining efficient integration, especially with cargo 9 (FIG. 38A). These modifications also show that scar formation of R2Tg due to external homology is not a necessary component for the system to function and suggested the feasibility of acquiring new sites via similarity to internal regions.

### Example 10. Programming of R2Tg for Integration at Specific Loci

[0201] We next programmed the R2Tg system to integrate at different loci by swapping target homologies (FIG. 39A). We designed scarless insertion payloads with homology arms to either AAVS1 or NOLC1 loci and co-transfected these payloads with R2Tg in HEK293FT cells, finding targeted insertion at NOLC1 at ˜0.5%, which depended on the RLE catalytic residues of R2Tg, and no detectable insertion at AAVS1 (FIG. 39B). To improve efficiencies of retargeting R2Tg at both loci, we tested whether SpCas9H840A could improve insertion through additional nicking activity. We designed a pair of guide RNAs to introduce nicks on the bottom and top strands of the NOLC1 locus or a single guide RNA to introduce a nick at the AAVS1 locus. We co-delivered these along with a cargo carrying transgene payloads, 5′ and 3′ R2Tg UTRs, and homology arms directed around the nicking site of 100 or 50 nt for AAVS1 and NOLC1 respectively. We found that SpCas9H840A-R2Tg fusion had increased efficiency at both NOLC1 (˜3%) and AAVS1 (˜0.5%) (FIG. 39B), showing that SpCas9H840A could significantly improve R2Tg insertion efficiency.

[0202] To find optimal payloads for efficient insertion at new loci, we designed a panel of payloads following integration guidelines that were effective at the 28S locus (FIG. 39C). Across designs, including internally located homology arms, deletion of the 3′ UTR, and truncation of the 5′ UTR, we progressively observed increased integration at the AAVS1 locus up to 6% (FIG. 39D). Importantly, addition of the 5′ 28S homology arm upstream of the 5′ UTR in payloads 2, 6, and 7 substantially improved integration activity. Payloads 4-7 with homology arms directly flanking the insert had scarless insertion at the AAVS1 locus, with minimal indel formation and perfect insertions representing more than 99% of the editing activity. The most truncated 5′ UTR sequence had the highest editing, suggesting that R2Tg recognition of the payload only required a small sequence region. As was expected from 28S payload characterization, the 3′ UTR was also dispensable for AAVS1 insertion. We also examined whether insertion activity at the endogenous AAVS1 locus could be optimized via better SpCas9H840A fusions to different R2Tg truncations, again finding that C-terminal truncations were not tolerated, whereas the 1-184 residue truncation of R2Tg had maximum activity compared to other truncations while offering a more compact version of the SpCas9H840A-R2Tg fusion (FIG. 40A-B). To test the dependence of these SpCas9H840A-R2Tg fusions on the binding and nicking activities of SpCas9H840A independently, we compared the SpCas9H840A-R2Tg fusion to the dead SpCas9D10A,H840A-R2Tg fusion, as well as SpCas9H840A and R2Tg delivered in trans as separate proteins. We found that, while the SpCas9D10A,H840A-R2Tg had no insertion activity, co-delivery of SpCas9H840A and R2Tg was sufficient to efficiently insert the payload at both NOLC1 and AAVS1 loci, showing that the nicking activity, but not binding activity, of SpCas9H840A was enhancing insertion efficiency (FIG. 40C).

[0203] As some R2 retrotransposons have been proposed to function as a homodimer upon binding their cognate RNA templates (Yang et al., 1998. Mol. Cell. Biol. 18, 3455-3465), we were motivated to explore whether dual guides on opposing DNA strands might emulate dual nicking and recruitment of R2Tg and stimulate more efficient integration. Comparing single and dual guides, we found that certain paired guides achieved up to 15% integration with minimal indels generated and near perfect integration >99% using payloads with 100 nt of homology (FIG. 41A). Specific combinations of paired guides had low levels of integration with SpCas9H840A alone, indicating some contribution from HDR mediated insertion of the payload off the DNA vector, and this effect was less prominent with single guides. Interestingly, top strand nicking guides, such as guide A4, could promote insertion, suggesting that the RLE domain of the R2Tg protein could initiate bottom strand nicking at the AAVS1 target (FIG. 41A). To reduce HDR background, we tested payloads with homology arms reduced from 100 nt to 50 nt, and found that these designs maintained insertion while blunting HDR byproducts (FIG. 41B). Surprisingly, while integration with SpCas9H840A-R2Tg had minimal indel formation, SpCas9H840A alone generated substantially more indels at the WT locus, indicating competition between complete integration and continued nicking and indel formation (FIG. 41A).

### Example 11. Further Development and Integration of Re-Targeted Retrotransposons

[0204] We next determined whether diverse non-LTR retrotransposons could be repurposed for integration in cells despite failing at the 28S locus. To compensate for potentially ineffective binding or cleavage at the 28S locus in mammalian cells, we fused a panel of 11 additional retrotransposon candidates to SpCas9H840A and tested them for additional guided insertion improvements at the 28S locus. We found that several of the retrotransposons, including many without activity at 28S target, had significant increases in 28S insertion when paired with targeting guides (FIG. 42A), including R2Bm, R2Ci, HeroDr, R10Mbr, R2Oi, and R2Tsp, whereas R2Tg and R2Mes did not have further increases, likely due to their already high natural integration.

[0205] We modified corresponding payloads for scarless insertion by rearranging homology regions internal to UTRs, and reprogrammed homology regions and SpCas9 guides to target payloads to the AAVS1 locus (FIG. 58B). We found that our framework for retrotransposon retargeting generalized, with 6 out of 12 orthologs tested efficiently reprogrammed (FIG. 42B-D) showing efficient reprogramming, with minimal indel formation accompanying the insertion activity (FIGS. 58B and 68). R2Toc had a high efficiency of reprogramming with strongly reduced background 28S insertion (FIG. 29A).

### Example 12. Site-specific Target-Primed Insertion Via Targeted CRISPR Homing of Retroelements (STITCHR)

[0206] After developing our SpCas9H840A-R2Toc-based insertion system, which we refer to as Site-specific Target-primed Insertion via Targeted CRISPR Homing of Retroelements (STITCHR), we explored multiple applications for STITCHR-based programmable gene insertion in mammalian cells. To generalize STITCHR reprogramming to other loci beyond AAVS1, we targeted the NOLC1 and SERPINA1 loci with panels of single and dual guides, finding that dual guides integration efficiencies up to 13% and 10% insertion at NOLC1 and SERPINA1, respectively (FIG. 43A-D). While single guides had measurable integration activity, dual guides tended to better promote integration. Assaying the fidelity of insertion, we found low indel formation at these sites, indicating that integration was with high fidelity and that integration by SpCas9H840A-R2Toc outcompeted indel formation, as indels were higher with SpCas9H840A alone (FIG. 43A, 43D). Moreover, integration was scarless, as would be expected from our payloads with internal homology regions. While many dual guide combinations and single guides enabled STITCHR gene insertion, minimal editing was observed with SpCas9H840A alone. Interestingly, single top strand nicking guides, in addition to bottom strand guides, could stimulate STITCHR insertion, suggesting R2Toc RLE domain participation in bottom strand nicking (FIG. 43A, 43C). Furthermore, we found that elimination of payload homology at NOLC1 or substitution for non-homologous sequences ablated editing (FIG. 44A). Conversely, increasing payload homology did not substantially increase integration efficiency, but led to higher background due to HDR (FIG. 44B). We also found that for high background loci, reducing payload homology could support gene integration with reduced HDR background, as observed at the AAVS1 and SERPINA1 loci with SpCas9H840A-R2Toc where we could achieve 8% gene integration with no background from HDR (FIG. 44C-D). Interestingly, we observed that R2Toc, like R2Tg, was also capable of programmable insertion without the assistance of Cas9 via the payload homology as the non-targeting guide conditions had 2% NOLC1, 1.3% AAVS1, and 0.35% SERPINA1 insertion (FIG. 43A-B, FIG. 44C, FIG. 71).

[0207] To take advantage of scarless genome insertion with R2Toc, we investigated whether we could place an EGFP tag in-frame to a protein target. We chose NOLC1 due to its distinct nuclear organization and designed our template in the reverse direction to prevent constitutive expression of the EGFP off the template cargo (FIG. 45A). We found that STITCHR-mediated GFP insertion led to NOLC1 tagging, as verified by confocal imaging and corresponding colocalization with immunofluorescence staining (FIG. 45B). We then explored additional payload flexibility of the STITCHR system at the AAVS1 locus, using a panel of cargo sequences of different lengths. Evaluating various therapeutically relevant genes, including BTK, CEP290, HBB, HEXA, OTC, and PAH, we found insertion efficiencies of 10-20% at the AAVS1 locus with minimal insertion using SpCas9H840A alone (FIG. 45C-D, FIG. 74). These payloads varied in size between 0.7-7.7 kb, showing that STITCHR mediated insertion can insert a wide range of insert sizes.

[0208] Multiple types of genomic edits by STITCHR, including single base edits, small insertions, and a range of large payload insertions are enabled by the flexible nature of the retrotransposon insertion pathway (FIG. 59A-B, FIG. 61, FIG. 69A-C, FIG. 70A-C). We tested a panel of edits at the NOLC1 locus, spanning single base changes (transitions and transversions), small insertions (1-10 bp), therapeutic cargos, and large gene insertions. STITCHR could effectively install these diverse edit types (FIG. 59C), including therapeutically relevant genes of different sizes, such as BTK, CEP290, HBB, HEXA, OTC, and PAH, and synthetic sequences up to 10.9 kb. STITCHR also inserted these therapeutic genes at AAVS1 (FIG. 45D). For cargos carrying small edits, we found both that extending the transcript beyond the homology arms further improved editing, presumably due to stabilization of the RNA transcript or better expression from the Pol II promoter (FIG. 59C), and U6 promoters could effectively produce smaller templates and genomic edits (FIG. 72D). To combine STITCHR-mediated insertion with deletion, we tested simultaneous replacement of genomic regions by separating the homology target sites by 50-150 bp (FIG. 60A), which we refer to as STITCHR-replace. We found that an EGFP payload could be simultaneously inserted while replacing 50-150 bp of genomic sequence with 6-7% integration efficiency (FIG. 60B and FIG. 73).

[0209] To test STITCHR activity in a non-dividing context, we inhibited HDR using the cell cycling inhibitor aphidicolin, which traps cells at the G1/S phase transition and inhibits HDR activity. We found that STITCHR integration of an EGFP cargo at the NOLC1 locus was not inhibited by increasing concentrations of aphidicolin and led to increases in efficiency at intermediate aphidicolin concentrations. In contrast, HDR integration by SpCas9 nuclease at the EMX1 locus was inhibited by up to 94% by aphidicolin (FIG. 46A-B), and residual NOLC1 HDR insertion observed with SpCas9H840A alone was eliminated at all tested aphidicolin concentrations, further demonstrating a retrotransposition and HDR-independent based mechanism for insertion (FIG. 46B).

[0210] To extend STITCHR to multiplexed editing without reliance on cell division, we investigated whether STITCHR could mediate multiplexed integration at two different sites in the genome. We simultaneously delivered guide RNAs and cargos targeting the AAVS1 and NOLC1 loci for Gluc and EGFP insertion, respectively, finding that multiplexed insertion was possible with 12% and 6% integration at the AAVS1 and NOLC1 loci, respectively (FIG. 47A-B).

[0211] We also examined STITCHR in the context of a concurrent insertion/deletion approach. We compared a SpCas9^{H840A}-R2Toc using a single fixed guide RNA (N4, see table 7) to target the NOLC1 locus to that of the non-targeting, SpCas9^{H840A} alone. An EGFP insert was used as a payload. When homology arms on the payload template were separated by 0 bp, 50 bp, 100 bp, or 150 bp, we were successfully able to delete the genomic target while concurrently inserting the EGFP payload into the NOLC1 locus (FIG. 49). Exemplary sequences for the 50 bp deletion, 100 bp deletion, and 150 bp deletion, as well as the Guide sequence used for this experiment are found in Table 7.

TABLE 7
EGFP Cargo and Guide Sequences for Concurrent
Insertion/Deletion

| | | SEQ | | SEQ |
|---|---|---|---|---|
| | | ID | Guide | ID |
| Cargo | Sequence | NO: | Sequence | NO: |
| −50 | atccttaatattcaatgaagcgcgggtaaacggcgggag | 33513 | GACGCGTAT | 33425 |
| deletion | taactatgactctcttaaggtctagttacaactggTCCT | | TGCCTGGAG | |
| | GAGTCGTGCTGCGTCGACAACGGTAGTGACGCGTATTGC | | GA | |
| | CTGGAGGCCGCCACCATGCCCGCCATGAAGATCGAGTGC | | | |
| | CGCATCACCGGCACCCTGAACGGCGTGGAGTTCGAGCTG | | | |
| | GTGGGCGGCGGAGAGGGCACCCCCGAGCAGGGCCGCATG | | | |
| | ACCAACAAGATGAAGAGCACCAAAGGCGCCCTGACCTTC | | | |
| | AGCCCCTACCTGCTGAGCCACGTGATGGGCTACGGCTTC | | | |
| | TACCACTTCGGCACCTACCCCAGCGGCTACGAGAACCCC | | | |
| | TTCCTGCACGCCATCAACAACGGCGGCTACACCAACACC | | | |
| | CGCATCGAGAAGTACGAGGACGGCGGCGTGCTGCACGTG | | | |
| | AGCTTCAGCTACCGCTACGAGGCCGGCCGCGTGATCGGC | | | |
| | GACTTCAAGGTGGTGGGCACCGGCTTCCCCGAGGACAGC | | | |
| | GTGATCTTCACCGACAAGATCATCCGCAGCAACGCCACC | | | |
| | GTGGAGCACCTGCACCCCATGGGCGATAACGTGCTGGTG | | | |
| | GGCAGCTTCGCCCGCACCTTCAGCCTGCGCGACGGCGGC | | | |
| | TACTACAGCTTCGTGGTGGACAGCCACATGCACTTCAAG | | | |
| | AGCGCCATCCACCCCAGCATCCTGCAGAACGGGGGCCCC | | | |
| | ATGTTCGCCTTCCGCCGCGTGGAGGAGCTGCACAGCAAC | | | |
| | ACCGAGCTGGGCATCGTGGAGTACCAGCACGCCTTCAAG | | | |
| | ACCCCCATCGCCTTCGCCAGATCTCGAGCTCGAGCTCGG | | | |
| | CTTCCTGCGCGATAACCAACTCTCAGAGGTGGCCAATAA | | | |
| | GTTCG | | | |
| −100 | atccttaatattcaatgaagcgcgggtaaacggcgggag | 33514 | GACGCGTAT | 33425 |
| deletion | taactatgactctcttaaggtctagttacaactggTCCT | | TGCCTGGAG | |
| | GAGTCGTGCTGCGTCGACAACGGTAGTGACGCGTATTGC | | GA | |
| | CTGGAGGCCGCCACCATGCCCGCCATGAAGATCGAGTGC | | | |
| | CGCATCACCGGCACCCTGAACGGCGTGGAGTTCGAGCTG | | | |
| | GTGGGCGGCGGAGAGGGCACCCCCGAGCAGGGCCGCATG | | | |
| | ACCAACAAGATGAAGAGCACCAAAGGCGCCCTGACCTTC | | | |
| | AGCCCCTACCTGCTGAGCCACGTGATGGGCTACGGCTTC | | | |
| | TACCACTTCGGCACCTACCCCAGCGGCTACGAGAACCCC | | | |
| | TTCCTGCACGCCATCAACAACGGCGGCTACACCAACACC | | | |
| | CGCATCGAGAAGTACGAGGACGGCGGCGTGCTGCACGTG | | | |
| | AGCTTCAGCTACCGCTACGAGGCCGGCCGCGTGATCGGC | | | |
| | GACTTCAAGGTGGTGGGCACCGGCTTCCCCGAGGACAGC | | | |
| | GTGATCTTCACCGACAAGATCATCCGCAGCAACGCCACC | | | |
| | GTGGAGCACCTGCACCCCATGGGCGATAACGTGCTGGTG | | | |
| | GGCAGCTTCGCCCGCACCTTCAGCCTGCGCGACGGCGGC | | | |
| | TACTACAGCTTCGTGGTGGACAGCCACATGCACTTCAAG | | | |
| | AGCGCCATCCACCCCAGCATCCTGCAGAACGGGGGCCCC | | | |
| | ATGTTCGCCTTCCGCCGCGTGGAGGAGCTGCACAGCAAC | | | |
| | ACCGAGCTGGGCATCGTGGAGTACCAGCACGCCTTCAAG | | | |
| | ACCCCCATCGCCTTCGCCAGATCTCGAGCTCGACCAAAG | | | |
| | CGACAGGAGCTGTGAGTTCCGGGCTTGGGGCGGGGACCG | | | |
| | GGCTG | | | |
| −150 | atccttaatattcaatgaagcgcgggtaaacggcgggag | 33515 | GACGCGTAT | 33425 |
| deletion | taactatgactctcttaaggtctagttacaactggTCCT | | TGCCTGGAG | |
| | GAGTCGTGCTGCGTCGACAACGGTAGTGACGCGTATTGC | | GA | |
| | CTGGAGGCCGCCACCATGCCCGCCATGAAGATCGAGTGC | | | |
| | CGCATCACCGGCACCCTGAACGGCGTGGAGTTCGAGCTG | | | |
| | GTGGGCGGCGGAGAGGGCACCCCCGAGCAGGGCCGCATG | | | |
| | ACCAACAAGATGAAGAGCACCAAAGGCGCCCTGACCTTC | | | |
| | AGCCCCTACCTGCTGAGCCACGTGATGGGCTACGGCTTC | | | |
| | TACCACTTCGGCACCTACCCCAGCGGCTACGAGAACCCC | | | |
| | TTCCTGCACGCCATCAACAACGGCGGCTACACCAACACC | | | |
| | CGCATCGAGAAGTACGAGGACGGCGGCGTGCTGCACGTG | | | |
| | AGCTTCAGCTACCGCTACGAGGCCGGCCGCGTGATCGGC | | | |
| | GACTTCAAGGTGGTGGGCACCGGCTTCCCCGAGGACAGC | | | |
| | GTGATCTTCACCGACAAGATCATCCGCAGCAACGCCACC | | | |
| | GTGGAGCACCTGCACCCCATGGGCGATAACGTGCTGGTG | | | |
| | GGCAGCTTCGCCCGCACCTTCAGCCTGCGCGACGGCGGC | | | |
| | TACTACAGCTTCGTGGTGGACAGCCACATGCACTTCAAG | | | |
| | AGCGCCATCCACCCCAGCATCCTGCAGAACGGGGGCCCC | | | |
| | ATGTTCGCCTTCCGCCGCGTGGAGGAGCTGCACAGCAAC | | | |
| | ACCGAGCTGGGCATCGTGGAGTACCAGCACGCCTTCAAG | | | |
| | ACCCCCATCGCCTTCGCCAGATCTCGAGCTCGAAGATGA | | | |
| | CCACAAGGCTTCAGGCCCTGACGTGCTTAGGTTTCCAGG | | | |
| | TGGGG | | | |

[0212] We further examined the possibility of using STITCHR to create single nucleotide edits and small nucleotide insertions. SpCas9^{H840A}-R2Toc was used with dual guides N4 and N8 (N8 Sequence: GGGAACCACGCGGCGAATGC (SEQ ID NO: 33429)) with a payload of either a GFP insert (FIG. 50A, columns 1-2,) a payload with a 1 bp mismatch to the NOLC1 locus (FIG. 50A, columns 3-8), or a payload with a small nucleotide insert (FIG. 50A, columns 9-14). When compared to the non-targeting SpCas9^{H840A,} the SpCas9^{H840A}-R2Toc system was able to make single base pair edits, as well as small nucleotide inserts (1-50 bp). We also examined the effect of the promoter in driving the STITCHR cargo (FIG. 50B). Use of the CAG promoter to express the cargo resulted in slightly higher editing levels, potentially due to higher expression of the template RNA sequence. Sequences used in these experiments are found at table 8.

TABLE 8
Cargo and Guide Sequences for Concurrent Single Nucleotide
Edits and Small Nucleotide Inserts

| Cargo | Sequence |
|---|---|
| 1bp | attcaatgaagcgcgggtaaacggcgggagtaactatgactctcttaaggtctagttac |
| mismatch A | aactggTCCTGAGTCGTGCTGCGTCGACAACGGTAGTGACGCGTATTGCCTGGAGGACG |
| | GACGCCGGCATTCGCCGCGTGGTTCCCAGCGACCTGTATCCCCTCGT (SEQ ID NO: |
| | 33516) |
| 1bp | attcaatgaagcgcgggtaaacggcgggagtaactatgactctcttaaggtctagttac |
| mismatch C | TaactggTCCTGAGTCGGCTGCGTCGACAACGGTAGTGACGCGTATTGCCTGGAGGCCG |
| | GACGCCGGCATTCGCCGCGTGGTTCCCAGCGACCTGTATCCCCTCGT (SEQ ID NO: |
| | 33517) |
| 1bp | attcaatgaagcgcgggtaaacggcgggagtaactatgactctcttaaggtctagttac |
| mismatch T | aactggTCCTGAGTCGTGCTGCGTCGACAACGGTAGTGACGCGTATTGCCTGGAGGTCG |
| | GACGCCGGCATTCGCCGCGTGGTTCCCAGCGACCTGTATCCCCTCGT (SEQ ID NO: |
| | 33518) |
| 1bp | attcaatgaagcgcgggtaaacggcgggagtaactatgactctcttaaggtctagttac |
| insert | aactggTCCTGAGTCGTGCTGCGTCGACAACGGTAGTGACGCGTATTGCCTGGAGGAGC |
| | GGACGCCGGCATTCGCCGCGTGGTTCCCAGCGACCTGTATCCCCTCGT (SEQ ID |
| | NO: 33519) |
| 10bp | attcaatgaagcgcgggtaaacggcgggagtaactatgactctcttaaggtctagttac |
| insert | aactggTCCTGAGTCGTGCTGCGTCGACAACGGTAGTGACGCGTATTGCCTGGAGGATG |
| | CCCGCCAGCGGACGCCGGCATTCGCCGCGTGGTTCCCAGCGACCTGTATCCCCTCGT |
| | (SEQ ID NO: 33520) |
| 50bp | attcaatgaagcgcgggtaaacggcgggagtaactatgactctcttaaggtctagttac |
| insert | aactggTCCTGAGTCGTGCTGCGTCGACAACGGTAGTGACGCGTATTGCCTGGAGGATG |
| | CCCGCCATGAAGATCGAGTGCCGCATCACCGGCACCCTGAACGGCGTGCGGACGCCGGC |
| | ATTCGCCGCGTGGTTCCCAGCGACCTGTATCCCCTCGT (SEQ ID NO: 33521) |
| 80bp | attcaatgaagcgcgggtaaacggcgggagtaactatgactctcttaaggtctagttac |
| | aactggTCCTGAGTCGTGCTGCGTCGACAACGGTAGTGACGCGTATTGCCTGGAGGATG |
| | CCCGCCATGAAGATCGAGTGCCGCATCACCGGCACCCTGAACGGCGTGGAGTTCGAGCT |
| | GGTGGGCGGCGGAGAGGGGCGGACGCCGGCATTCGCCGCGTGGT (SEQ ID NO: |
| | 33522) |

### Example 13. Trans Delivery of Nuclease Activity

[0213] We next tested whether the nuclease activity of the genome editing system had to be provided in cis or if it could be provided in trans. An EGFP payload (with 50 nt homology arms) was used in conjunction with a SpCas9^{H840A}-R2Toc, in which Cas9 is fused to the R2Toc element, targeting the NOLC1 locus with dual N4 and N8 guides, and was compared to the non-targeting SpCas9^{H840A}. In addition, the nuclease activity conferred by SpCas9^{H840A} was also examined with separate (trans) expression of R2Toc (FIG. 51, columns 5-6). This non-linked SpCas9^{H840A} and R2Toc exhibited a payload insertion level similar to that of the fused system, SpCas9^{H840A}-R2Toc. When the nuclease activity was not supplemented with the non-LTR site specific retrotransposon element, little payload insertion was observed.

### Example 14. Methods of the Examples

### Mammalian Cell Culture

[0214] HEK293FT cells (ATCC) were cultured in Dulbecco's Modified Eagle Medium with 4.5 g/l glucose, sodium pyruvate, GlutaMAX (Thermo Fisher Scientific) and supplemented with 10% (v/v) fetal bovine serum (FBS) and 1× penicillin-streptomycin (Thermo Fisher Scientific). Cells were maintained below confluency at 37° C. and 5% CO,

### Cell Transfection, Genomic DNA Extraction and Purification

[0215] Cells were transfected in 96 well poly-D-Lysine plates (Corning) 16-24 h after plating at a confluency of 70% using Lipofectamine 3000 according to the manufacturer's protocol. In brief, 50 ng R2-expressing plasmid, 50 ng cargo plasmid, 50 ng reporter plasmid (optional) and 30 ng of sgRNA-expressing plasmids were transfected. 72 h post transfection, genomic DNA was isolated by removing media and adding 50 μl QuickExtract (Lucigen) per well. After a 5 min incubation at room temperature, the lysate was transferred to a 96 well PCR plate and incubated at 65° C. for 15 min, 68° C. for 15 min, and 98° C. for 10 min and used as input for targeted deep sequencing. Lysates were further purified using AMPure magnetic beads (Beckman Coulter) according to the manufacturer's protocol and eluted in 25 μL water, if used as input for ddPCR or NGS-based assays.

Editing Quantification by Next Generation Sequencing or ddCPR

[0216] Insertion efficiencies into plasmid and genomic DNA were quantified using a 3-primer assay. Here, a forward primer was combined with two reverse primers, one of which binds in the uninserted DNA and the other in inserted DNA. The forward and two reverse primers in a 2:1:1 ratio were added at a total combined concentration of 0.5 μM for a first round PCR counting 20 cycles. A second round PCR with 12 cycles added barcoded primers for Illumina NGS. The 28S, AAVS1, and SERPINA1 experiments were quantified by 3 primer NGS for total integration and indel rates. For NOLC1, the 3-primer assay was used for analyzing indels associated with integration events and the WT locus. NOLC1 total integration was assayed by digital droplet PCR (ddPCR) as described below.

[0217] To quantify NOLC1 integration efficiency by digital droplet PCR, 24 solutions were prepared in a 96-well plate containing 1) 12 μL 2 x ddPCR Supermix for Probes (Bio-Rad) 2) primers for amplification of the integration junction at 250 nM-900 nM, 3) FAM probe for detection of the integration junction amplicon at 250 nM 4) 1.44 μL RPP30 HEX reference mix (Bio-Rad) 5) 0.12 μL FastDigest restriction enzyme for degradation of primer off-targets (Thermo Fisher) and 6) Sample DNA at 1-10 ng/μL. The 20 μL of reaction mix was transferred to a Dg8 Cartridge (Bio-Rad) and loaded into a QX2000 droplet generator (Bio-Rad). 40 μL droplets suspended in ddPCR droplet reader oil were transferred to a new 96-well plate and thermocycled according to manufacturer's specifications. Lastly, the 96-well plate was transferred to a QX200 droplet reader (Bio-Rad) and the generated data were analyzed using Quantasoft Analysis Pro to quantify DNA editing.

### Example 15. Cas9-Assisted Retrotransposon Insertion

[0218] SpCas9H840A has the potential to improve insertion through recruitment and supplementation of nicking activity (FIG. 56A). A pair of guide RNAs was designed to introduce nicks on the bottom and top strands of NOLC1 and co-delivered these guides with a cargo carrying transgene payloads, a 5′ R2Tg UTR, and internal 50 nt homology arms placed around the nicking site at the NOLC1 locus. SpCas9H840A-R2Tg fusion was found to have increased efficiency at NOLC1 (˜0.6%) (FIG. 56B) in a guide and RLE-dependent fashion, demonstrating that SpCas9H840A can significantly improve R2Tg insertion efficiency.

[0219] A panel of payloads was designed to optimize payload design for efficient insertion at retargeted loci. The panel was designed to target the NOLC1 locus to expand upon our initial findings from R2Tg natural insertion at the 28S locus (FIG. 56C). Payloads were designed with varying 5′ UTR sequences by panning 65 nt windows of the annotated 5′ UTR, including regions upstream containing the 5′ 28S homology region to navigate around a potentially relevant HDV-like cleavage site occurring in said region in R2Bm and R2Tg 5,29. Windows overlapping the distal 5′ UTR region and 28S homology region upstream of a 5′ target homology and payload sequence, either with or without a 3′ UTR region, were found to be necessary and sufficient for reprogrammed insertion at NOLC1 (FIG. 56C). A truncated 28S-5′ UTR sequence improved insertion efficiency over the complete 5′ UTR and retained significant secondary structure, indicative of potential conserved function (FIG. 66A). Retargeting at the AAVS1 locus followed similar rules, requiring the upstream 28S and a minimal 15 nt 5′ UTR for efficient gene integration quantified using a validated sequencing assay (FIG. 66B-C, FIG. 75). These results shows that the 28S sequence together with a truncated 5′ UTR sequence, can function as a bona fide 5′ UTR, and that the entire R2Tg 3′UTR can be dispensable for retargeted insertion.

[0220] Additionally, insertion activity was tested at the endogenous AAVS1 locus using SpCas9H840A-R2Tg fusion proteins with different R2Tg protein truncations. C-terminal truncations were found to be not tolerated, whereas the 1-184 residue N-terminal truncation of R2Tg retained activity while offering a more compact version of the SpCas9H840A-R2Tg fusion (FIG. 67A-B). To probe the mechanism of retargeted insertion at the NOLC1 and AAVS1 loci by the SpCas9H840A-R2Tg truncation fusion, insertion with the mutagenized variation of the RT domain was tested, confirming that integration was dependent on the RT activities of the retrotransposon and consistent with a TPRT based mechanism for programmable integration (FIG. 58A and FIG. 67C).

1. A genome editing system comprising:
i) an R2 element enzyme; and
ii) a payload RNA,
wherein the payload RNA comprises an insertion template,
comprising a nucleic acid sequence for insertion into a genome, and
wherein the R2 element enzyme comprises a reverse transcriptase domain and a nickase domain.

2. The genome editing system of claim 1, wherein the R2 element enzyme further comprises a targeting domain.

3. (canceled)

4. (canceled)

5. (canceled)

6. (canceled)

7. The genome editing system of claim 1, wherein the R2 element enzyme is modified by an N-terminal or C-terminal truncation.

8. The genome editing system of claim 1, wherein the R2 element enzyme comprises a linker.

9. (canceled)

10. (canceled)

11. The genome editing system of claim 1, wherein the genome editing system targets a genomic locus other than a 28S rRNA locus.

12. (canceled)

13. The genome editing system of claim 1, wherein a non-naturally occurring targeting region is fused to an N-terminus of the R2 element enzyme or fused elsewhere to the R2 element enzyme.

14. (canceled)

15. The genome editing system of claim 1, wherein the R2 element is fused to a Cas9 protein that is fully active, catalytically dead (H840A/D10A for SpCas9), or functions as a nickase (H840A or D10A for SpCas9).

16. The genome editing system of claim 1, wherein the R2 element is fused to a Cas12 protein that is fully active, catalytically dead, or functions as a nickase.

17. The genome editing system of claim 1, further comprising a guide RNA.

18. (canceled)

19. (canceled)

20. The genome editing system of claim 1, wherein the payload RNA further comprises one or more of a 5′ homology region, a 3′ homology region, or a protein binding element.

21. (canceled)

22. (canceled)

23. (canceled)

24. The genome editing system of claim 1, wherein the genome editing system functions in post-mitotic cells.

25. (canceled)

26. The genome editing system of claim 1, wherein the payload RNA further comprises a 5′ untranslated region (UTR), a 3′ UTR, or both a 5′ UTR and a 3′ UTR.

27. (canceled)

28. (canceled)

29. (canceled)

30. (canceled)

31. (canceled)

32. The genome editing system of claim 1, wherein the payload RNA further comprises a nuclear retention element.

33. The genome editing system of claim 1, wherein the payload RNA further comprises a Cas9 or Cas12 guide RNA, and wherein the Cas9 or Cas12 guide RNA comprises an extension with a 5′ homology sequence, a 3′ homology sequence, a 5′ untranslated region (UTR), a 3′ UTR, an insertion template, or any combination thereof.

34. (canceled)

35. The genome editing system of claim 1, wherein the R2 element enzyme comprises a nuclear localization signal (NLS).

36. The genome editing system of claim 1, wherein the insertion template comprises a template for a reporter gene, a transcription factor gene, a transgene, an enzyme gene, or a therapeutic gene.

37. A method of inserting a large nucleic acid into a genome within a cell using a Cas9 or Cas12 fusion protein, wherein the method comprises supplying a Cas9 or Cas12 fusion protein to a cell, wherein the Cas9 or Cas12 fusion protein is supplied with a payload RNA template, wherein the RNA template is reverse transcribed by the Cas9 or Cas12 fusion protein prior to being inserted into the genome of the cell; and wherein the large nucleic acid is inserted into the genome of the cell.

38. (canceled)

39. (canceled)

40. (canceled)

41. A method of inserting an exogenous nucleic acid into the genome of a post-mitotic cell, wherein the method comprises subjecting the genome of the post-mitotic cell to a modified Cas9 protein that inserts the exogenous nucleic acid into the genome of the post-mitotic cell.

42. (canceled)

43. (canceled)

44. (canceled)

45. (canceled)

46. (canceled)

47. A genome editing system comprising:
i) a payload RNA,
wherein the payload RNA comprises an insertion template and optionally one or more of a 5′ homology region, a 3′ homology region, and a protein binding element,
wherein the insertion template comprises a sequence for a nucleic acid insertion into the genome:
ii) a non-LTR site specific retrotransposon element enzyme;
wherein the non-LTR site specific retrotransposon element enzyme comprises a reverse transcriptase domain and, optionally, a nuclease or nickase domain, and
wherein if the non-LTR-site specific retrotransposon element enzyme does not comprise the optional nuclease or nickase domain, the genome editing system further comprises
iii) a nuclease or nickase enzyme.

48. (canceled)

49. (canceled)

50. (canceled)

51. (canceled)

52. (canceled)

53. (canceled)

54. (canceled)

55. (canceled)

56. (canceled)

57. (canceled)

58. (canceled)

59. (canceled)

60. (canceled)

61. (canceled)

62. (canceled)

63. (canceled)

64. (canceled)

65. (canceled)

66. (canceled)

67. (canceled)

68. (canceled)

69. (canceled)

70. (canceled)

71. (canceled)

72. (canceled)

73. (canceled)

74. (canceled)

75. (canceled)

76. (canceled)

77. (canceled)

78. (canceled)

79. (canceled)

80. (canceled)

81. (canceled)

82. (canceled)

83. (canceled)

84. (canceled)

85. (canceled)

86. (canceled)

87. (canceled)

88. (canceled)

89. (canceled)

90. (canceled)

91. A method of inserting a large nucleic acid into a genome within a cell using a Cas9 or Cas12 fusion protein, wherein the method comprises supplying a Cas9 or Cas12 fusion protein to a cell, wherein the Cas9 or Cas12 fusion protein is supplied with a payload RNA template, wherein the RNA template is reverse transcribed by the Cas9 or Cas12 fusion protein prior to being inserted into the genome of the cell; and wherein the large nucleic acid is inserted into the genome of the cell.

92. (canceled)

93. (canceled)

94. (canceled)

95. A method of inserting an exogenous nucleic acid into the genome of a post-mitotic cell, wherein the method comprises subjecting the genome of the post-mitotic cell to a modified Cas9 protein that inserts the exogenous nucleic acid into the genome of the post-mitotic cell.

96. (canceled)

97. (canceled)

98. (canceled)

99. (canceled)

100. (canceled)

101. (canceled)

102. (canceled)

103. (canceled)

104. (canceled)

105. (canceled)

106. (canceled)

107. (canceled)

The application's sequence listing, which the Patent Office published only in electronic form, follows.

SEQUENCE LISTING (33582 sequences)

SEQ ID NO: 1 - protein, 962 aa, Omphaloscelis lunosa
MHNKNRALVCALDSQLTNFFESSEDLIDTHSILYCAAVAACRLANVKFPNCDGATRPKPVVPAWQCRIERRIDGARVLIGKLYCFREGNTRPRVMRFVRRAFSGTGISPQDYMSRVTERIDFLKQKVCAWASRIRRYKRRVDRYTQNRVFQSDERWVYRAWERPEQNVTDVCRPDDAATSAFWRSIWSVPVCHTEAGWMQDVERVCETIPVMDAVFITPLDVARAVRPLPNWKSPGPDGLHNFWLKWLSSSHTRLASQFQSSLESGSLPQFLTTGVTHLLHKSGNPAEPKNYRPITCLSTVYKLLTSILRMKINTHIDNNSIMSVSQNGCRNGSRGTKKLLLIDMAISQQVRRSRKDLSTCWIDYKKAYDSVPHTWLMRVLELYKVDTTLRTFLMSCMGQWRTVLRYPGCRQTQGNDEPVWIKRGIFQGDSLSPLWFCLALNPLSTLLEDSGLGYRLRRGGQVISHLLYMDDLKLFAPNKLRLMELLKVTETFSGAIRMEFGVDKCAVMHVKRGEIMESEGIQLSDSIHLRSLSSAENYRYLGMSESLGINVADMKQSLKERFFGRLKKVLISFLSGGNKVRAFNGWVMPVLMYSFGILKWTQTELDALDRRVRTLLTANRMHHPHSSVMRLYIPRKCGGRGFLNAKTLHNREVCSLREYFFKADVGMHRDVVAVDNGLTPLSMAKENWRKPVVLTTDDRKEVWQSKALHGRYFRALHEPDVDFLASVSWLRFGDLFGETEGFICAIMDEVILTNNYRRHIMKDGTVDVCRACHRPGESIRHIISGCSRLANGEYLHRHNQVARIIHQQLALKYKLVDSEVPYYKYVPDPVLENDHVTLYWDRSIITDRTIVANKPDIVVIDRLARHAMIVDVTIPHDENLVKAEKEKQIKYLDLAHEVVDMWNVSSAIIVPIVVTANGLMAKSLDQHLSRLSLDGWIKRLIQKAVLLDTARIVRRFLSLQP

SEQ ID NO: 2 - protein, 1448 aa, Girardia tigrina
MDCPPSLVDDDLEMIAAEIPGQGAAVNSMWFTSEHIDFYFRNHAGLAGEGYVSPVDCNAMLNSRTRVKQFIGFEKQDVNACNFLFCPFNVRNAHWVLYTVLVEERVAFLFDPLEESGLRRETEAMGAKLHGTVNKFLFDGLLKFDSECCPEYFQTNDYDCGPFVCLYAAGLVEDGLEEDPVATIGQIREFVELMPESGSASKLIGGGSAPLDNSLEEYLSFTEDHFSVFISTYTVSHRHLTVKPIVATAISKGNASFLRKQVTLDIFEGKDYIFLPVLIENRRWVLFIADMIHHDISVLDPTSVVMDVCLLDRMRTTARYIEHLCLTKREMKINIAGQVHQLVRNSGQTGLMVCGYIRALMEERPLQDINVDKLKKQIAAQLIRAKKKGPISTVKQKENHTAIAATRAARVERSLTFAEVRSSTVDSNTYEKDITLYIYAHRPIKRRNLYMGSKVVESTSQDPSLRKLYKVRPKKVIETILNNTIADTTPSTEAIMEHFSAKSIAPPLHESVDTLVVKRGDPFEFREVTSNEVVEALNKANNSSPGYSNITYKDMLYCDPVGAIYVKLYNKVINSRVIPESWKKFFTTLLPKPGKQGHYDEVSSWRPIALLECAYKILATLLRDQLNRWVVENELLHPLQKSLGPHDGCAEHNFLIRAILDKYYSQLKDAEFHATMLDNADAFGSVSVEMILKLLGRMGVGEESCDLIRQLYRDCSSAYTCGNTVTEHIPILVGVRQGCPLSMLLFNIAINPVLLELDQQSYGGMIIANHRVSCLAYADDLVLLADNQCHMQQMMDKAVELTDIIGIKFRPSKCSRIAIPHKPDNRIIIYGNAIPEITESEFVVYLGGHFSENLRIAPVEKLAEVTRETVKLTESILFPWQKLQAYMIYLHSKLIFAFRVFYIPYGTLDGKSYSLDNVIRLLHKKVLGLQKNASNAYLYTPRENGGVGIKSLLDEYLIQSLAHAFQMIACSDTTTMDAAVFSLQRGATGTRKMRLLSIEAAISWLNAGTQSGKIKNWWAKIKFAIHKLKELHQISVQLVQNERGICLHLHQSLVWERILPNGDVEILRDETNENILLIPLQKSKVSKTLRRLIERSWTHKWNVQNSAGRFARSLQSTISFHSAVYGGGLNYEEWYFYHKAFTYTVPVNFRPGSTKNNGHCRRCPHDKETLAHVLTECKFSEGFKNYRHNSILYCIGEQITQYLDCRVDINSECQYAPSKDRVDLQVYVPGSKILYLIDVKCPYDTEKNIEESNRKNREHYKVLADACKKAMPEITVTVLTLQVGCLGTWPQRSTDILTNLKIPQKVIRKIAIGCSVSNIKYSAAQWSYHRDGVLPSGIQRINNIEIEKYDEPQEGMLAMEENDYEHVAPEGVEEFDPAALDALIQSFAYRVGVQEGGNVVIEDQTQDDSYDDVLIPGPYRRRIGDSSEDLENSSWEYNPDSDDEDMER

SEQ ID NO: 3 - protein, 1262 aa, Coccinella septempunctata
MKMVITRSLGNKSLPGDRQGMSGAGAGHDSMRDVGGRMLRKRAPAAKEATAPKQQQQPTSPIQLSTRTAEGAAQDIQPVLTQAGLVRKRMKWTTSMNETIVRIYNSITGLGQNTNNYRKRLHEEFCNAYPNLNVTEQRVADQYRVILRNELIPTARIDAIKRELQRPPTIENNTNTSDEIHMPGQQQAEETDTESPSCNASEPEHQDDREELHRQVDSDMRRYFAELEGTDPLHRITPPRLNTSKKLSLIIDILNKDVLPEYLQNGSSLEYLHLVFYCAALTTAKTIGAKIRGTNNNGPKLHKLHAPAWQKRLQHKTERLRRDIGRLTEYLNGNRGRKVVKAVKEIMDRNRTHTERETENATAHHCLDTLKQKLSLYAERLRRYKSNYSRKRDNNSFEKSEESFYRSLTSSDGENGKLPPEEAIEQFWTEQLSTKPHFNGDTGWIEDEKSEAIKYEPMQHDMITIEEVKSAIRGLHNWKAPGPDGLQNFWIKKLWIMHDKLTSAINDVIENPERMPVFLTHGTTYLLPKDQRNTEDPSKYRPITCLPTMYKLITSCISNRIHNHCERNNIIAMQQKGCTKDSRGCKEQLIIDSVICNQAFSKRRNLYAAYIDYKKAFDSIPHEWLLTILKIYKVDPNIVKFLKNAMSTWRTSLQMKAADGSITTGPIPIRRGIFQGDSLSPLWFCMALNPLSHRLNSTDYGFSIKNGSRTMMKLNHLLYMDDLKLFASTKKQMQLMLKMVEGFSEDIKMKFGLEKCRLLNITRGKIEDGTFKLKEAAEIEALKEGDTYKYLGIKQARKINQTQMKKELTEEFTRRLRRIMRTGLNSKNLIKAINTYACSALSYSFGIISWTTTDLAALQRKIRTMLTKHNKHHPKSSIERTELPRHLGGRGIVDLSNRMSQEIEGLRKYFLSKAASSELHRVVCVADSSTPLKLQQDHLETVEHSAESKMQKLIGKPLHGRHQNEVNHDYVDISASNYWLTSGRLFPETEGFMLAIQDQVIPTRNYMKYIAKDASVADDSCRYGCATHETIQHITGGCQKFAGTEYKNRHDAVAKILHQELALKHQLLASKKVPYYNYHPDAVLENEHHKLYWDRTVLTDRKITHNRPDLILLNKDEDRALFIDVAIPNNTNLLDRHTEKISKYRDLEEQTRRQWKLKDIKTIPIVISSTGLIPKKLLENLRKLQLDENIYRVMQKAVLLGTARTVRKYMGNAEEHRLLRQEMRVEQESNLQQGGEERPGPDHHHEPENLERAPTELNPFDI

SEQ ID NO: 4 - protein, 1383 aa, Daphnia pulicaria
MSDSDSSNCTPPRGSRFTENITDVVYISLPIPSSATFSCHICTTVGQKLLTHNSLKKHFRATHKGTIVVRFECRICQFELPSVRSYAAHHAELHSRRPVSPPSTTPGTPQVPPISSEAIDCFLAAARRQSISEALPPDPSAVAPIPPTAAPTNLPPLPDTRPMHPHPPGLLINFGPRELLPPLSASLSDVPSDFPPPPPEPDPPDGNGSLWSWTGRTNVLYDVLDHPVVSGCWERGGGGRCYRPRSHPPIVTEEIRIARQLLLPSAVSVPPPEMPQNSVASVLAQPPSPLATPSLRNTTHTPPTGSLPVSGAPGARGLVYAAISPPPIVSEPVTSPSMPDAPPWNRDAGHFDLPRRPDPRLSTSSLSAQPPGLVQQCEPPGGRRGRRSRQQSSHLPPVTNRRANGRPATSPRRRSPSLDPARIDEEEEAPDIPPPKLTDLQRQWVDTFNSLLPEDVDGLSALSLAISSAAAERQDTAPPPPTRAPAPRNQGLNRAPRRRPRYDPQDASAIQKLYRMDRNKAMTHILAEPSPYCAAEPAAIETHLTTIFAGEEHPWSDPPACVPAFDQPTTPDELAFLTAPITPLEVSFRLQRMKNTAPGPDGARYSGLRRVDPGCHTLALIYSRCLRIAKVPAAWKESTTVLIFKAGDRENLGNWRPLTLGNTIAKLYSGVIADRISRWAEEGHRISPQQKGFTRHDGCLEHNFLLQAAINQARRTGQELCVAWLDLANAFPSVPHSHIFGTLNLLGLPAELISVVQDLYIDTTTRGMTSSGLTAPIPISSGVKQGCPLSPVIFDLAMEPIIRAVMALKPLSFKLGLIDLLILAFADDLALLAKNEAALQRQLDVATETAEWCGLTFKPAKCATLHVVRRETVDSVFTINENPLAVLDEGQHYRHLGVPTGFRNKQTPEETLAQLSNDLDLLDNSLLAPWQKIDAVVTFIVPRLDFILRGANVAVKPLRALDKRMKKNVKKWLNLPQRASAEVVFIPSPLGGAGILPFSDMRNVCAITHGYRLLTCPDDDVRETAWDTLKTAAHLKIRRVPDMEDIAAYLNGSTDGDMIQTNGDVPSLWSRVRSCTRALRRIVNIEWWWCATLGEMQIIVPRPGKEPDQARAHPAARSQVCNLVKTALRASYLHRLLQKPDQGKVFSVTSLRSESNHMMKTGLYTRFADWRFLHRARLDTVPLNGTRRFGAGSKRCRRCNNVLETLPHVLSHCKYVSRPRALRHHNVVHRLARGTPVIAGTITEDKAIPGTSGQLRPDLVVTDVSTRSISIVDVAIVFENKFEAFQLARAGKIEKYDPLAAELRSQGWNVYLDAFVVGALGGWDPANDAVIRQLRISKSYAKLMKKLVISDTIRWSRDIYVEFISGKRQYREPIPMAPPPSRP

SEQ ID NO: 5 - protein, 701 aa, Daphnia pulicaria
MYKIFSGIISSRIMATATRLGWISPEQKGFLPGVRGIQEHTHILHTVIEQAKQSKRKLVIAWLDLTNAFGSIPHPILNSLFESLPIPDELRRILTDIYSNNIMDFAVGQDLVQIHPTAGVRQGDPLSSVVFNLAAEPIIRTVKSNNNGFAVYQSRVSTSSYADDIAIAGSSVSEIQGTLNATENTATSLGLRFNPKKCTSLTLINGKSSVDNPLKLGDSQIRALAEDEQENYLGTPLGSRLTFRPTTSLLGNLIKIGDSGLAPWQKLEVYRSVLLPSLSHHLASGRVEKRSLYDLDVACRDFLRKVACVPMSANTAFFYSDRRVGGLGVLPLTDEADIWTLARALQLLDSKDKNVSEVAMAQLEETIKLGYGRNEVPFPLPINEYLAGSMEKGLGAIRHGGASMNLWTRARKASGCLKRIRIDVSGEEYSKVIADDISTISIKAVRGLRTAMRQRWTSRLLSAQQGKTATGLALDMAKENAGLLSCRTPLSFQEWHFLHKARLGILPVRGGPGSKSTVKTCRLGCTKLETTDHVVCGCQVNSALSINRHNSILGLIAEETEKLGHTVSVNLAVDNSGLRPDLVVTSTNPPIIIDVTVPLSSADGLEKAQARKIEKYKHLGVVLPLVVGSLGSWLPSNDEICLALGFSGRKWQSLKKKMKLLAIQGTTQIIAKHLAYQTEASDPEPEEEEAEEGASPPSSSN

SEQ ID NO: 6 - protein, 1174 aa, Morbakka virulenta
MSFLKKKPTEGKPGSRRVSDDPQERVLIRTGEVSRPEASENVESSKDGSRTEEPMGRKGWKGEKRGKMGRTGLFKSKWSHFERKVLWECFVRSGGRRADGYIGKVKEMWDGRDVSVRSVASLLSQLKQIEANGLLSVVERGEIERMVREEALVEEESSEGEVDFCIRPESGLGEMEIENVVVANDAEERDLRVVIERVDVWRRGDDMRALSNDESGALALLREVYHSEDVVEVPSLKAQDGRKIGEEVKLVDGLMHNLVRDSMTVTEINRLLYAGSYVVASRLGVMGKNKTVRKKKPWWQRRLEKSIGEWRKDLGRIEEIKQGNKVRQVVRDRLNRKYELVVKGTMTVSTMLKNKISSASAKIRQFVGKSLARRQNNLFKNNQCQLYKELNGNGHKMESSAPNADEAREFWSIIWSEEKEHDKEASWLGDVREKFADVEKQEDIMVALQDVKAGIRKMANWKAPGPDWVRGYWFKKFTSLHLSIATTLQECLTSGVVPDWMVKGRTVLIQKDSGKGTAASNYRPIACLPLMWKLLSGIFAEKIYGHLVNNNLLPEEQKGCRKKSRGTKDQLMIDKAILHEVRAMKRNLSMCWIDYKKAYDMVPHSWILEMLDMVGVAENVRSLLKGSMAEWKTVLTANNEVLGEVNINRGIFQGDSLSPLIFVIAMIPLSILLNREKLGYFFGHGRVLVNHLLFMDDLKLFGRSKRELEALVEVVRVYSRDIGMEFGLDKCAVLEIRRGERAECEGIELPSGELMKEVDEDGYKYLGVLEGAKVMQKKMKEKIGNEYLRRVKLLAKSRLYAGNLVRGINAWAVSVVRYSSGILDWSDAELRKLDTKTRKILTMNGAFHRNSSVDCLYIGRKDGGRGLISVEDCVRQEELGLEEYVHATEETILEQVAGMIMHGRETKKHYKTRVVEERKERLMEKALHGRFFREMDENATERSVQWVKGGFLAKSTEAFVFAAQEQALRTRLAQSKWDGGVSPMCRICGIESESVWHVACGCKVLAQKEYKRRHDRMGLRIYWELCKKYGLKCAGKWFEEVPDKVRKSEDGRFEVWWDRSVETMQQVESNRPDVVVVDRTKKRWLVVDFAVPSDRNVTAKEEEKVTKYSPLAQQIRKLHSVCTSVVPIVVGSLGVVTKRLERSLKELGIPDVFGGLQTSTIIGTTNILRKVLNL

SEQ ID NO: 7 - protein, 1264 aa, Daphnia pulex
MAGAVVDFFEFKACDGTIYLPWPVPDTIKCSLCKIGKYSSRSRVQDSVRHMFAKHDARVAPMYTCNSCDHETSDVVIARRHEKGCGALDESITVEGTTIMGNEVTLMYPGGPCRCPLCKWRTTGEGTVAFQSIEHHLFRVHGLTTVRRWQCRKCEANGDGYFIKTHYKTHLTETPKPYSPTVPLLPLPPNISNREFFRIINLELSTTSCHTPTVASRRNTPNNTEGEGTSPVPSSSSPASPVSSSSSSSASNTSKDLSTQRSSPSTPNIISENSESLDSSISSFNSPSSSKSSNNNDSSYESPASSPSQLGRLVAPGDAVCPLEAFRSVWGVRIEACNTVQCLDSTLTKCSAEWLKLSATPEDSTSSQKRPPPPKKPPDAHRKRSQNRQQQRIRRSKQTQNDQKSKIQRLFSLYPRRAVRKILEEESTGYSGTKETATAFLKKTYCQPAPSQEQVESARAQFDHCDWKQTTDDDIRLLSAPPSLSEIKLKLGKAANTAPGRDGLEYRHLRSLDGNGELLATIYQAVWSLGIPACWKTSRTVPIFKKGDPSDYGNFRPISLLPTMYKIFSGIISSRIMATATRLGWISPEQKGFLPGVRGIQEHTHILHTVIEQAKQSKRKLVIAWLDLTNAFGSIPHPILNSLFESLPIPDELRRILTDIYSNNIMDFAVGQDSVQIHPTAGVRQGDPLSSVVFNLAAEPIIRTVKSNNNGFAVYQSRVSTSSYADDIAIAGSSVSEIQGTLNATENTATSLGLRFNPKKCTSLTLINGKSSVDNPLKLGDSQIRALAEDEQENYLGTPLGSRLTFRPTTSLLGNLIKIGDSGLAPWQKLEVYRSVLLPSLSHHLASGRVEKRSLYDLDVACRDFLRKVACVPMSANTAFFYSDRRVGGLGVLPLTDEADIWTLARALQLLDSKDKNVSEVAMAQLEETIKLGYGRNEVPFPLPINEYLAGSMEKGLGAIRHGGASMNLWTRARKASGCLKRIRIDVSGEEYSKVIADDISTISIKAVRGLRTAMRQRWTSRLLSAQQGKTATGLALDMAKENAGLLSCRTPLSFQEWHFLHKARLGILPVRGGPGSKSTVKTCRLGCTKLETTDHVVCGCQVNSALSINRHNSILGLMAEETEKLGHTVSVNLAVDNSGLRPDLVVTSTNPPIIIDVTVPLSSADGLEKAQARKIEKYKHLGVVLPLVVGSLGSWLPSNDEICLALGFSGRKWQSLKKKMKLLAIQGTTQIIAKHLAYQTEASDPEPEEEEAEEGASPPSSSN

SEQ ID NO: 8 - protein, 1020 aa, Betta splendens
MQRMCGEWERRNPHSRLTAKQLVAQCSNIHKRQLLSQLEIDEIQHKCYGKGEPGRQVRGEVSPSPQPEIGYEAPISTDTLSEAATDLKDKIMARLNRQPQTPLQRLSEVPSESLMEDVNAALRAIPTTTITETNELIYASASVILEVLGYKSNHGSHEKQYPPWKQRLEAKIKAARREVSQMTEAQRGAMKRPMPKRYSQMPIPEALKTAKQRLQALASCLKRYTRDNEARRINRLFATQPAKVYSQWQGNNSRADPPRLETEQYWKGIWEREASHNSDAQWLVDLREDHSNLPEQNPVTITVADIQHRVSGMKNWTAPGPDMIHAYWLKKLTAIHERLAAQMNQLLRDGTHPEWLTEGRTILIMKDPSKGTVPSNYRPITCLSTTWKLMSGIIAAKISGHMSQYMSEAQKGIGKDTRGAKHQLLVDRTVAQDCRMRHTNLCTAWIDYKKAYDSMPHTWITECLELYNINRTLRAFIANSMRLWRTTLEANGKRLAQVSIKCGIYQGDALSPLLFCIGLNPLSQIINKTGYGYRLRNGATISHLLYMDDIKLYAKSERDIDSLIHTTRIYSSDIGMSFGLEKCGRMVTKRGKVIHTEGVSLPEGTIADIEDNYKYLGMPQANGNLEQATRNAATAKYLQRVRQVLRSQLNGKNKSRAINSYALPMIRYPAGIIRWPKEEIQTTDVKTRKLLTMHGGFHPKSSTLRLYASRKEGGRGLVSVRATIQDETSKIHKYIKDKAPTDDVLSECLRQWRTEDEILEEGPSWEDKPLHGMYHRNITEVADLNKSYQWLERAGLKDSTEALILAAQEQALSTRAIEAQIYHTRQDPRCRLCKEAPETVQHITAGCKMLAGKAYMERHNQVAGIVYRNICAEYGLETPRSKWETPPKVVENERAKILWDFQIQTDRMVMANQPDIVVVDKEQRKAVVVDVAIPSDGNIRKKEHEKLEKYQGLREELEKAWKVKATVVPVVIGALGAVTPKLEEWLQQIPGKTSEISVQKSAVLGTARILRRTLKLPGLW

SEQ ID NO: 9 - protein, 1022 aa, Callosobruchus maculatus
MREKIEKYIIIITVVSPGDFRDRRALHNNGRSLKLADLKREDEVVGERLSEASDIWSINCEIYAAALRLARQGRVRDSPVERAQRRVRQMEAKIQLARQEASRIQCVMEYRAAGKPFTRRVRQIAYGLRRDHHTLSQAVLVVVKQHCLDRIRMLIAAKRSLVARARGLEQNRMFYERPSRLFQQPPPAIEQPPTADRVEAFWRDIYEQPKPLSADTPALAQFESVCRRTPNLNILRHPINTEEILDALRGAKNFAAPGPDGINTYWWKKFPSCHRHLARVFNSWLNQEQPIPAWFVEGRTVLLPKTGDLSDPKNYRPITCLNACYKLFTRILYMRILQAVNPVFLDVYEQRGSKKGVAGCKENLLIDRCVTQDSVQYKRNLSMAWIDYRKAFDSTSHELILRLLECLSVDNQIVGCIKQLMPLWKTRFTITSGETRVQTELVSLKRGVFQGDSLSPLLFCISLLPLSIALRNTKGYSCGTPNNRRHKVTHLFYMDDLKLYASGQRELQQSLRVVQEYSHAIGMEFGTDKCALVHLKKGRSGDSGDEEQLVDGSILRQLHAGDTYTYLGVAQRHVQEATLVKECLRRKYLHRLRQIWSSELSGKNKVAATNMLAVPLLLYTFGAIHWKVNELKEIDTKTRKRMNMERSLHPKSSVPRIYLPRHLGGRGLLSLERLHNRVVLATACYVTNSTDPLIRFVREHENAGKGAFLFSAAKRAAEELSLTLDFKRRCQQSITELAPAELKAHLKTAEVDFLLRLHKDKPMHGIFYKHLEEHGLSEQLTFSFLRSSGLKSETEGFIMACQDGVFNTLVYRRRVMGVVVPDTHCRACRQAPETLMHLLSACKTYAGTAYVHRHNAALRVLYYHLRHSYGIDETPVLPYAPGDIESVVENERCRIYWNYSFPTLELVQANKPDIVLLDHQQKTMFVIEFSAPAEVNIVSKEEEKRTKYQELLGELRRLWPDYTVSLLVMVIGSLGGMRNTLLSALRKIPVCRAAAHILAARMQKAVILGSLRLLRAHDSRTQ

SEQ ID NO: 10 - protein, 1577 aa, Acrobeloides nanus
MDSIPDAINSSIDHPSVPSKEKTTLYGNSLICLVPYCNSLICPINDCNRLYSGTDTATSRSVIRHLARDHEMTSLVLYKCRFCNFSTSQTTVPVKAVWKHVRDAHPIYTIEHTEQERFQCLHIGCDKSFKTKHGLSNHVRVHKPKPETIKSITRAKYPPKTRDVDKDLVSNNTANSSLKPLSPKPDDSRTSTSQHSDKPTTSTCMNISTTNPTSVNKVLSPPSTINSPALPPDTSSTPTEKSSTNGSPIKTQPTSPSVAPSSLHFNISKTPPQVQPSFISRFSSIITDLLFSSSPPKYESSVIEMHANKCETNTNPSDDSQSSTKTINLETTSIFTDTINLVESTMEADELDLGIAPIDLQKLEDPTGWTDDTIILEYLKLKLLPLDSKLLIVDSLIWNKMNDSGMVRKYTRPKFREDWSTLLVPINENNFHWTIAVAKPTGTVRFFNTAGAVLMNEIEKKLIRIVQEIRGTTEEPSIVRVNPKHFYQQTDNNSCGPSICLIAERLIESEISGGQANLKFNLKETEKWRKTATNLLKIKFPDVVLSSTLPPGSNNLQKKPPINQHNQNHQPKATHTSNKTSTAIKRTAQSLPTKPKWQQSIQCSPQKEYQKPQLPAQVLRTIKTELSKPQTWNEFCRTTFKFTAMIRALQEGKDPLDDKNLHFHRMDPKKIPPRELKEQYDKPNTTANIASLYRQSKKKAISKILDDVSPQCEIDTKTVTEYFKEQYKPAFCKRFNDFEKVMSKPDRLNENFVRPINRQEVRRIFERTKNSATGEDRISYKELRDIDPSFGILVKIFNRCLQEQKIPPHWKRAYTILIYKKGDKSKMQNWRPIALTNTIYKIYTSIWAQRLQNLPELISPDQKGFTKLDGCGEHIALLRNAIHRATNSKQEIAVAWLDLTNAFGSIPHDAIIQSLQAYGFPGEFVALVRDLYTDTSTTVRTKNNITESILIYAGVKQGCPLSPQLFNLAIEPILRRYKNRFQDPLKLNDVPIQLMAFADDLAMVSKTEKDLQEGLNAINIDSKNRGLKFNAQKCATLHVKKGQILPTTFKIDGAEIGALKNQEHYVYLGTELGKNARSWLKAKATKLIDDLKKIESSKLMPWQKLDAIKVFIITRMVYIIRHGDPFLEDLKELDRAIKYSIRTICKLPHLGTPQHYIYGSINKGGLGILSLEEEYHMQSINSISRLGSSPDNKIRTFFDNLLKKGVNKFLGKIQTEATPKEICEFLSGKTSNQFNAFTTNNESHGLLSRIRRSARALKHKTHGFKNFEFFYEKDILMLRIQTADYKDYTLDLRKKQRFYDTLRFLVQKNHIDLLTSTNYKSAGNSTKAIQLDAASSNFNKTGQGISISGWRFVHRARLNLHVLNAHPRHSKEGMEPRSEDEKRCRRCNHKTENLNHILCHCFQAHGPDITRRHNAVVDRLVEMIPNKKNKNMEIRLNMTTGSGNRTRPDILKIDHVEKRAIIIDVACPFEREQNSLHEAARRKIQKYSNEASILRGQGYKVYMGAFVVGALGAWYSGNNAALKALGIHKRFHRRLTSTIIGETIEHSKNIFYRHIMGDNYKLPNNIYYRAMSQQLQA

SEQ ID NO: 11 - protein, 1097 aa, Coregonus clupeaformis
MTISIPVRDLSCGLCGEKLKKVGSVVRHFKICHHLTKVVYKCNSCGRSDPNSHVISCHAPKCKGMTETRVASVAAFECEHCKKGFGSGVGLSQHKRHVHPALYRQEKSEAARSTREKWKGKENKKDGWSEWEVQEMETRFKQFEGHNYIHSMVAKGLPGRTREQVRDKRRRLRKAATKNEGPEETPVANNEIRGLSNPGIPPAPIHGVRDKLRAAIKISRGWEGEHQIGSSTIPLRGADQDSTLIVSSALELQKLLGKGAGIDSGSNKYGKKPMSGIKRRKAKSADYRQQQMLWDKDKSKLAALILDGEMNGSCAIPIPELTLVFANRWRATEPFNGLGQFRTEGRADNDEFGHLISTAEVCENLKGMKKGTAAGPDGVTRESLISWDPKGEKLASLFSMWMVEGALPSTFKECRTTLIPKTDDPMERMQIGGWRPITIGSIVARLFSRIITARLARACPINPRQRGFISAPGCSENLMLLQGLIKQSRKQRTPLAVVFVDFAKAFDSVSHEHIRQALGQRGLDQHIMGLIGSTYEKSSTRIIIEGAKSPLIDMQVGVKQGDPMSPLLFNLALDPLIQTLERYGSGVGSEGSQTTTLAFADDLVLLSNSVKGMEKNIEILEQFCLLTGLRVQPSKCHSFFTEKGGNGKGESSFKVNDCPAWKLNREDVHMIGPEESERYLGMQINPRAGIVKPELIGLLREWIGKIGRAALKPPQKVKMLNSFAVPRLIYKADHGNLKLVDLTKLDGTIKRAVKEWLHLPPSTCNGLLYSKNRNGGLGIVKLARQIPSIQARRIHRLWHSTDECTRRITRSTVEESEFKGLWLRAGGIEEEMPTLENKLTDSVTSRCPIPSDWRLEEMRKWISLECQGIGTLAFGNDKTSNTWLANPSAVGFKQGQYIDGLKLRANVYPTREMLARGRPEMDSSCRRCPAPYESCSHILGQCQSIQGARINRHNKVCDLLVTEAESNGWNVIKEMRIFSKEGKLRKPDLIFVKNGTALVVDVTVRYEVAFDTLEVARSQKIAHYLPTAPMILEKLPEVNKITFHGFPVGARGKWPTRNNEVLRAMGVSQSRITTFAKLDKPESPALLNRSAERILPR

SEQ ID NO: 12 - protein, 1314 aa, Helias cama
MRLRSGYKLPQASTEANRNGESCPEPTSSGCPMYSGGDTVSQTSAQLSTAADHSTELVRSLPTTPTSSLESLFESPASSPRSYEVSSHNSSRSTTLSPTSDVVQPSSKRKHSKKRNITSNVSPITSSIQGFNDSTQILSNTTSSRSNNPTRSVLHDMKPATTLAGRDRQRMKWTDEVNRNLLRCYYIATNLERNLTGYRQQVREMFINDYPELHFLTEQRLSDQIRVIHRNNRIPAAEREQIKQSLGTQSNSSNSYTINTSTQLIQTPENTTTEDHYNEPTILEPLPRDNLTEVTDLVADKSQETESVIENVTNDYVKLENAFKENLLKFKNSDPLSRPYIEKLEDRFKFRKLIQNLNNIVKEYLTNNTVTTLQEIHEIIYSVATTAVAFKNKECININKDNQGNKDRNKKPAWERRLENRITKLRKQIGQHTQYLRGNLTKKKQRKVNPTGKQEQEIIDEIDSLKQKLQALAKRLKRYRKTQQRYKQNRQFERNQKVVYKNFIPQQTILQPPNLQEVQNYWTKIWSNPISHSTRPSWIVSEENDWQDLGHMPAFKIDIQDVKIASSRLLNWKAPGPDKIQNFWLKHLTSTHKTIAAMFNSLIESPDTIPKFLTQGVTYLKPKNTDTLNPENYRPITCLPTLYKLLTSIIANKINTHITQNNIIYEEQKGCRKGSRGCKEQLVIDSEIHLHVKQKHRNLYYAYIDYQKAFDSVPHSWLIYVLELYKIDTNLINFLKYIMTKWSTTLNITIGQKCLKSSEISIKRGIFQGDSLSPLWFCLALNPLSKILNSTGYGYVIDKLNQIKISHLLYMDDIKLFATTKQQLHDLLKLTEEFSNDIRMDFGINKCKVNNIFRGTHKLTEPYKLMLSNNVISPMDYNEYYKYLGYQQNTSVEHTQIKQDLTAQYKHRLIQIFKTQLSSRNKVKAVNTYAVPILTYSFGIIKWTDTDLDALNTLTRTTAYKHHIHHIHSAVERFTLKRKIGGRGFIDIKNLHYRQVENLRSYFLLKAKDSTLHRAITNLTTSGTSLQFKNKEFKPENKIIKEEEKLEKWKAKSLHGKYRNNIEQEHVDKEGSFFWLTKGNIFAETEGFMVAIQDKIIKTRNYAKHILKDSNVTNDKCRLCNSANETIDHITGGCQVLSRKEYINRHNNVAKQVHQYLALKYKLISNKLPYYKYEPKNVLENNIAKLYWDRDIITDKTINCNRPDLTLILKNTKTTYLVDISIPNTENLKQKHFDKIQKYLPLAEEIKEMWHQDTVRIIPIILSSTGVIPKNLHTSLKELNLQKSIFIELQKSTILDTTAIVRRFLNLSNLVSDS

SEQ ID NO: 13 - protein, 1044 aa, Homalodisca vitripennis
MPLSRRAVAPPPDHLLLLGHRLARQLSGLRRLRLSLGAMRRRGRMGASVSSVESISPPLPVRSPPGALSLPVTPPLGLSPRDRPLPGSPPPPSPPGPPPSPTDPPVSPRENLTQWQREWLARFTPGMEWAAFLATLEELVTSLSPAPNPSRQPRPGGTRPSGPRRPRRDGDRDVREAARIQNLYRTAPKRAMREVLEASSPSCSIAEEAIMAYFTSSYSAKVGCAVEPPPGCTIPAAASPPPLLDRTEPREVAKMLRRTANTAPGPDGVKYGIWRRRDSSGHVLSAIFNICLAAGRFPPSWKVSSTVLIHKKGAPDEITNWRPIALSDTAGKLFCSVLAHRLSSWMSDNRLLSWAQKGFTASEGCLEHNFVLQELLAEARRRGGELCVAWLDLANAFGSVPHSAVVAALRSAGLTEAQLALIKDLYEGSATTIRHSGGVTPAISFQAGVRQGCPLSPVLFNLVMEYLIRPILALEGEHGVSLHGERVSVLAYADDLAIVAKSEASLQALLDSVSSAATWVGLRFKPEKCATLHVAGRTVRQTAFTIYGSPLRVLEEGETYDHLGVPTGMRGDQTPVATIARLEEETAKIFASGLAPWQKLDAVRTFIVPQLDFNLRTARIRKTSLKGLDSLMRAEGKRTLGLPSRASVELVELPPSWGGAGLLPIADQADLAAVGHAFRLLTSPDPKISRLALEGLAVSAGHRSAARVDVGLLVNYLNGDVAGNSNVTTTFSAARTARNRLSKRLPTLRWGWSEERRSFQLTMPGGRRPITVDGRSRRSLASALRRALQLHGRATLAAKPDQGRVARVVTTCPTSNHMMRGGRHTRFADWRFIHRARLNTLPLNGCRRWGNEDRRCRRCGRFDETTAHVLCHCLPMMPVITRRHDAILELLTSEIRGHPQEETRLDKRVPFQELVPDVEVPEEVASCRPDIVTIDRRNKIVRVVDVTVPYEDGWQSVTTARERKTEKYAPVARLLSAGGYRTTVDAFVVGSLGAWDSANWTTLSRLGVDRRRGAALARRCVSEAIRWSRDIYVEHVTGIRQYVG

SEQ ID NO: 14 - protein, 1612 aa, Oedothorax gibbosus
MKTQSPPLEAPIAPNTSPTPEESWTCDFCERKFTKAADCDAHLAEVHLYVMESDDSLSPPPTAPVASHTVPSPSSGTRSDPTPQATSPLGNTTPVDPPTFIARPKDKAFSCSVCGWKFSKYPAFRRHKATHKQGTPNATPAVLHAPVNPGPSSATTFAGALSAHPKRHHAPPPNKKVFPCSVCKADPFPDAMTRDLHLEFAHSGKTARVVIQREKIFTSKFHRDPNPDPVTLPARATGGAPNAPAFPPPPAAHGDIAAASPDSQDLFQNRRVHSRNPPPNQQTTAPRRGRPPGRASGNHKLSAARCPEEDLDDAPVVCTRKGQSLHVSFPIARTLLCTESGCPSVFASGTWNTLLQSLKRHLRLDHHTPISHVKKWCAVCPAVCPERISFHPCFANRDPTFLPEVDLAFRCELCPFQCLNRRQLRNHSAAHRNEELRVPRRPFASADLHPNRRRRGRDLHSCLQPPVPPRPSGRSNQVRTARPDNPRSTTEWVRSNAASSQLDCAPDPLPLSTPEDSPPPAATSHPPPGPALAARTGTLDEMAEWIVEANLPPPPKRKRRRRRRARTTSFSDSDVDPAVIEEMRQNITPNPSTASSVPHSPSQATSPSQLPSSLTDQVAGFVDLQHPSTHPPSPPREDDDPLPLDDFIPHLNELLTCAATLSDSRWSEFEALLDEITARIGEVVNLPPPRDDTVTSQPSTTDAGDHRTIQRLYKRNRRRAIRLITEGEGTRWHLEGNTITNHFQKVFSPSEFDQSIFCQATGRSTVPMDPFSPDEVKARLFKFENSAPGPDRISYSHLKEADPSCTAIAKVLNVCLRAKRIPYQWKTSRTILIHKKGNLDEISNWRPISLCATLYKLLTGCLASRLTTWLSCEDVLSDAQKGFLPFDGTFEHHFLVSREIRRTKTSGKELGMAQIDLANAFGSVPHAAIDTALLSAGVGEDFTHLIHDLYSGTSTEFIAGDGLTDRLEVRNGVRQGCPLSGLLFNLVIDPLVRGIQDAAPPSEDFFSVLAFSDDLLVLGKSPDELQSLLDLLPSLSRRLGLSINPAKCRSIHLSGTTPRGHRSTSFRIDDQPLEVIPDHVPASFLGTPIGFQLFQNTEEVEKILALAKKIGESCLAPWQRIDALKSFFFPTLNFTMRTGQFSKEQLHQIDDEVRKFVKVTLNLVGPASAASNHYIYGASDTGSLGLPCLEDEHDVVLVDSAFKLLTSRDPRVRNIAWSDLADQIKARTSTFNSRPDATPGQVEAFLSGSCDPPFHRGRSDLSSTWSTARNASRRLAATWSCPEWGSISATFQEKTLQPADRRMLQRSIKTAIRSERALKLHEYPSQGIAMECVANSKWGNQFIRTGENIRFCDWRFIHKARLNLCSLKAQRRSSHQEEIDKICRRCGHHTENLHHVVSNCRPLLHLRTKRHDAVLDRLIKARRRGFRVMGRNQDVDGSSLRPDLVLTQGDTAILIDVAVPYENRLTAFANTRRNKAAKYVQVCNNLRRTFANVHNEPIIVGALGSWDRANDKVLRKFVNKRFANKLRRLICTDVLSHTCDIFHQHVRGSLPDQARFIHPSLRAADANTDLPAQAPCPTGTSAPHPRSRPPPCPAAPTDHRLPPSFTSPGPGG

SEQ ID NO: 15 - protein, 883 aa, Strigamia maritima
MKWSRDAPLTPTPDPPHSIRHAALPLHLLALVPAMGPAELQSLWRRSRPRAFAKITEGASPFCALPVGTVHGHFLQVHQATAHLPTPVPLPPLRPPRSSDPLVTPISPGEVLDRLRRATDTAPGPDTIIYSEWRAIDPTGRLLSSLFQKVQTFGAPTRWKESTTTLIHKGGDHTAMSSWRPIALLSTVAKIYGSILSHRLTTWAVQNGRLSLSQKGFLPFRGCLDQNYLVQSCLQDARRNKKTLSLAFLDLKNAFGSIPHLTIRHSLEWLGLAPSSIDILEASFLGSSTRVRTETGLTPPISLDTGVVQGAPLSPILFNLAIEPLLRTVPSAHSGFSLHGHVVSVVAYADDLAILAPSTPALQSQLDAISGMADWAGLSFNPAKCATVTLTGKDNSRDTLSLQGSPVPSISDGDAYKHLGVPTGTTTFPSGTDAIKKMTTDLQAIDHSDLAPAQKLDALRTFIMPQLSFHLSHGSVPKAPLTQLDKKIKRAAKHWLFLPQRASNEILYMSHLHGGQSLLPLSVLADIGQVTHAVALLQSRDPAVADLALRTCREVASKRAKKTVNGPELAQYLSGSTDGIYCTPTSDIPSLWTTARAATRRLSSTLPLTWTSPLPSGVPFLSINGSPLSPFRVQSTLTNAIRHNHLSTLIAKRDQGNSYRTSHDPDPSNYWVKGGDFLRFCDWRFIHRARLNLLPVNGARRWDANSIKTCRRCGAPNETLAHVLNVCPVGLPEMKKRHDAIHARIKKALRPSPHTVVHHDRTVPGCGPLRPDILRISERDKSVAIVDIHVPFDNGTDAVERAHETKRAKYELIRRHYEHQGYRVTFDSLVVTALGRLWRGSEAALQALQISSQYSKLLRKLLVADAIHGSRNVYAHHMTGMVM

SEQ ID NO: 16 - protein, 993 aa, Sitophilus oryzae
MKTYGRIPRCTPRGRAEHQRPPPMPTPTASSPLTPRPSSPNETVYFTPEPEGSPNPPTTSRIQILSNMIIRNRNTTSECEAQNVNADPPATLETTTDASPDNTSPNNSWLTNIEEPIPESEEFREFFCAQRRELQPTQKLLRKIIDQALLGSSSALGESIDAWLDEILPKGSRRINHQARPNNNQVQARRNYGASRGGRGPRASAFKKAQDLFQKDKSMLADIILSGRALNDPPETPLLEDVESFYSNILEGQSPLDPEDVSPKTAAPTFLPITPDDVEKATAHWKVSAPGPDGLTVHQARNIPTNHWAIVMSAILFRNVHPKSWKLLRTVLVPKDGDRSSPANWRPITIGSTGQRLMHRILSSKIKNSIKLNANQRGFTQIDGTLANVLLLDHFIRSRTEQGKSFSVVSLDISKAFDTVSHHSVHRGLRRMGIDARTIAYIMGTLDKAATTIKIGQQTTRRIDINRGVKQGDPLSPLLFNIVMDEMLENHNADNKGGTLDGGMKMAAMAFADDLILMEDDIRLMPLAIDETTKFLSKRGMSLNPKKCTSISALTHYGNKKSSIVERPLYSIDGIKIPANSGLSAFKYLGHMYGTTGVRKPSLCNLQTWLARMHRAPLKPDQKLTILKEHIIPKALYGLQTSQMTGEVLKEADRMLKGAAKKLLHLHNHVADAVLFAKIRDGGLGIMELRSSVPSQLLGRMQRLLARTDDEVINRVLQTDRLHKIFEKLQNLAGNIPPDQRWREAADNGPMTTGITHAADDQASRNWIVRRPRGWTGRDFVRAVHLRANALPTKGIPSNPPEQQKCRGSCNRVETLSHVLQGCPMTHYERIGRHNEISKKVAGFCRQKGLEVEEELHIRHGDGTLYKPDLAIHTSPTTTIIVDVQVSWETRDSLAIAWERKKTTYGHDKFVQAASTRWPNRVLSFLPIIVGARGIWPRCNRPTEDALGLSQQLKESCVHSALKWGSSIHASFMRYAWKQQHRQEGHHQRRPAP

SEQ ID NO: 17 - protein, 1385 aa, Vanessa cardui
MKMQEKKYPQVPGDPERDSDDGEEVSRRVRGEKNLRVAVSNHQTMRDLLSDNDANTIRNNVTEKTTSNNTRYFLRSTRRTQNAAGISKRQQESLSSSSPTNSLFESIASSSNSFELLNKSSSSSSSISSNPEDVVQMALAINSAPTPGHNSVRRKWTSEMNEFIWRTYLITSELESNPHYLDLLHSKFIEKFKNFNVSKQRLGDQRRAIIRNKYLPQQTLDNIRKEVEKELQSKTQSLPLSHSGTSSSRLRWTNDINEAIIREYFKITQCESNRTAYRKPLHAAITSQFPQISHVSEQRIADQRRVIVNNKRLTEERIQQIRNEVEKTIIPLSAEIYTSNNEDDNNITSPNRLTEKNRSTNNVTRECTQATTEFGRKIQLTFETTYEKYKNSDPTQRPFIPKQNTSKKLALIVSHLDKNILPQYISVNQDFITIQTLIYCAAYTAAICNGTKIKEPQNHTNLEPQNKPNMPPWQKRLHKKKESIRKDIGRMTQYIRGNRSNRLIQHIASIKEKYKVHSQYEENNVSNEQYLDSMKQRLAATSSRLRRYESCTLKKKQNTQFRNNERSFYRQLNQKTSNTTQTLDTTLRKQLPSLTELKVYWSSIWANPVQHNTQAEWLLLETERKRNTPEMTFTNIPVEIFLNVLKNTHNWKAPGSDHIHNYWYKKLTSMHPLLHEYLNMFILNPSSMPKYITQGTTFMIPKDNNETHNPANYRPITCLQTIYKILTGCITRLIDTHIASNNILAQEQKGCRKRSQGCKEQLIVDSVIMKNAYANKQNICSMYVDYRKAFDSVPHSWLIQILTVYNINPTVINFLSYTMQSWRTKLKVGTSIDTIETDEIPIRRGIFQGDALSPLWFCLALNPLSYLLNKCNSGLKVPNNSLSQTKISHLLYMDDIKLYSYNVISLHQLADITQQFSKDIHMEFGVDKCKTFSFIKGKLQLNDYILNSGKKMDALNENDSYKYLGFQQNRQICEKETKKDLTRNFTHRINSILKTQLNSRNTIKSINSYAIPILTYSFGVIKWSQSDLKKLQRIISTSMTKHRKHHPRSCIERLTLPREEGGRGLIDITNLHNRQINTLRTFFYERADNSEFHESIVNADKNFSPLNLLDRNPQLNEKLTDSKDKIKTWLQKALHGRHRSDLQQPHVDIEASNAWLKRGDLFPETEGFMLAIQDQVIDTKNYQKYIIRRSNINDTCRHCHSSPETIQHITGACKSIAQTDYKHRHDQVAAIIHQNLAYQYKLISEKVPYYKYKPQSVLENNSYRIYWDRTIVTDKTIYNNRPDITVLDKQNSSVYLIDIAICNTHNLNNTFTEKISKYTDLSIEIKTQWKVKNTKMVPIVLSSTGVIPHTLHTSLKLLNINNSTLTLLQKAVILNTCRLVRKFLG

SEQ ID NO: 18 - protein, 1215 aa, Erannis defoliaria
MITRSKSTQAGNDNNARPPPPPAPSSPSASSGDDEFHTPRESSASSSGSDVSGPRTPAPRPPARRGRPPLPARLGPAGQPASRPALAAGGVVRRMRWSQINNENCMRAYYGATEGGINLSAYRVRMLPLFQALEPTVTVSAQRLSDQVRAIQRLNLLDQSLLDRLRLEAHSARPTPASTRDSHVASSAPTLASVPTSAATLATPADPVVDEGDCTSMIVSSQVSEQLRRTLEDAIGQYRFALNSRPRLPRLPTHRRNLALMGTLNALLAPYLRASEDLTDTHSILYCGAIAACRVARVKFPDTNRAPRPAGDVPAWQLRIERRISTFRTLIAKLICFSRGNNRPRVMRFVTQAFAGTGIRPQQYMANVTERIDYLKQKVYAWANRIRRYRERVDRYWQNRLFQSDQRKVYRNWEGNEQRVSDGQLPDASAMTNFWRGIWSVPVEHTEGDWMRVVERECESIEPMGSILIDPVDVSCAIRTAQNWKSPGPDGLHNFWIKWFRCSHDRLATQFQEALELGSLPSFMTTGVTFLLHKSGSTTEPKNYRPITCLPTIYKLLTSILSTKINAHIVANNVLAPAQNGCRVGSRGTKELLLIDMAISQQVRRNKGALSAAWIDYKKAYDSVPHSWLERILELYQIDTTLKSFLGACMRQWTTVLRQPGGGNGSSDSQDLIRIERGIFQGDSLSPSWFCLALNPLSTLLKDSGLGYRLRRGGEVISHLLYMDDLKLFAPKHQDLLELLKTTQVFSSAISMEFGVDKCAVMRVQRGKVVNSPDLQLSEIMTLRSLSEAETYKYLGMSESLGISVVDIKKSVKERFFCRLTKVLNSLLSGGNKARAFNGWVMPLLIYSFGILRWTQTELDALDRRVRQLLTAHRMLHPRSSVMRLYIPRKWGGRGFLNAKNLHNREVCSLRDYFLNNECGMHRDVVTVDKGLTPLSLANENWRTPSVLSTDDRKEVWKSKELHRRFYRVLSGPDVDLLASVNWLRFGDLFGETEGFACAIADEVIKTNNYRKYIMKDGTVDICRACHRPGESLRHIISGCSHLANGEYLHRHNQVARIIHQQLALQYGLVESEVPYYKYAPAPVLENGRALLYWDRSIITDRTIVANKPDIVMVDRSQRRAVLVDVTIPHDENLVKAEKDKLSKYLDLAFEITAMWDVDSTIIVPIVVSANGLIAKSLDQYLKRLSLDGWVKGQIQKAVVLDTARIVRRFLTLQP

SEQ ID NO: 19 - protein, 1045 aa, Xestia xanthographa
MLDDTVLDRLRTEIQSNHVIATPSQAVVPPQSSIIPNCDNDVSDDMVTNVSTQCNVEMRSALEGAIREYRFMQPDLRPRIPRLPMHNKNRALVAVLDSQLSNYFDNCEILTDVHSILYCAAVAACRVAHVKFPSDIATRPKPAVPAWQYRIERRIGGARALIGKLVCFREGNTRPRVMRFVRQAFSGTDISPRDYMSRVTERIDFLKQKVYAWANRIRRYKRRMDRYTQNRTFQKDERWVYRAWERPDQGVADTHLPDDDAMCSFWRSIWSVPVSHAEGEWTRVIERACDPISEMGAITISPQDVARAVRPLPNWKSPGPDGLHNFWIKWFTRSHARLATLFQSALESGSLPEFLTTGITHLLHKSGSTAEPKNYRPITCLPTVYKVLTSILRTKISKHIDDNSVMSASQNGCRNGSRGTKELLLIDMAISHQVRRSRKDLSTCWIDYKKAYDSVPHTWLMRVLELYKVDATLRTFLMSCMGQWRTVLRYPGCRQIQRNSEPIRIERGIFQGDSLSPLWFCLALNPLSTLLEDSGLGYRLRKDGQVISHLLYMDVLKLFAPNDLRLMELLKVTETFSNANRMEFGVDKCAVMHVKRGEIVESVGTQLSDSITLRSLSATETYKYLGMSEALGVNVADMKQSLKERFFGRLKKVLNSLLSGGNKVRAFNGWVMPVLMYSFGILKWTQTELDALDTKVRKLLTAYRMHHPRSSVMRLYIPRKCGGRGFLNAKTLHNREICSLREYFLGTDVGMHRDVVTMDKGLTPLSLAKENWRKPPVLDTNDRKEVWQSKELHGRFFRALHGPDVDLSASVAWLRSGDLFGETEGFVCAIMDEVMMTNNYRRFIVKDGTVDICRACHRPGESIRHIISGCSRLANGEYLHRHNLVARIIHQQLALKYNLVESEVPYYRYVPDPVLDNGCITLYWDQSIITDRTIVANKPDIVVVDRSERRAMIVDITVPHDENLVKAEKDKQIKYLDLAREVVDMWEVDSAIIVPIVVSAHGLIAKSLDQYLRRLSLGSWIKGLIQKAVLLDTARIVRRFLSLEP

SEQ ID NO: 20 - protein, 1263 aa, Synergus itoensis
MALKKVTWIWPEPDQFKCAYCPPSEVGRRLITGGQAGVFKKFEDLAKHLKLHHKNFKFEHAFKCSVCGFVGTGAYKRKSVSVHFKKLHVNSVNDPAPPPVRAGPSPVGTTQERVEAPAEPSNSPTQNVAPDLLITPPRGSGTNDRVVMRRRRRRVRTSSPDPDEEYVPTTPRTTRASNIMPEDTENPLRRLTRARRRALLRDNVPEDAAEADTAPPPPLNTASTPPSSQPPPSSSVHTTPRLGGTGVVETEAVVAVDTPERALGESPVNSNWSPIEDANTIEPSSGSSPPATLSMAPEPNNSPGAVNVGNTTPHNNNRSSVQIREAAPAEGRSDESDIARERAQVLAESVAIETTQHLNKVTDLFVSFVTKFFLAASERERGNQKKSKKSNTRVLNETEAATRIQKLYRKNKRRAMQEILTGPSVSCKINLNEVENYFKNVYSNDNVELNSLPSDYNLDPPDEPSNEALLEAISPQEVAKKISSMKNTAPGPDGIVYGTLLKADPAGAILTNIFNACLQLHTIPQCWRESLTILVHKKGDPAQITNWRPLTMTNTAYKIFAAIVSDRVTNWALANDRLSWEQKGFLPSEGCYEHNFVLQEAIQLARAKRKNLVVTWLDLANAFPSVPHATIRHALNVLGMPPAVVDLVLNMLSGCSTRVRTDDGCTDSLSMGAGVKQGCPLSPITFNLVFELVIRAIKKMGVGFPVYGKLVDLLAYADDLTALTSSQREMQEVLDVASELCGKIGLKFKPAKCAALSLERGKVVESHLAINGESIKSLQDEEVYEHLGVPTGAKFNHNPIASLERAINDVEAIHASLLAPWQKLEATSVFVLSRLDFILRGGRINKTKLTQLDKTVKKYAKLWMSLPQRASAEVVHIPPCKGGAGLLPIGDLLDIFSIAHIFRMLTTQDQVVRDIALASLGEAIRKRLKREPTKDEVAQYLSGDCTGIFSGPSSSGVSLWSYARNAARRQRERLKVRWRWCEERGEMAVECRGRGASRVVVPPNARSQIIYRLRVSVQEFYLESLLRKKDQGKVYGLATIDKSSNHFLRNGSFTRFADWRFVHRARLDVLPLNGAIRWGDQRDKRCRRCGHECETLPHVLNNCKPHMVAITKRHDAIVQRIAKASKLPGVITLNSAVPEAEASSSLLKPDIVIRDERSMTITIIDVAVPFENGPDAFKVAREHKLRKYQPIADSLQESGYKVYLKAFILGALGTWDRDNQAVIKHLRIGNRYVGLMKRLMVSDTIKWSRDIYVEHVSGQRQYS

SEQ ID NO: 21 - protein, 1186 aa, Dysdera silvatica
MNHNENMNGASVVALLNQNRVRVLSRGASSKNMQQSLLGGVGGCSGASNCTATRTNTAQSALQPSIGATTRAERPRQRMSWTIDMNTYIMRTYYTITKLETDMTNYRPTLHAKFAQQYPHLDISIERITTQRRNIITRNLLAEPILQRLRDEVANDLANTSTSVANPETPAIGAREPLQPSIEEEERRDVEKMEEGFQCALAEYEGSDAATRPRIPRQPASWKLGAATKILNEHTLPLHLQKHNSLQEIHTAIYCAAVAASRANGYEVRNEGRSNRGNKAQPPWQVRLEKRIEELRSSIGRITQYMQGNRGKKLVRKVKMALKRNRIHTRHEEPNKHISEYLDTLKQKLGVYARRLRRYKDYTNKKQQNMQFQANQKAFYRKLRETPANKDKYEAPKPAEIETFWKTLWSNEVQHKSAPWIQQEMEATRGIEEMEYTGITIEELQQVIQRTHNWKAPGIDGIHNFWYKKFTSAHGPLAKELTAIIEDPSKMPEFLCKGITYLLPKDQDTSNPAKYRPITCLNTLYKILTGCISEKISRHSESNNLMTEEQKGCQKGTLGCKEQLTIDSVILEQARKQKRKLNTAYIDYKKAFDSVPHSWLLEILSIYKVHPSIIRFLQSSMKQWRTRLQLNTPDSKIETAEIPIRRGIFQGDALSPQWFCLALNPLSRMLNTSKYGYMLKKDKRNLHKVSHLMYVDDIKLYAPTITQLRQLISITETFSKDIGMEFGLDKCKIQKNSKEDLPGIELEDGRLLKTLDEGETYKYLGIMQKRQQEHKKVKVQLTQAFQERLRSIVKTKLSGKNTTQAINAYAVPVLTYSFGIIKWSNTELEQLQRKMRTIQRRAGQLHPATAIERQTLPREEGGRGQADLKDLHDKQIQSMRQYFQLKSPRSPLIQAIIQADANYTPLNLCSTEERVLETANEQKLRTWAGKPLHGRHYNDLQQPHVDKKASNSWLAKGTLQPETEGFMLAIQDQVIATRNNQKFIQRKDIESDKCRHCHAASETIQHVMAGCKILAQSDYKHRHDQVAKIVHQKLAANAGFLTEKCPYYKYEPETVHENETHKLYWDRAIITDKTVPHNRPDITLVDKSNKTTYLIDIAVPNTNNIQTTYTTKITKYQDLRHEVRDIWGMEKIFIIPLVISATGIVPKTLATNLEILNIDPNTYIEIQKATILNTCHIVRKFLDMAH

SEQ ID NO: 22 - protein, 1063 aa, Rhopilema esculentum
MLRCAFVAFLAVLVVCSFCNKDFKSLGRHSWRCKEKVGSTASGRDSNRKSINSTSEVFLPVSETHSTTSNCSHVQCCCGKVCNGLRGLKMHQRSCRAIKGLEGETFETVQSEIDNSYDGGSNAAEQLDRFDYSNVPEIKPGIKLPKKDEQWKTANTYFAATLPLTEINPSNVNVSIKTMNSVIYDYFQINYGVSDDVINTNLIEKYKHKTKSSLKSCLKCLKESQAPLCEIRYVSRLLRSKVVPNSDTNNCNHDAEIQKNFWGYVKKTLKKDKSILPSFNVFVCTDFFRTFFCKLNPTKSFKVPDWIPSLSLPSVPYNLDPPSYHQITKVVRRMKSSGSPCPLDKLSIIPFKRCPYLRTYMTELIRIIWSSGDIPEEWKLACTVLIHKRGDASNPENFRPITLETIPLKIFTSCLRDSMFAFLSANMYIEHRIQKGFLPRLSGTFEHTAHMASIINKARIKQRAVVITLLDLKNAFGEVHHNLIPAVLRYHHIPEHIQNIICSLYANFKTSIITDTFRTPFIPVGRGVLQGDCLSPLTFNLCFNTFIHYISDNKFNQFGFYTNSLNPVHWFQFADDAAVVTGQENENQILLNHFSRWCSWANMHIRVDKCSTFGIKKSSTSSVQFLPKLIVNKNIVPTVEKDKSFKYLGRYFNFSMDNSDHMSELLETVNSLMSSIDKLSCHPKNKILLYHRYVLSKISWNLTIADLSKTWVTENLDNVVSSFVRQWLELPISASLSSLVIPKSKFGINLILPSTKFLQCQTVIRNSLRLSPNQEIRSLWKDSSTGTNIQYDVYRNTKQVLKSIQSEHENRIENVLTSQGFIISCILKFASKGTNQLWSSVQQKLPKNIYNFTIKYLNNTLATRKNLCKWSITQSSACSFCLQSESLQHIVSSCKNYLEHGRYTWRHDSVLLYLAKILSTPRNSSLYADLPSFLSPSLITGDSYRPDLVFVTEDRILYMLELTVGFESNIEENSTRKARKYSDLIKELSPAYKRVTFVNLSMSALGILGTSSTSLSDMLHQLNFDSNQTKSILMKLMNISIRCTYYIFYRRNKPWLSPEIIDF

SEQ ID NO: 23 - protein, 929 aa, Rhopilema esculentum
MNNGKLLLLLLLLYEQWKTANTYFAATLPLTEINPSNVNVSIKTMNSVIYEYFQINYGVSDDVINTNLIEKYKHKTKSSLKSCLKCLKESQAPLCEIRYVSRLLRSKVVPNSDTNNCNHDAEIQKNFWGYVKKTLKKDKSILPSFNVSVCTDFFRTFFCKLNPTKSFKVPDWIPSLSLPSVPYNLDPPSYHQITKVVRRMKSSGSPCPLDKLSIIPFKRCPYLRTYMTELIRIIWSSGDIPEEWKLACTVLIHKRGDASNPENFRPITLETIPLKIFTSCLRDSMFAFLSANMYIEHRIQKGFLPRLSGTFEHTAHMASIINKARIKQRAVVITLLDLKNAFGEVHHNLIPAVLRYHHIPEHIQNIICSLYTDFKTSIITDTFRTPFIPVGRGVLQGDCLSPLTFNLCFNTFIHYISDNKFKQFGFYTNSLNPVHWFQFADDAAVVTGQENENQILLNHFSRWCSWANMHIRVDKCSTFGIKKSSTSSVQFLPKLIVNKNIVPTVEKDKSFKYLGRYFNFPMDNSDHMSELLETVNSLMSSIDKLSCHPKNKILLYHRYVLSKISWNLTIADLSKTWVTENLDNVVSSFVRQWLELPISASLSSLVIPKSKFGINLILPSTKFLQCQTVIRNSLRLSPNQEIRSLWKDSSTGTNIQYDVYRNTKQVLKSIQSEHENRIENVLTSQGFIISCILKFASKGTNQLWSSVQQKLPKNIYNFTIKYLNNTLATRKNLCKWSITQSSACSFCLQSESLQHIVSSCKNYLEHGRYTWRHDSVLLYLAKILSTPRNSSLYADLPSFLSPSLITGDSYRPDLVFVTEDRILYMLELTVGFESNIDENSTRKARKYSDLIKELSPAYKRVTFVNLSMSALGILGTSSTSLSDMLHQLNFDSNQTKSILMKLMNISIRCTHYIFCRRNKPWLSPELIDF

SEQ ID NO: 24 - protein, 939 aa, Cotesia typhae
MPDPMNDDDSGALRTYFKWTEELRVDLLVCYQHSEPGVSGYMARMHTHWSDMHPELAHFTPKHLRNYAAHLRRNRSSLVPDRRQSNRLSFPAQLHQERRRSSLDNNNPFVGRQVSISRKITYSQQQLDAVNEDLRANILEDSTLLTVSQVVYGAAVSAFPRERQCLSIEARLKQRISQLGLKIDMSRKQVSRIQCVIEYDTTQTPYTPRIRRIAAELRWRHHTLKKSNLHVIKEESLNKLRALVAAKKSLEKRLKRLVDNSLFRSSPSRFLTPKTDVTENYPTPERVEAFWTKLYGDQPNVNANTPALHDFKVFCREHRRQNADEESPAVSVDEVRSALNGSKNWAAPGPDGINVFWWKKFTSTHLHLARIFTSYIRADDPIPDWLVEGRTVLIPKKGDLSALHLTHLLYMDDLKLYSADEDHLQAALNIVAEYTRDVGMSFGLDKCAVVHLARGKCSDTGDDVELVDGSVLSQLDAGELYRYLGMEEHRMHAVSEVRTTLQSEYVRRLRKIWSSELSGKNKVSATNMLAVPVLLYSFGVLKWTRKDLRDLDIKTRKIINMNRSMHPNSSVARLYLSRSIGGRGLQSLERLHDRLVLGLTHEVVNFTADEDDFLMQIVHKHENAHKGSFLYKAAIYAARTLGLGEINALMELRKEEFKSVIRNAEEKLLLGELMDKSMHSVFFKHVRDHGLSIQLTFSFLKSAGLMSETEGFIFACQDGVINTLEYRSKVLQVQLPDTSCRRCRQHPETLMHLLSACPVLARGAYIQRHNVALRVLYYYLRHCYGIDVTPVLPYLPGDIPQVVENDSCKIYWNMPFATTRRIDHNKPDIVLFDKATHDIYVIEFSAPAEYNISAKEEHKRQIYQDLLFEIGKLYPGYRVKLVVLIVGVLGGMKQSFVSSLAKVPACSSKAEFLAVRMQKAVLLGSLRLLREMTLACCDH

SEQ ID NO: 25 - protein, 1297 aa, Propylea japonica
MQPIMMVQLRSRNIESLPEDRQGMSGAGAGHDSMRDVSGRALRRRAPVIQNTTAQQEEPRRQTTAVPPPTNSATQDLQPAFTQAGLPRRRMKWTSCINETIMRIYYKITNLGQELTGYRQRLFNEFKRCFPDLQVTEQRIADQYRVILRNKLISEDRLQEIKNEVVNELNNEENHNREEHTTSGNREHNDGATHEERTTELQLPLQEDIQTDDETQNEHSSPQVHTSVETAHKISNEERQALVERLESAMHRLFSEYNGTDPLSRPTLPRIRSSKKLAVILKIMNTDVIPKFLSMATQLETIHLILYCAATTVVEVLGMKTKPRQHSNQPCPQPRLPHWQRRLEEKVQRCRQDIGRLTQYENGIRTIKLKSLVESIIYRNRKHSSYEEENTTVKQCIDTLKQKLSVYSERLRRYKESNRRKQDNISFENSEKNFYRHLDGKQQNSPNIYPNKDDMEKFWTEQLSTPTTYNKNAEWIKNEEKTQTNTAQMSLTVITEQELSDILKEMHNWKSPGPDGLHSFWLKKFNCLHSNLTNAVNEILRGPESMPSFLTEGITYLLPKNHQSTDDPATYRPVTCLPTMYKLITSCITRRLYSHCERNNIIASEQKGCSRGAMGSKEQLIIDSIICNQAHKKRRNLFTAYLDYKKAFDSMPHEWLIKVLEIYKVDPRIVSFLKTVMSTWRTNIEISGTGIRTGTVSIRRGIFQGDSLSSLWFCMAMNPLSTILKSSRKGFNLKGNTSNMLINNLLYVDDLKLIAANRDQLECLLRLVEMFSKDVSMNFGLDKCRSLNIAGGKIQQTPLTLSNGEEIKAMLAGDLYKYLGMKQCQRIDQRVMKDELTAEFTRRMGSVLKTKLNSRNLTKAVNTYACSVLTYSFGIVKWSNTDLDRLQRKMRTLCTKANKHHPKCCVERTTIPRTQGGQGFVNIKKMAAEQINNLRNYFIDKANTSDLHKILIEADCSTPLSLSEHPHENTTQTDSDKIQRWREKPLHGRHLNEVTQEHVDIPASNYWLTSGRLFPETEGFLLAIQDQVVQTKNYQKYIMKDRSLTDDRCRYGCQTSETIQHITGGCQMFAGNEYKSRHDAVCKILHQELAIQLKILQSETIPYYKYQPEVILENNLYRLYWDRTVLTNLTVVNNRPDIILVKKKEKRAILIDVAIPNNNNLRQKYAEKISKYRELELQIKRQWGMSSTRTIPILISTTGIIPKSLKSNLKELDLDENLFKVMQKAVLLGTARTVRKFVGHDGHQEQPWRETLQNQLPRHQPRDPGPSNEGRTTQDPGEEEHRRPQSSIPLILAIRDE

SEQ ID NO: 26 - protein, 1150 aa, Propylea japonica
MQPIMMVQLRSRNIESLPEDRQGMSGAGAGHDSMRDVSGRALRRRAPVIQNTTAQQEEPRRQTTAVPPPTNSATQDLQPAFTQAGLPRRRMKWTSCINETIMRIYYKITNLGQELTGYRQRLFNEFKRCFPDLQVTEQRIADQYRVILRNKLISEDRLQEIKNEVVNELNNEENHNREEHTTSGNREHNHGATHEERTTELQLPLQEDIQTDDETQNEHSSPQVHTSVETAHKISNEERQALVERLESAMHRLFSEYNGTDPLSRPTLPRIRSSKKLAVILKIMNTDVIPKFLSMATQLETIHLILYCAATTVVEVLGMKTKPRQHSNQPCPQPRLPHWQRRLEEKVQRCRQDIGRLTQYENGIRTIKLKSLVESIIYRNRKHSSYEEENTTVKQCIDTLKQKLSVYSERLRRYKESNRRKQDNISFENSEKNFYRHLDGKQQNSPNIYPNKDDMEKFWTEQLSTPTTYNKNAEWIKNEEKTQTNTAQMSLTVITEQELSDILKEMHNWKSPGPDGLHSFWLKKFNCLHSNLTNAVNEILRGPESMPSFLTEGITYLLPKNHQSTDDPATYRPVTCLPTMYKLITSCITRRLYSHCERNNIIASEQKGCSRGAMGSKEQLIIDSIICNQAHKKRRNLFTAYLDYKKAFDSMPHEWLIKVLEIYKVDPRIVSFLKTVMSTWRTNIEISGTGIRTGTVSIRRGIFQGDSLSSLWFCMAMNPLSTILKSSRKGFNLKGNTSNMLINHLLYVDDLKLIAANRDQLECLLRLVEMFSKDVSMNFGLDKCRSLNIAGGKIQQTPLTLSNGEEIKAMLAGDLYKYLGMKQCQRIDQRVMKDELTAEFTRRMRSVLKTKLNSRNLTKAVNTYACSVLTYSFGIVKWSNTDLDRLQRKMRTLCTKANKHHPKCCVERTTIPRTQGGQGFVDIKKMAAEQINNLRNYFIDKANTSDLHKILIEADCSTPLSLSEHPHENTTQTDSDKIQRWREKPLHGRHLNEVTQEHVDIPASNYWLTSGRLFPETEGFLLAIQDQVVQTKNYQKYIMKDRSLTDDRCRYGCQTSETIQHITGGCQMFAGNEYKSRHDAVCKILHQELAIQLKILQSETIPYYKYQPEVILENNLYRLYWDRTVLTNLTVANNRPDIILVKKKRREQYL

SEQ ID NO: 27 - protein, 1296 aa, Propylea japonica
MQPIMMVQLRSRNIESLPEDRQGMSGAGAGHDSMRDVSGRALRRRAPVIQNTTAQQEEPRRQTTAVPPPTNSATQDLQPAFTQAGLPRRRMKWTSCINETIMRIYYKITNLGQELTGYRQRLFNEFKRCFPDLQVTEQRIADQYRVILRNKLISEDRLQEIKNEVVNELNNEENHNREEHTTSGNREHNHGATHEERTTELQLPLQEDIQTNDETQNEHSSPQVHTSVETAHKISNEERQALVERLESAMHRLFSEYNGTDPLSRPTLPRIRSSKKLAVILKIMNTDVIPKFLSMATQLETIHLILYCAATTVVEVLGMKTKPRQHSNQPCPQPRLPHWQRRLEEKVQRCRQDIGRLTQYENGIRTIKLKSLVESIIYRNRKHSSYEEENTTVKQCIDTLKQKLSVYSERLRRYKESNRRKQDNISFENSEKNFYRHLDGKQQNSPNIYPNKDDMEKFWTEQLSTPTTYNKNAEWIKNEEKTQTNTAQMSLTVITEQELSDILKEMHNWKSPGPDGLHSFWLKKFNCLHSNLTNAVNEILRGPESMPSFLTEGITYLLPKNHQSTDDPATYRPVTCLPTMYKLITSCITRRLYSHCERNNIIASEQKGCSRGAMGSKEQLIIDSIICNQAHKKRRNLFTAYLDYKKAFDSMPHEWLIKVLEIYKVDPRIVSFLKTVMSTWRTNIEISGTGIRTGTVSIRRGIFQGDSLSSLWFCMAMNPLSTILKSSRKGFNLKGNTSNMLINHLLYVDDLKLIAANRDQLECLLRLVEMFSKDVSMNFGLDKCRSLNIAGGKIQQTPLTLSNGEEIKAMLAGDLYKYLGMKQCQRIDQRVMKDELTAEFTRRMRSVLKTKLNSRNLTKAVNTYACSVLTYSFGIVKWSNTDLDRLQRKMRTLCTKANKHHPKCCVERTTIPRTQGGQGFVDIKKMAAEQINNLRNYFIDKANTSDLHKILIEADCSTPLLLSEHPHENTTQTDSDKIQRWREKPLHGRHLNEVTQEHVDIPASNYWLTSGRLFPETEGFLLAIQDQVVQTKNYQKYIMKDRSLTDDRCRYGCQTSETIQHITGGCQMFAGNEYKSRHDAVCKILHQELAIQLKILQSETIPYYKYQPEVILENNLYRLYWDRTVLTNLTVANNRPDIILVKKKEKRAILIDVAIPNNNNLRQKYAEKISKYRELELQIKRQWGMSSTRTIPILISTTGIIPKSLKSNLKELDLDENLFKVMQKAVLLGTARTVRKFVGHDGHQEQPWRETLQNQLPHQPRDPGPSNEGRTTQDPGEEEHRRPQSSIPLILAIRDE

SEQ ID NO: 28 - protein, 843 aa, Propylea japonica
MEKFWTEQLSTPTSYNTNAEWIKDEEKTQTNTEQMPLTVITPQELSEIFKEMHNWKSPGPDGLHSFWLKKCNCLHSNLTNAVNEFLRVPESVPSFLTEGVTYLLPKNHQSTDDPATYRPVTCLPTMYKLITSCITRRLYSHCERNNIIASEQKGCFRGAMGSKEQLIIDSIICNQAHKKRRNLFTAYLDYKKAFDSMPHEWHIKVLEIYKVDPRIVSFLKTVMSTWRTNIEISGRGIRTGTVSIKRGIFQGDSLSSLWFCMAMNPLSSILKSSRKGFNLKGNTRNMLINHLLYVDDLKLFAANRDQLECLLRLVEKFSKDVSMNFGLDKCRSLNIAGGKIQQTPLTLSNGEEIKAMLAGDLYKYLGMKQCQRIDQRVMNDELTAEFTRRMRSVLKTKLNSRNLTKAVNTYACSVLTYSFGIIKWSNTDLDHLQRKMRTLCTKANKHHPKCCVERTTIPRTQGGQGFVDIKKIAAEQIRNLRNYFVDKSNTSDLHKILIEADGSTPLLLSEHPHENTTQTDSDKIQRWKEKPLHGRHLNEVTQEHVDIPASNYWLTSGRLFPETEGFLLAIQDQVVKTKNYQKYIMKDRSLTDDKCRYGCQTSETIQHITGGCQMFAGNEYKSRHDAVCKILHQELAIQLKMLQSEPIPYYKYQPEVILENHHYRLYWDCTVLTNLTVANNRPDIILVKKKEKKAILIDVAIPNNNNLRQKYAEKISKYRELELQIKRQWGMSSTRTIPILISTTGIIPKSLKSNLKELDLDENLFKVMQKAVLLGTAKTVRKFVGHDGHQEQPWRETLQNQLPRRQPRDPGPSNEGRTTQDPGEEEHRRPQSSIPLILAIRDE

SEQ ID NO: 29 - protein, 1297 aa, Propylea japonica
MQPIMMVQLRSRNIESLPEDRQGMSGAGAGHDSMRDVSGRALRRRAPVIQNTTAQQEEPRRQTTAVPPPTNSATQDLQPAFTQAGLPRRRMKWTSCINETIMRIYYKITNLGQELTGYRQRLFNEFKRCFSDLQVTEQRIADQYRVILRNKLISEDRLQEIKNEVVNELNNEENHNREEHTTSGNREHNHGATHEERTTELQLPLQEGIQTDDETQNEHSSPQVHTSVETAHKISNEERPALVERLESAMHRLFTEYNCTDPLSRPTLPRIRSSKKLAVILKIMNTDVIPKFLSMATQLETIHLILYCAATTVVEVLGMKTKPRQHSNQPCPQPRLPHWQRRLEEKVQRSRQDIGRLTQYENGIRTIKLKSLVESIIYRNRKHSSYEEENTTVKQCIDTLKQKLSVYSERLRRYKESNRRKQDNISFENSEKNFYRHLDGKQQNSPNIYPNKDDMEKFWTEQLSTPTTYNKHAEWIKNEEKTQTNTAQMSLTVITEQELSDILKEMHNWKSPGPDGLHSFWLKKFNCLHSNLTNEVNEILRDPESMPSFLTEGITYLLPKNHQSTDDPATYRPVTCLPTMYKLITSCITRRLYSHCERNNIIASEQKGCSRGAMGSKEQLIIDSIICNQAHKKRRNLFTAYLDYKKAFDSMPHEWLIKVLEIYKVDPRIVSFFKTVMSTWRTNIEISGTGIRTGTVSIRRGIFQGDSLSSLWFCMAINPLSTILKSSRKGFNLKGNTSNMLINHLLYVDDLKLIAANRDQLECLLRLVEMFSKDVSMNFGLDKCRSLNIAGGKIQQTPLTLSNGEEIKAMLAGDLYKYLGMKQCQRIDQRVMKDELTAELTRRMRSVLKTKLNSRNLTKAVNTYACSVLTYSFGIVKWSNTDLDRLQRKMRTLCTKANKHHPKCCVERTTIPRTQGGQGFVDIKKMAAEQINNLRNYFTDKANTSDLHKILIEADCSTPLLLSEHPHENTTQTDSDKIQRWREKPLHGRHLNEVTQEHVDIPASNYWLTSGRLFPETEGFLLAIQDQVVQTKNYQKYIMKDRSLTDDRCRYGCQTSETIQHITGGCQMFAGNEYKSRHDAVCKILHQELATQLKILQSETIPYYKYQPEVILENNLYRLYWDRTVLTNLTVANNRPDIILVKKKEKRAILIDEAIPNNNNLRQKYAEKISKYRELELQIKRQWGMSSTRTIPILISTTGIIPKSLKSNLKELDLDENLFKVMQKAVLLGTARTVRKFVGHDGHQEQPWRETLQNQLPRHQPRDPGPSNEGRTTQDPREEEHRRPQSSIPLILAIRDE

SEQ ID NO: 30 - protein, 1297 aa, Propylea japonica
MQPIMMVQLRSRNIESLPEDRQGMSGAGAGHDSMRDVSGRALRRRAPVIQNTTAQQEEPRRQTTAVPPPTNSATQDLQPAFTQAGLPRRRMKWTSCINETIMRIYYKITNLGQELTGYRQRLFNEFKRCFPDLQVTEQRIADQYRVILRNKLISEERLQEIKNEVVNELNNEENHNREEHTISGNREHNHGATHEERATELQLPLQDNIQTDDETQNEHSSPQVHTSVETAHKISNEERQALVERLESAMHRLFSEYNGTDPLSRPTLPRIRSSKKLAVILKIMNTDVIPKFLSMATQLETIHLILYCAATTVVEVLGMKTKPRQHSNQPCPQPRLPHWQRRLEEKVQRCRQDIGRLTQYENGIRTIKLKSLVESIIYRNRKHSSYEEENTTVKQCIDTLKQKLSVYSERLRRYKESNRRKQDNISFENSEKNFYRHLDGKQQNSPNIYPNKDDMEKFWTEQLSTPTTYNKNAEWIKNEEKNQTNTAQMSLTVITEQEISDILKQMHNWKSPGPDGLHSFWLKKFNCLHSNLTKAVNEILRGPESMPSFLTEGITYLLPKNHQSTDDPATYRPVTCLPTMYKLITSCITRRLYSHCERNNIIASEQKGCSRGAMGSKEQLIIDSIICNQAHKKRRNLFTAYLDYKKAFDSMPHEWLIKVLEIYKVDPRIVSFLKTVMSTWRTNIEISGTGIRTGTVSIRRGIFQGDSLSSLWFCMAMNPLSTILKSSRKGFNLKGNTSNMLINHLLYVDDLKLIAANRDQLECLLRLVEMFSKDVSMNFGLDKCRSLNIAGGKIQQTPLTLSNGEEIKAMLAGDLYKYLGMKQCQRIDQRVMKDELTAEFTRRMRSVLKTKLNSRNLTKAVNTYACSVLTYSFGIVKWSNTDLDRLQRKMRTLCTKANKHHPKCCVERTTIPRTQGGQGFVDIKKMAAEQINNLRNYFIDKANTSDLHKILIEADCSTPLLLSEHPHENTTQTDSDKIQRWREKPLHGRHLNEVTQEHVDIPASNYWLTSGRLFPETEGFLLAIQDQVVQTKNYQKYIMKDRSLTDDRCRYGCQTSETIQHITGGCQMFAGSEYKSRHDAVCKILHQELAIQLKILQSETIPYYKYQPEVILENNLYRLYWDRTVLTNLTVANNRPDIILVKKKEKRAILIDVAIPNNNNLRQKYAEKISKYRELELQIKRQWGMSSTRTIPILISTTGIIPKSLKSNLKELDLDENLFKVMQKAVLLGTARTVRKFVGHDGHQEQPWRETLQNQLPRHQPRDPGPSNEGRTTQDPGEEEHRRPQSSIPLILAIRDE

SEQ ID NO: 31 - protein, 1297 aa, Propylea japonica
MQPIMMVQLRSRNIESLPEDRQGMSGAGAGHDSMRDVSGRALRRRAPVIQNTTAQQEEPRRQTTAVPPPTNSATQDLQPAFTQAGLPRRRMKWTSCINETIMRIYYKITNLGQELTGYRQRLFNEFKRCFPDLQVTEQRIADQYRVILRNKLISEDRLQEIKNEVVNELNNEENHNREEHTTSGNREHNHGATHEERTTELQLPLQEDIQTDDETQNEHSSPQVHTSVETAHKISNEERQALVERLESAMHRLFSEYNGTDPLSRPTLPRIRSSKKLAVILKIMNTDVIPKFLSMATQLETIHLILYCAATTVVEVLGMKTKPRQHSNQPCPQPRLPHWQRRLEEKVQRCRQDIGRLTQYENGIRTIKLKSLVESIIYRNRKHSSYEEENTTVKQCIDTLKQKLSVYSERLRRYKESNRRKQDNISFENSEKNFYRHLDGKQQNSPNIYPNKDDMEKFWTEQLSTPTTYNKNAEWIKNEEKTQTNTAQMSLTVITEQELSDILKEMHNWKSPGPDGLHSFWLKKFNCLHSNLTKAVNEILRGPESMPSFLTEGITYLLPKNHQSTDDPATYRPVTCLPTMYKLITSCITRRLYSHCERNNIIASEQKGCSRGAMGSKEQLIIDSIICNQAHKKRRNLFTAYLDYKKAFDSMPHEWLIKVLEIYKVDPRIVSFLKTVMSTWRTNIEISGTGIRTGTVSIRRGIFQGDSLSSLWFCMAMNPLSTILKSSRKGFNLKGNTSNMLINHLLYVDDLKLIAANRDQLECLLRLVEMFSKDVSMNFGLDKCRSLNIAGGKIQQTPLTLSNGEEIKAMLAGDLYKYLGMKQCQRIDQRVMKDELTAEFTRRMRSVLKTKLNSRNLTKAVNTYACSVLTYSFGIVKWSNTDLDRLQRKMRTLCTKANKHHPKCCVERTTIPRTQGGQGFVDIKKMAAEQINNLRNYFIDKANTSDLHKILIEADCSTPLLLSEHPHENTTQTDSDKIQRWREKPLHGRHLNEVTQEHVDIPASNYWLTSGRLFPETEGFLLAIQDQVVQTKNYQKYIMKDRSLTDDRCRYGCQTSETIQHITGGCQMFAGNEYKSRHDAVCKILHQELAIQLKILQSETIPYYKYQPEVILENNLYRLYWDRTVLTNLTVANNRPDIILVKKKEKRAILIDVAIPNNNNLRQKYAEKISKYRELELQIKRQWGMSSTRTIPILISTTGIIPKSLKSNLKELDLDENLFKVMQKAVLLGTARTVRKFVGHDGHQEQPWRETLQNQLPRHQPRDPGPSNEGRTTQDPGEEEHRRPQSSIPLILAIRDE

SEQ ID NO: 32 - protein, 1291 aa, Propylea japonica
MSSEFSFPKVRRVGPKVPVIIIIIIIIIRAVSGRALRRRAPVIQNTTAQQEEPRRQTTAVPPPTNSATQDLQPAFTQAGLPRRRMKWTSCINETIMRIYYKITNLGQELTGYRQRLFNEFKRCFPDLQVTEQRIADQYRVILRNKLISEDRLQEIKNEVVNELNNEENHNREEHTTSGNREHNHGATHEERTTELQLPLQEDIQTDDETQNEHSSPQVHTSVETAHKISNEERQALVERLESAMHRLFSEYNGTDPLSRPTLPRIRSSKKLAVILKIMNTDVIPKFLSMATQLETIHLILYCAATTVVEVLGMKTKPRQHSNQPCPQPRIPHWQRRLEEKVQRCRQDIGRLTQYENGIRTIKLKSLVESIIYRNRKHSSYEEENTTVKQCIDTLKQKLSVYSERLRRYKESNRRKQDNISFENSEKNFYRHLDGKQQNSPNIYPNKDDMEKFWTEQLSTPTTYNKNAEWIKNEEKTQTNTAQMSLTVITEQELSDILKEMHNWKSPGPDGLHSFWLKKFNCLHSNLTKAVNEILRGAESMPSFLTEGITYLLPKNHQSTDDPATYRPVTCLPTMYKLITSCITRQLYSHCERNNIIASEQKGCSRGAMGSKEQLIIDSIICNQAYKKRRNLFTAYLDYKKAFDSMPHEWLIKVLEIYKVDPRIVSFLKTVMSTWRTNIEISGTGIRTGTVFIRRGIFQGDSLSSLWFCMAMNPLSTILKSSRKGFNLKGNTINMLINHLLYVDDLKLIAANRDQLECLLRLVEMFSKDVSMNFGLDKCRSLNIAGGKIQQTPLTLSNGEEIKAMLAGDLYKYLGMKQCQRIDQRVMKDELTAEFTRRMRSVLKTKLNSRNLTKAVNTYACSVLTYSFGIVKWSNTDLDHLQRKMRTLCTKANKHHPKCCVERTTIPRTQGGQGFVDIKKMAAEQINNLRNYFIDKANTSDLHKILIEADCSTPLLLSEHPHENTTQTDSDKIQRWREKPLHGRHLNEVTQEHVDIPASNYWLTSGRLFSETEGFLLAIQDQVVQTKNYQKYIMKDRSLTDDRCRYGCQTSETIQHITGGCQMFAGNEYKSRHDAVCKILHQELAIQLKILQSETIPYYKYQPEVILENNLYRLYWDRTVLTNLTVANNRPDIILVKKKEKRAILIDVAIPNNNNVRQKYAEKISKYRELELQIKRQWGMSSTRTIPILISTTGIIPKSLKSNLKELDLDENLFKVMQKAVLLGTARTVRKFVGHDGHQEQPWRKTLQNQLPRHQPRDPGPSNEGRTTQGPGEEEHRRPQSSIPLILAIRDE

SEQ ID NO: 33 - protein, 1315 aa, Propylea japonica
MVSSRVRAWQTRAKPGSRYKMQPIMMVQLRSRNIESLPEDRQGMSGAGAGHDSMRDVSGRALRRRAPVIQNTTAQQEEPRRQTTAVPPPTNSVTQDLQPAFTQAGLPRRRMKWTSCINETIMRIYYKITNLGQELTGYRQRLFNELQRCFPDLQVTEQRIADQYRVILRNKLISEDRLQEIKNEVVNELNNEENHNREEHTTSGNREHNHGATHEERTTELQLPLQEDIQTDDETQNEHSSFQVHTSVETAHKISNEERQALVERLESAMHRLFSEYNGTDPLSRPTLPRIRSSKKLAVILKIMNTDVIPKFLSMATQLETIHLILYCAATTVVEVLGMKTKPRQHSNQPCPQPRLPHWQRRLEEKVQRCRQDIGRLTQYENGIRTIKLKSLVESIIYRNRKHSSYEEENTTVKQCIDTLKQKLSVYSERLRRYKESNRRKQDNISFENSEKNFYRHLDGKQQNSPNIYPNKDDMEKFWTEQLSTPTTYNKNAEWIKNEEKTQTNTAQMSLTVITEQELSDILKEMHNWKSPGPDGLHSFWLKKFNCLHSNLTKAVNEILRGAESMPSFLTEGITYLLPKNYQSTDDPATYRPVTCLPTMYKLITSCITRRLYSHCERNNIIASEQKGCSRGAMGSKEQLIIDSIICNQAYKKRRNLFTAYLDYKKAFDSMPHEWLIKVLEIYEVDPRIVSFLKTVMSTWRTNIEISGTGIRTGTVSIRRGIFQGDSLSSLWFCMNPLSTILKSSRKGFNLKGNTSNMLINHLLYVDDLKLIAANRDQLECLLRLVEMFSKDVSMNFGLDKCRSLNIAGGKIQQTPLTLSNGEEIKAMLAGDLYKYLGMKQCQRIDQRVMKDELTAEFTRRMRSVLKTKLNSRNLTKAVNTYACSVLTYSFGIVKWSNTDLDRLQRKMRTLCTKANKHHPKCCVERTTIPRTQGGQGFVDIKKMAAEQINNLRNYFIDKANTSDLHKILIEADCSTPLLLSEHPHENTTQTDSDKIQRWREKPLHGRHLNEVTQEHVDIPASNYWLTSGRLFPETEGFLLAIQDQVVQTKNYQKYIMKDRSLTDDRCRYGCQTSETIQHITGGCQMFAGNEYKSRHDAVCKILHQELAIQLKVLQSETIPYYKYQPEVILENNLYRLYWDRTVLTNLTVANNRPDIILVKKKEKRAILIDVAIPNNNNLRQKYAEKISKYRELELQIKRQWGMSSTRTIPILISTTGIIPKSLKSNLKELDLDENLFKVMQKAVLLGTARTVRKFVGHDGHQEQPWRETLQNQLPRHQPRDPGPSNEGRTTQDPGEEEHRRPQSSIPLILAIRDE

SEQ ID NO: 34 - protein, 1047 aa, Propylea japonica
MKWTSCINETIMRIYYKITNLGQELTGYRQRLFNEFKRCFPDLQVTEQRIADQYRVILRNKLISEDRLQEIKNEVVNELNNEENHNREEHTTSGNREHNHGATHEERTTELQLPLQKDIQTDDETQNEHSSPQVHTSVETAHKISNEERQALVERLESAMHRLFTEYNCTDPLSRPTLPRIRSSKKLAVILKIMNTDVIPKFLSMATQLETIHLILYCAATTVVEVLGMKTKPRQHSNQPCPQPRLPHWQNRLEEKVQRSRQDIGRLTQYENGIRTIKLKSLVESIIYRNRKHSSYEEENTTVKQCIDTLKQKLSVYSERLRRYKDSNRRKQDNISFENSEKNFYRHLDGKQQNSPNIYPNKDDVEKFWTEQLSTPTTYNKNAEWIKNEEKTQTNTAQMSLTVITEQELSDNLKEMHNWKSPGPDGLHSFWLKKFNCLHSNLTNAVNEILRDPESMPSFLTEGITYLLPKNHQSTDDPATYRPVTCLPTMYKLITSCITRRLYSHCERNNIIASEQKGCSRGAMGSKEQLIIDSIICNQAHKKRRNLFTAYLDYKKAFDSMPHEWLIKVLEIYKVDPRIVSFLKTVMSTWRTNIEISGTGIRTGTVSIRRGIFQGDSLSSLWFCMAMNPLSTILKSSRKGFNLKGNTSNMLINHLLYVDDLKLIAANRDQLECLLRLVEMFSKDVSMNFGLDKCRSLNIAGGKIQQTPLTLSNGEEIKAMLAGDLYKYLGMKQCQRIDQRVMKDELTAEFTRRMRSVLKTKLNSRNLTKAVNTYACSVLTYSFGIVKWSNTDLDRLQRKMRTLCTKANKHHPKCCVERTTIPRTQGGQGFVDIKKMAAEQINNLRNYFTDKANTSDLHKILIEADCSTPLLLSEHPHENTTQTDSDKIQRWREKPLHGRHLNEVTQEHVDIPASNYWLTSGRLFPETEGFLLAIQDQVVQTKNYQKYIMKDRSLTDDRCRYGCQTSETIQHITGGCQMFAGNEYKSRHDAVCKILHQELAIQLKILQSETIPYYKYQPEVILENNLYRLYWDRTVLTNLTVANNRPD

SEQ ID NO: 35 - protein, 1289 aa, Propylea japonica
MQPIMMVQLRNRNIESLPEDRQGMSGAGAGHDSMRDVSGRVLRRRAPVIQNTTAQQEEPRRQTTAVSPPTVSATQDLQPAFTQAGLPRRRMKWTSCMNETIMRLYFKITNMGQEQTGYRQRLFNEFKRCFPDLQVTEQRIADQYRVILRNKLISEDRLQEIKNEVVNELNIEENRTREEHTTYENRDHNSETTREGITTELQLPLQENVRTNEETQTEHIPSQVNSSDDERQALVERLQSAMCRVFIEYNGTDPLSRPTLPRIRSSKKLAVILKIMNTDVIPKFISMATQLETIHLILYCAATTVVEVLGMKTKPRQHTIQPCPQPRLPHWQRRLEEKVQRCRQDIGRLTQYENGIRTIKLKSLVESIIYRNRKHSSYEEENTTVKQCIDTLKQKLSVYSERLRRYKESNRRKQDNISFENSEKNFYRHLNGKQQNSSNIYPNKDDMEKFWTEQLSTPTSYNTNAEWIKDEEKTQTNTEQMPLTVITAQELSDILKEMHNWKSPGPDGLHSFWLKKFNCLHSSLTKAVNEILRVPESMPSFLTEGVTYLLPKNHQSTDDPATYRPVTCLPTMYKLITSCITRRLYSHCERNNIIASEQKGCSRGAMGSKEQLIVDSIICNQAHKKRRNLFTAYLDYKKAFDSMPHEWLIKVLEIYKVDPRIVSFLKTVMSTWRTNIEISGTGIRTGTVSIKRGIFQGDSLSSLWFCMALNPLSTILKSSRKGFNLKGNTRNMLINHLLYVDDLKLFAANRDQLECLLRLVEKFSKDVSMNFGLDKCRSLNIAGGKIQQTPLTLSNGEEIKAMLAGDLYKYLGMKQCQRIDQRVMKDELTAEFTRRMRSVLKTKLNSRNLTKAVNTYACSVLTYSFGIVKWSNTDLDHLQRKMRTLCTKANKHHPKCCVERTTIPRPQGGQGFVDIKKMAAEQLSNLRNYFVDKSNTSDLHKILIEADGSTPLLLSEHPHENTTQTDSDKIQRWREEPLHGRHMNEVTQEHVDIPASNYWLTSGRLFPETEGFLLAIQDQVVQTKNYQKYIMKDRSLTDDKCRYGCQTSETIQHITGGCQMFAGNEYKSRHDAVCKILHQELAIQLKIMQSETVPYYKYQPEVILENHHYRLYWDRTVLTNLTVANNRPDIILVKKKEKRAILIDVAIPNNNNLRQKYAEKISKYRELELQIKRQWGMSNTRTIPILISTTGVIPKSLKSSLKELDVDENLYKIMQKAVLLGTARTVRKFVGHDGHQEQPWREISQDRLAGHQARNPGPSNEGRPTQGPGEEEHRGPQSSIPLILAIRDE

SEQ ID NO: 36 - protein, 1297 aa, Propylea japonica
MQPIMMVQLRNRNIESLPEDRQGMSGAGAGHDSMRDVSGRVLRRRAPVIQNTTAHQEEPGRQTTAVSPPTESATQDLQPAFTQAGLPRRRMKWTSCMNETIMRIYYKITNLGQELTGYRQRLFNEFKRCFPDLQVTEQRIADQYRVILRNKLISEDRLQEIKNEVVNELNNEEDHNREELTTSGNREHNHGTTPEERTTGNQLPLQEDVHMDEETQNEHSSFQVYTSVETANQISNEERQALVERLQSAMNRLFSEYNGTDPLSRPTLPRIRSSKKLSVILKIMNTDVIPKFLSMATQLETIHLILYCAATTVVEVLGMKTKPRQHTIQPCPQPRLPHWQRRLEEKVQRCRQDIGRLTQYENGTRTIKLKSLVELIIYRNRKHSSYEEENTTVKQCIDTLKQKLSVYSERLQRYKESNSRKQDNISFENSEKNFYRHLGRKQQNSPNIYPNKNDMEKFWTEQLSTPTTYNKNAKWIKEEEKTQTNTEQMSLTVITQQELSDILKEMHNWKSHGPDGLHSFWLKKFNCLHSSLTKAVNGILSGPESMPSFLTEGITYLLPKNHQSTDDPATYRPVTCLPTMYKLITSCITRRIYSHCERNNIIASEQKGCSRGAMGSKEQLIIDSIICNQAHKKRRNLFTAYLDYKKAFDSMPHEWLIKVLEIYKVDPRIVSFLKTAMSTWRTNIEISGTGIRTGTVSIKRGIFQGDSLSSLWFCMAMNPLSTILKSSGKGFNLKGNTRNMLINHLLYVDDLKLIAANRDQLESLLRLVEKFSKDVGMNFGLDKCRSLNIAGGKIQQTPLTLSNGEEIKAMLAGDLYKYLGMKQCQRIDQRVMKDELTAEFTRRMRSVLKTKLNSRNLTKAINTYACSVLIYSFGIVKWSNTDLDHLQRKMRTLCTKANKHHPKCCVERTTIPRTQGGQGFVDIKKMAAEQINNLRNYFVDKSNTSDLHKILIEADDSTPLLLSEHSHENTTQTDSDKIQRWREKPLHGRHLNEVTQEHVDIPASNYWLTSGRLFPETEGFLLAIQDQVVQTRNYQKYIMKDRSLTDDRCRYGCQTSETIQHITGGCQMFAGNEYKSRHDAVCKILHQELAIQLKMLQSEPIPYYKYQPEVILENHHYRLYWDRTVLTNLTVANNRPDIILVKKKEKKAILIDVAIPNNNNLRQKYAEKISKYRELELQIKRQWGMSSTRTIPILISTTGIIPKSLKTNLKELNLDENLYKVMQKAVLLGTARTVRKFVGHDGYQEQPWRETCKGRLPGHLPRNPGPSDEGRTTQGPGEEEHRRPQSSIPLILAIRDE

SEQ ID NO: 37 - protein, 1297 aa, Propylea japonica
MQPIMMVQLRSRNIESLPEDRQGMSGAGAGHDSMRDVSGRALRRRAPVIQNTTAQQEEPRRQTTAVPPPTNSATQDLQPAFTQAGLPRRRMKWTSCINETIMRIYYKITNLGQELTGYRQRLFNEFKRCFSDLQVTEQRIADQYRVILRNKLISEDRLQEIKNEVVNELNNEENHNREEHTTSGNREHNHGATHEERTTELQLPLQEGIQTDDETQNEHSSPQVHTSVETAHKISNEERQALVERLESAMHRLFTEYNCTDPLSRPTLPRIRSSKKLAVILKIMNTDVIPKFLSMATQLETIHLILYCAATTVVEVLGMKTKPRQHSNQPCPQPRLPHWQRRLEEKVQRSRQDIGRLTQYENGIRTIKLKSLVESIIYRNRKHSSYEEENTTVKQCIDTLKQKLSVYSERLRRYKESNRRKQDNISFENSEKNFYRHLDGKQQNSPNIYPNKDDMEKFWTEQLSTPTTYNKHAEWIKNEEKTQTNTAQMSLTVITEQELSDILKEMHNWKSPGPDGLHSFWLKKFNCLHSNLTNEVNEILRDPESMPSFLTEGITYLLPKNHQSTDDPATYRPVTCLPTMYKLITSCITRRLYSHCERNNIIASEQKGCSRGAMGSKEQLIIDSIICNQAHKKRRNLFTAYLDYKKAFDSMPHEWLIKVLEIYKVDPRIVSFFKTVMSTWRTNIEISGTGIRTGTVSIRRGIFQGDSLSSLWFCMAINPLSTILKSSRKGFNLKGNTSNMLINHLLYVDDLKLIAANRDQLECLLRLVEMFSKDVSMNFGLDKCRSLNIAGGKIQQTPLTLSNGEEIKAMLAGDLYKYLGMKQCQRIDQRVMKDELTAELTRRMRSVLKTKLNSRNLTKAVNTYACSVLTYSFGIVKWSNTDLDRLQRKMRTLCTKANKHHPKCCVERTTIPRTQGGQGFVDIKKMAAEQINNLRNYFTDKANTSDLHKILIEADCSTPLLLSEHPHENTTQTDSDKIQRWREKPLHGRHLNEVTQEHVDIPASNYWLTSGRLFPETEGFLLAIQDQVVQTKNYQKYIMKDRSLTDDRCRYGCQTSETIQHITGGCQMFAGNEYKSRHDAVCKILHQELATQLKILQSETIPYYKYQPEVILENNLYRLYWDRTVLTNLTVANNRPDIILVKKKEKRAILIDEAIPNNNNLRQKYAEKISKYRELELQIKRQWGMSSTRTIPILISTTGIIPKSLKSNLKELDLDENLFKVMQKAVLLGTARTVRKFVGHDGHQEQPWRETLQNQLPRHQPRDPGPSNEGRTTQDPREEEHRRPQSSIPLILAIRDE

SEQ ID NO: 38 - protein, 955 aa, Propylea japonica
MLVLISNIILIIIIIIIIINGIRTIKLKSLVESIIYRNRKHSSYEEENTTVKQCIDTLKQKLSVYSERLRRYKESNRRKQDNISFENSEKNFYRHLDGKQQNSPNIYPNKDDMEKFWTEQLSTPTTYNKNAEWIKNEEKTQTNTAQMSLTVITEQELSDILKEMHNWKSPGPDGLHSFWLKKFNCLHSNLTKAVNEILQGAESMPSFLTEGITYLLPKNHQSTDDPATYRPVTCLPTMYKLITSCITRRLYSHCERNNIIASEQKGCSRGAMGSKEQLIIDSIICNQAHKKRRNLFTAYLDYKKAFDSMPHEWLIKVLEIYKVDPRIVSFLRTVMSTWRTNIEISGTGIRTGTVSIRRGIFQGDSLSSLWFCMAMNPLSTILKSSRKGFNLKGNTSNMLINHLLYVDDLKLIAANRDQLECLLRLVEMFSKDVSMNFGLDKCRSLNIAGGKIQQTPLTLSNGEEIKAMLAGDLYKYLGMKQCQRIDQRVMKDELTAEFTRRMRSVLKTKLNSRNLTKAVNTYACSVLTYSFGIVKWSNTDLDRLQRKMRTLCTKANKHHPKCCVERTTIPRTQGGQGFVDIKKMAAEQINNLRNYFIDKANTSDLHKILIEADCSTPLSLSEHPHENTTQTDSDKIQRWREKPLHGRHLNEVTQEHVDIPASNYWLTSGRLFPETEGFLLAIQDQVVQTKNYQKYIMKDRSLTDDRCRYGCQTSETIQHITGGCQMFAGNEYKSRHDAVCKILHQELAIQLKILQSETIPYYKYQPEVILENNLYRLYWDRTVLTNLTVANNRPDIILVKKKEKRAILIDVAIPNNNNLRQKYAEKISKYRELELQIKRQWGMSSTRTIPILISTTGIIPKSLKSNLKELDLDENLFKVMQKAVLLGTARTVRKFVGHDGHQEQPWRETLQNQLPRLQPRDPGPSNEGRTTQDPGEEEHRRPQSSIPLILAIRDE

SEQ ID NO: 39 - protein, 1309 aa, Propylea japonica
MEEVKLENIDICEQFMDENGIHDRKKLKILTEIGTGSPSQEFHEAEYCSKFKSENPYSRDETCFRICESIPEQERVIAIQQHGNLKQKPSTYVANQGADLKRNIDATVSEQLECDYCKYVSKRQCFLKRHIDSVHLNIKRHKCEQCEFAASQKNDLKRHIDSVHLNLKQHKCEQCEYAASQKGYLKSHIDSVHLNLKQHKCALCDYTASQKNRLKVHMDSVHLNLKQHKCEQCEYAASRKSDLKRHINSVHLDLKLHKCEQCEYTTNQKRNLNRHIDSIHLDLKQHKCALCDYTTTQKCLLKDHIDSVHLNLKEHKCEQCEYAANLKRNLKTHVDSVHSNLKQHKCALCDYTATLKGSLKVHIDSVHLNLKKHKCEQCEYAASRKSILKLHIDSVHLNLKQHKCEQCDYTASQKGNLKSHIVSVHSNLKQHKCEQCEYAANLKRNLKTHVDLVHSNLKQHKCALCDYTATLKGSLKVHIIIIIIIIIIKDEEKTQTNTEQMPLTVITPQELSDILKEMHNWKSPGPDGLHSFWLKKFNCLHSNLTKAVNEILRVPESMPSFLTEGVTYLLPKNHQSTDDPATYRPVTCLPTMYKLITSCITRRLYSHCERNNIIASEQKGCSRGAMGSKEQLIIDSIICNQAHKKRRNLFTAYLDYKKAFDSMPHEWLIKVLEIYKVDPRIVSFLKTVMSTWRTNIEISGTGIRTGTVSIKRGIFQGDSLSSLWFCMAMNPLSTILKSSRKGFNLKGNTRNMLINHLLYVDDLKLFAANRDQLECLLRLVEKFSKDVSMNFGLDKCRSLNIAGGKIQQTPLTLSNGEEIKAMLAGDLYKYLGMKQCQRIDQRVMKDELTAEFTRRMRSVLKTKLNSRNLTKAVNTYACSVLTYSFGIVKWSNTDLDHLQRKMRTLCTKANKHHPKCCVERTTIPRPQGGQGFVDIKKMAAEQLSNLRNYFVDKSNTSDLHKILIEADGSTPLLLSEHPHENTTQTDSDKIQRWREKPLHGRHLNEVTQEHVDIPASNYWLTSGRLFPETEGFLLAIQDQVVQTKNYQKYIMKDRSLTDDKCRYGCQTSETIQHITGGCQMFAGNEYKSRHDAVCKILHQELAIQLKIMQSETVPYYKYQPEVILENHHYRLYWDRTVLTNLTVANNRPDIILVKKKEKRAILIDVAIPNNNNLRQKYAEKISKYRELELQIKRQWGMSNTRTIPILISTTGVIPKSLKSNLKELDLDENLYKIMQKAVLLGTARTVRKFVGHDGHQEQPWREISQDRLAGHQARNPGQSNEGRPTQGPGEEEHRGPQSSIPLILAIRDE

SEQ ID NO: 40 - protein, 1048 aa, Propylea japonica
MHRLFSEYNGTDPLSRPTLPRIRSSKKLAVILKIMNTDVIPKFLSMATQLETIHLILYCAATTVVEVLGMKTKPRQHSNQPCPQPRLPHWQRRLEEKVQRCRQDIGRLTQYENGIRTIKLKSLVESIIYRNRKHSSYEEENTTVKQCIDTLKQKLSVYSERLRRYKESNRRKQDNISFENSEKNFYRHLDGKQQNSPNIYPNKDDMEKFWTEQLSTPTTYNKNAEWIKNEEKTQTNTAQMSLTVITEQELSDILKEMHNWKSPGPDGLHSFWLKKFNCLHSNLTKAVNEILRGPESMPSFLTEGITYLLPKNHQSTDDPATYRPVTCLPTMYKLITSCITRRLYSHCERNNIIASEQKGCSRGAMGSKEQLIIDSIICNQAHKKRRNLFTAYLDYKKAFDSMPHEWLIKVLEIYKVDPRIVSFLKTVMSTWRTNIEISGTGIRTGTVSIRRGIFQGDSLSSLWFCMAMNPLSTILKSSRKGFNLKGNTSNMLINHLLYVDDLKLIAANRDQLECLLRLVEMFSKDVSMNFGLDKCRSLNIAGGKIQQTPLTLSNGEEIKAMLAGDLYKYLGMKQCQRIDQRVMKDELTAEFTRRMRSVLKTKLNSRNLTKAVNTYACSVLTYSFGIVKWSNTDLDRLQRKMRTLCTKANKHHPKCCVERTTIPRTQGGQGFVDIKKMAAEQINNLRNYFIDKANTSDLHKILIEADCSTPLLLSEHPHENTTQTDSDKIQRWREKPLHGRHLNEVTQEHVDIPASNYWLTSGRLFPETEGFLLAIQDQVVQTKNYQKYIMKDRSLTDDRCRYGCQTSETIQHITGGCQMFAGNEYKSRHDAVCKILHQELAIQLKILQSETIPYYKYQPEVILENNLYRLYWDRTVLTNLTVANNRPDIILVKKKEKRAILIDVAIPNNNNLRQKYAEKISKYRELELQIKRQWGMSSTRTIPILISTTGIIPKSLKSNLKELDLDENLFKVMQKAVLLGTARTVRKFVGHDGHQEQPWRETLQNQLPRHQPRDPGPSNEGRTTQDPGEEEHRRPQSSIPLILAIRDE

SEQ ID NO: 41 - protein, 1289 aa, Propylea japonica
MQPIMMVQLRNRNIESLPEDRQGMSGAGAGHDSMRDVSGRVLRRRAPVIQNTTAQQEEPRRQTTAVSPPTVSATQDLQPAFTQAGLPRRRMKWTSCMNETIMRIYFKITTMGQEQTGYRQRLFNEFKRCFPDLQVTEQRIADQYRVILRNKLISEDRLQEIKNEVVNELNIEENRTREEHTTYENRDHNSETTREGITTELQLPLQENVRTNEETQTEHIPSQVNSSDDERQALVERLQSAMCRVFIEYNGTDPLSRPTLPRIRSSKKLAVILKIMNTDVIPKFISMATQLETIHLILYCAATTVVEVLGMKTKPRQHTIQPCPQPRLPHWQRRLEEKVLRCRQDIGRLTQYENGIRTIKLKSLVESIIYRNRKHSSYEEENTTVKQCIDTLKQKLSVYSERLRRYKDSNRRKQDNISFENSEKNFYRHLDGKQQNSSNIYPNKDDMEKFWTEQLSTPTSYNTNAEWIKDEEKTQTNTEQMPLTVITPQELSDILKEMHNWKSPGPDGLHSFWLKKFNCLHSSLTKAVNEILRVPESMPSFLTEGVTYLLPKNHQSTDDPATYRPVTCLPTMYKLITSCITRRLYSHCERNNIVASEQKGCSRGAMGSKEQLIIDSIICNQAHKKRRNLFTAYLDYKKAFDSMPHEWLIKVLEIYKVDPRIVSFLKTVMSTWRTNIEISGTGIRTGTVSIKRGIFQGDSLSSLWFCMAMNPLSTILKSSRKGFNLKGNTRNMLINHLLYVDDLKLFAANRDQLECLLRLVEKFSKDVSMNFGLDKCRSLNIAGGKIQQTPLTLSNGEEIKAMLAGDLYKYLGMKQCQRIDQRVMKDELTAEFTRRMRSVLKTKLNSRNLTKAVNTYACSVLTYSFGIVKWSNADLDHLQRKMRTLCTKANKHHPKCCVERTTIPRPQGGQGFVDIKKMAAEQLSNLRNYFVDKSNTSDLHKILIEADGSTPLLLSEHPHENTTQTDSDKIQRWREKPLHGRHLNEVTQEHVDIPASNYWLTSGRLFPETEGFLLAIQDQVVQTKNYQKYIMKDRSLTDDKCRYGCQTSETIQHITGGCQMFAGNEYKSRHDAVCKILHQELAIQLKIMQSETVPYYKYQPEVILENHHYRLYWDRTVLTNLTVANNRPDIILVKKKEKRAILIDVAIPNNNNLRQKYAEKISKYRELELQIKRQWGMSNTRTIPILISTTGVIPKSLKSNLKELDLDENLYKIMQKAVLLGTARTVRKFVGHDGHQEQPWREISQDRLAGHQARNPGPSNEGRPTQGPGEEEHRGPQSSIPLILAIRDE

SEQ ID NO: 42 - protein, 1296 aa, Propylea japonica
MQPIMMVQLRSRNIESLPEDRQGMSGAGAGHDSMRDVSGRALRRRAPVIQNTTAQQEEPRRQTTAVPPPTNSATQDLQPAFTQAGLPRRRMKWTSCINETIMRIYYKITNLGQELTGYRQRLFNEFKRCFPDLQVTEQRIADQYRVILRNKLISEDRLQEIKNEVVNELNNEENHNREEHTTSGNREHNHGATHEERTTELQLPLQEDIQTDDETQNEHSSPQVHTSVETAHKISNEERQALVERLESAMHRLFTEYNGTDPLSRPTLPRIRSSKKLAVILKIMNTDVIPKFLSMATQLETIHLILYCAATTVVEVLGMKTKPRHSNQPCPQPRLPHWQRRLEEKVQRSRQDIGRLTQYENGIRTIKLKSLVESIIYRNRKHSSYEEENTTVKQCIDTLKQKLSVYSERLRRYKESNRRKQDNISFENSEKNFYRHLDGKQQNSPNIYPNKDDMEKFWTEQLSTPTTYNKNAEWIKNEEKTQTNTAQMSLTVITEQELSDILKEMHNWKSPGPDGLHSFWLKKFNCLHSNLTNAVNEILRDPESMPSFLTEGITYLLPKNHQSTDDPATYRPVTCLPTMYKLITSCITRRLYSHCERNNIIASEQKGCSRGAMGSKEQLIIDSIICNQAHKKRRNLFTAYLDYKKAFDSMPHEWLIKVLEIYKVDPRIVSFLKTVMSTWRTNIEISGTGIRTGTVSIRRGIFQGDSLSSLWFCMAMNPLSTILKSSRKGFNLKGNTSNMLINHLLYVDDLKLIAANRDQLECLLRLVEMFSKDVSMNFGLDKCRSLNIAGGKIQQTPLTLSNGEEIKAMLAGDLYKYLGMKQCQRIDQRVMKDELTAEFTRRMRSVLKTKLNSRNLTKAVNTYACSVLTYSFGIVKWSNTDLDRLQRKMRTLCTKANKHHPKCCVERTTIPRTQGGQGFVDIKKMAAEQINNLRNYFTDKANTSDLHKILIEADCSTPLLLSEHPHENTTQTDSDKIQRWREKPLHGRHLNEVTQEHVDIPASNYWLTSGRLFPETEGFLLAIQDQVVQTKNYQKYIMKDRSLTDDRCRYGCQTSETIQHITGGCQMFAGNEYKSRHDAVCKILHQELAIQLKILQSETIPYYKYQPEVILENNLYRLYWDRTVLTNLTVANNRPDIILVKKKEKRAILIDVAIPNNNNLRQKYAEKISKYRELELQIKRQWGMSSTRTIPILISTTGIIPKSLKSNLKELDLDENLFKVMQKAVLLGTARTVRKFVGHDGHQEQPWRETLQNQLPRHQPRDPGPSNEGRTTQDPGEEEHRRPQSSIPLILAIRDE

SEQ ID NO: 43 - protein, 1293 aa, Propylea japonica
MMVQLRSRNIESLPEDRQGMSGAGAGHDSMRDVSGRALRRRAPVIQNTTAQQEEPRRQTTAVPPPTNSATQDLQPAFTQAGLPRRRMKWTSCINETIMRIYYKITNLGQELTGYRQRLFNEFKLCFPDLQVTEQRIADQYRVILRNKLISEDRLQEIKNEVVNELNNEENHNREEHTTSGNREHNHGATHEERTTELQLPLQEDIQTDDETQNEHSSPQVHTSVETAHKISNKERQALVERLESAMHRLFSEYNNTDPLSRPTLPRIRSSKKLAVILKIMNTDVIPKFLSMATQLETIHLILYCAATTVVEVLGMKTKPRQHSDQPCPQPRLPHWERRLEEKVQRCRQDIGRLTQYENGIRTIKLKSLVESIIYRNRKHSSYEEENTTVKQCIDTLKQKLSVYSERLRRYKESNRRKQDNISFENSEKNFYRHLDGKQQNSPNIYPNKDDMEKFWTEQLSTPTTYNKNAEWIKNEEKTQTNTAQMSLTVITEQELSDILKEMHNWKSPGPDGLHSFWLKKFNCLHSNLTKAVNEILRGAESMPSFLTEGITYLLPKNYQSTDDPATYRPVTCLPTMYKLITSCITRRLYSHCERNNIIASEQKGCSRGAMGSKEQLIIDSIICNQAYKKRRNLFTAYLDYKKAFDSMPHEWLIKVLEIYKVDPRIVSFLKTVMSTWRTNIEISGTGIRTGTVSIRRGIFQGDSLSSLWFCMAMNPLSTILKSSRKGFNLKGNTSNMLINHLLYVDDLKLIAANRDQLECLLRLVEMFSKDVSMNFGLDKCRSLNIAGGKIQQTPLTLSNGEEIKAMLAGDLYKYLGMKQCQRIDQRVMKDELTAEFTRRMRSVLKTKLNSRNLTKAVNTYACSVLTYSFGIVKWSNTDLDRLQRKMRTLCTKANKHHPKCCVERTTIPRTQGGQGFVDIKKMAAEQINNLRNCFIDKANTSDLHKILIEADCSTPLLLSEHPHENTTQTDSDKIQRWREKPLHGRHLNEVTQEHVDIPASNYWLTSGRLFPETEGFLLAIQDQVVQTKNYQKYIMKDRSLTDDRCRYGCQTSETIQHITGGCQMFAGNEYKSRHDAVCKILHQELAIQLKILQSETIPYYKYQPEVILENNLYRLYWDRTVLTNLTVANNRPDIILVKKKEKRAILIDVAIPNNNNLRQKYAEKISKYRELELQIKRQWGMSSTRTIPILISTTGIIPKSLKSNLKELDLDENLFKVMQKAVLLGTARTVRKFVGHDGHQEQPWRETLQNQLPRHQPRDPGPSNEGRTTQDPGEEEHRRPQSSIPLILAIRDE

SEQ ID NO: 44 - protein, 1289 aa, Propylea japonica
MQPIMMVQLRSRNIESLPEDRQGMSGAGAGNDSMRDVSGRALRRRAPVIQNTTAQQEEPRRQTTAVSPPTNSATQDLQPAFTQAGLPRRRMKWTSCINETIMRIYYKITNLGQELTGYRQRLFNEFKRCFPDLQVTEQRIADQYRVILRNKLISEDRLQEIKNEVVNELNNEENHNREEHTTSGNREHNHGATHEERTTELQLPLQEDIQTDDETQNEHSSPQVHTSVETAHKISNEERQALVERLESAMHRLFTEYNGTDPLSRPTLPRIRSSKKLAVILKIMNTDVIPKFLSMATQLETIHLILYCAATTVVEVLGMKTKPRQHSNQPCLQPRLPHWQRRLEEKVQRCRQDIGRLTQYENGIRTIKLKSLVESIIYRNRKHSSYEEENTTVKQCIDTLKQKPSVYSERLRRYKESNRRKQDNISFENSEKNFYRHLDGKQQNSPNIYPNKDDMEKFWTEQLSTPTTYNKNAEWIKNEEKTQTNTAQMSLTVITEQELSDILKEMHNWKSPGPDGLHSFWLKKFNCLHSNLTNAVNEILRDPESMPSFLTEGITYLLPKNHQSTDDPATYRPVTCLPTMYKLITSCITRRLYSHCERNNIIASEQKGCSRGAMGSKEQLIIDSIICNQAHKKRRNLFTAYLDYKKAFDSMPHEWLIKVLEIYKVDPRIVSFLKTVMSTWRTNIEISGTGIRTGTVSIRRGIFQGDSLSSLWFCMAMNPLSTILKSSRKGFNLKGNTSNMLINHLLYVDDLKLIAANRDQLECLLRLVEMFSKDVSMNFGLDKCRSLNIAGGKIQQTPLTLSNGEEIKAMLAGDLYKYLGMKQCQRIDQRVMKDELTAEFTRRMRSVLKTKLNSRNLTKAVNTYACSVLTYSFGIVKWSNTDLDRLQRKMRTLCTKANKHHPKCCVERTTIPRTQGGQGFVDIKKMAAEQINNLRNYFTDKANTSDLHKILIEADCSTPLLLSEHPHENTTQTDSDKIQRWREKPLHGRHLNEVTQEHVDIPASNYWLTSGRLFPETEGFLLAIQDQVVQTKNYQKYIMKDRSLTDDRCRYGCQTSETIQHITGGCQMFAGNEYKSRHDAVCKILHQELAIQLKILQSETIPYYKYQPEVILENNLYRLYWDRTVLTNLTVANNRPDIILVKKKEKRAILIDVAIPNNNNLRQKYAEKISKYRELELQIKRQWGMSSTRTIPILISTTGIIPKSLKSNLKELDLDENLFKVMQKAVLLGTARTVRKFVGHDGHQEQPWRETLQNQLPRHQPRDPGPSNEGRTTQDPGEEEHRRPQSSIP

SEQ ID NO: 45 - protein, 937 aa, Propylea japonica
MSSEFSFPKVRRVGPKVPVIIIIISYEEENTTVKQCIDTLKQKLSVYSERLRRYKESNRRKQDNISFENSEKNFYRHLDGKQQNSPNIYPNKDDMEKFWTEQLSTPTTYNKNAEWIKNEEKTQTNTAKMSLTVITEQELSDILKEMHNWKSPGPDGLHSFWLKKFNCLHSNLTNAVNEILRGPESMPSFLTEGITYLLPKNHQSTDDPATYRPVTCLPTMYKLITSCITRRLYSHCERNNIIASEQKGCSRGAMGSKEQLIIDSIICNQAHKKRRNLFTAYLDYKKAFDSMPHEWLIKVLEIYKVDPRIVSFLKTVMSTWRTNIEISGTGIRTGTVSIRRGIFQGDSLSSLWFCMAMNPLSTILKSSRKGFNLKGNTSNMLINHLLYVDDLKLIAANRDQLECLLRLVEMFSKDVSMNFGLDKCRSLNIAGGKIQQTPLTLSNGEEIKAMLAGDLYKYLGMKQCQRIDQRVMKDELTAEFTRRMRSVLKTKLNSRNLTKAVNTYACSVLTYSFGIVKWSNTDLDRLQRKMRTLCTKANKHHPKCCVERTTIPRTQGGQGFVDIKKMAAEQINNLRNYFIDKANTSDLHKILIEADCSTPLSLSEHPHENTTQTDSDKIQRWREKPLHGRHLNEVTQEHVDIPASNYWLTSGRLFPETEGFLLAIQDQVVQTKNYQKYIMKDRSLTDDRCRYGCQTSETIQHITGGCQMFAGNEYKSRHDAVCKILHQELAIQLKILQSETIPYYKYQPEVILENNLYRLYWDRTVLTNLTVANNRPDIILVKKKEKRAILIDVAIPNNNNLRQKYAEKISKYRELELQIKRQWGMSSTRTIPILISTTGIIPKSLKSNLKELDLDENLFKVMQKAVLLGTARTVRKFVGHDGHQEQPWRETLQNQLPRLQPRDPGPSNEGRTTQDPGEEEHRRPQSSIPLILAIRDE

SEQ ID NO: 46 - protein, 1205 aa, Propylea japonica
MQPIMMVQLRSRNIESLPEDRQGMSGAGAGHDSMRDVSGRALRRRAPVIQNTTAQQEEPRRQTTAVPPPTNSATQDLQPAFTQAGLPRRRMKWTSCINETIMRIYYKITNLGQELTGYRQRLFNEFKRCFPDLQVTEQRIADQYRVILRNKLISEDRLQEIKNEVVNELNNEENHNREEHTTSGNREHNHGATHEERTTELQLPLQEDIQTDDETQNEHSSPQVHTSVETAHKISNEERQALVERLESAMHRLFTEYNGTDPLSRPTLPRIRSSKKLAVILKIMNTDVIPKFLSMATQLETIHLILYCAATTVVEVLGMKTKPRQHSNQPCPQPRLPHWQRRLEEKVQRCRQDIGRLTQYENGIRTIKLKSLVESIIYRNRKHSSYEEENTTVKQCIDTLKQKLSVYSERLRRYKESNRRKQDNISFENSEKNFYRHLDGKQQNSPNIYPNKDDMEKFWTEQLSTPTTYNKNAEWIKNEEKTQTNTAQMSLTVITEQELSDILKEMHNWKSPGPDGLHSFWLKKFNCLHSNLTKAVNEILRGPESMPSFLTEGITYLLPKNHQSTDDPATYRPVTCLPTMYKLITSCITRRLYSHCERNNIIASEQKGCSRGAMGSKEQLIIDSIICNQAHKKRRNLFTAYLDYKKAFDSMPHEWLIKVLEIYKVDPRIVSFLKTVMSTWRTNIEISGTGIRTGTVSIRRGIFQGDSLSSLWFCMAMNPLSTILKSSRKGFNLKGNTSNMLINHLLYVDDLKLIAANRDQLECLLRLVEMFSKDVSMNFGLDKCRSLNIAGGKIQQTPLTLSNGEEIKAMLAGDLYKYLGMKQCQRIDQRVMKDELTAEFTRRMRSVLKTKLNSRNLTKAVNTYACSVLTYSFGIVKWSNTDLDRLQRKMRTLCTKANKHHPKCCVERTTIPRTQGGQGFVDIKKMAAEQINNLRNYFIDKANTSDLHKILIEADCSTPLLLSEHPHENTTQTDSDKIQRWREKPLHGRHLNEVTQEHVDIPASNYWLTSGRLFPETEGFLLAIQDQVVQTKNYQKYIMKDRSLTDDRCRYGCQTSETIQHITGGCQMFAGNEYKSRHDAVCKILHQELAIQLKILQSETIPYYKYQPEVILENNLYRLLTNLTVANNRPDIILVKKKEKRAILIDVAIPNNNNLRQKMLKKYRNIESLNFRLKGSGECLVPEPFPFSYQPQELFLRASSPTSRS

SEQ ID NO: 47 - protein, 1129 aa, Propylea japonica
MRIYYKITNLGQELTGYRQRLFNEFKRCFPDLQVTEQRIADQYRVILRNKLISEDRLQEIKNEVVNELNNEENHNREEHTTSGNREHNHGATHEERTTELQLPLQEDIQTDDETQNEHSSPQVHTSVETAHKISNEERQALVERLESAMHRLFTEYNGTDPLSRPTLPRIRSSKKLAVILKIMNTDVIPKFLSMATQLETIHLILYCAATTVVEVLGMKTKPRQHSNQPCPQPRLPHWQRRLEEKVQRSRQDIGRLTQYENGIRTIKLKSLVESIIYRNRKHSSYEEENTTVKQCIDTLKQKLSVYSERLRRYKESNRRKQDNISFENSEKNFYRHLDGKQQNSPNIYPNKDDMEKFWTEQLSTPTTYNKNAEWIKNEEKTQTNTAQMSLTVITEQELSDILKEMHNWKSPGPDGLHSFWLKKFNCLHSNLTNAVNEILRDPESMPSFLTEGITYLLPKNHQSTDDPATYRPVTCLPTMYKLITSCITRRLYSHCERNNIIASEQKGCSRGAMGSKEQLIIDSIICNQAHKKRRNLFTAYLDYKKAFDSMPHEWLIKVLEIYKVDPRIVSFLKTVMSTWRTNIEISGTGIRTGTVSIRRGIFQGDSLSSLWFCMAMNPLSTILKSSRKGFNLKGNTSNMLINHLLYVDDLKLIAANRDQLECLLRLVEMFSKDVSMNFGLDKCRSLNIAGGKIQQTPLTLSNGEEIKAMLAGDLYKYLGMKQCQRIDQRVMKDELTAEFTRRMRSVLKTKLNSRNLTKAVNTYACSVLTYSFGIVKWSNTDLDRPQRKMRTLCTKANKHHPKCCVERTTIPRTQGGQGFVDIKKMAAEQINNLRNYFTDKANTSDLHKILIEADCSTPLLLSEHPHENTTQTDSDKIQRWREKPLHGRHLNEVTQEHVDIPASNYWLTSGRLFPETEGFLLAIQDQVVQTKNYQKYIMKDRSLTDDRCRYGCQTSETIQHIAGGCQMFAGNEYKSRHDAVCKILHQELAIQLKILQSGTIPYYKYQPEVILENNLYRLYWDRTVLTNLTVANNRPDIILVKKKRREQYVAIPNNNNLRQKYAEKISKYRELELQIKRQWGMSSTRTIPILISTTGIIPKSLKSNLKELDLDENLFKVMQKAVLLGTLER

SEQ ID NO: 48 - protein, 901 aa, Propylea japonica
MRRLFTEYNGTDPLSRPTLPRIRSSKKLAIILKIMNTDVIPKFLSMATQLETIHLIFYCAATTVVEVLGMKTKPRQHSNQPCPQPRLPHWQRRLEEKVQRCRQDIGRLTQYENGIRTIKLKSLVESIIYRNRKHSSYEEENTTVKQCIDTLKQKLSVYSERLRRYKESNRRKQDNISFENSEKNFYRHLDGKQQNSPNIYPNKDDMEKFWTEQLSTPTTYNKNAEWIKNEEKTQTNTAQMSLTVITEQELSDILKEMHNWKSPGPDGLHSFWLKKFNCLHSNLTNAVNEILRDPESMPSFLTEGITYLLPKNHQSTDDPATYRPVTCLPTMYKLITSCITRRLYSHCERNNIIASEQKGCSRGAMGSKEQLIIDSIICNQAHKKRRNLFTAYLDYKKAFDSMPHEWLIKVLEIYKVDPRIVSFLKTVMSTWRTNIEISGTGIRTGTVSIRRGIFQGDSLSSLWFCMAMNPLSTILKSSRKGFNLKGNTSNMLINHLLYVDDLKLIAANRDQLECLLRLVEMFSKDVSMNFGLDKCRSLNIAGGKIQQTPLTLSNGEEIKAMLAGDLYKYLGMKQCQRIDQRVMKDELTAEFTRRMRSVLKTKLNSRNLTKAVNTYACSVLTYSFGIVKWSNTDLDRLQRKMRTLCTKANKHHPKCCVERTTIPRTQGGQGFVDIKKMAAEQINNLRNYFTDKANTSDLHKILIEADCSTPLLLSEHPHENTTQTDSDKIQRWREKPLHGRHLNEVTQEHVDIPASNYWLTSGRLFPETEGFLLAIQDQVVQTKNYQKYIMKDRSLTDDRCRYGCQTSETIQHITGGCQMFAGNEYKSRHDAVCKILHQELAIQLKILQSETIPYYKYQPEVILENNLYRLYWDRTVLTNLTVANNRPDIILVKKKRREQYL

SEQ ID NO: 49 - protein, 1297 aa, Propylea japonica
MQPIMMVQLRSRNIESLPEDRQGMSGAGAGHDSMRDVSGRALRRRAPVIQNTTAQQEEPRRQTTAVPPPTNSATQDLQPAFTQAGLPRRRMKWTSCINETIMRIYYKITNLGQELTGYRQRLFNEFKRCFPDLQVTEQRIADQYRVILRNKLISEDRLQEIKNEVVNELNNEENHNREEHTTSGNREHNHGATHEERTTELQLPLQEDIQTDDETQNEHSSPQVHTSVETAHKISNEERQALVERLESAMHRLFTEYNGTDPLSRPTLPRIRSSKKLAVILKIMNTDVIPKFLSMATQLETIHLILYCAATTVVEVLGMKTKPRQHSNQPCPQPRLPHWQRRLEEKVQRCRQDIGRLTQYENGIRTIKLKSLVESIIYRNRKHSSYEEENTTVKQCIDTLKQKLSVYSERLRRYKESNRRKQDNISFENSEKNFYRHLDGKQQNSPNIYPNKDDMEKFWTEQLSTPTTYNKNAEWIKNEEKTQTNTAQMSLTVITEQELSDILKEMHNWKSPGPDGLHSFWLKKFNCLHSNLTNAVNEILRDPESMPSFLTEGITYLLPKNHQSTDDPATYRPVTCLPTMYKLITSCITRRLYSHCERNNIIASEQKGCSRGAMGSKEQLIIDSIICNQAHKKRRNLFTAYLDYKKAFDSMPHEWLIKVLEIYKVDPRIVSFLKTVMSTWRTNIEISGTGIRTGTVSIRRGIFQGDSLSSLWFCMAMNPLSTILKSSRKGFNLKGNTSNMLINHLLYVDDLKLIAANRDQLECLLRLVEMFSKDVSMNFGLDKCRSLNIAGGKIQQTPLTLSNGEEIKAMLAGDLYKYLGMKQCQRIDQRVMKDELTAEFTRRMRSVLKTKLNSRNLTKAVNTYACSVLTYSFGIVKWSNTDLDRLQRKMRTLCTKANKHHPKCCVERTTIPRTQGGQGFVDIKKMAAEQINNLRNYFTDKANTSDLHKILIEADCSTPLLLSEHPHENTTQTDSDKIQRWREKPLHGRHLNEVTQEHVDIPASNYWLTSGRLFPETEGFLLAIQDQVVQTKNYQKYIMKDRSLTDDRCRYGCQTSETIQHITGGCQMFAGNEYKSRHDAVCKILHQELAIQLKILQSETIPYYKYQPEVILENNLYRLYWDRTVLTNLTVANNRPDIILVKKKEKRAILIDVAIPNNNNLRQKYAEKISKYRELELQIKRQWGMSSTRTIPILISTTGIIPKSLKSNLKELDLDENLFKVMQKAVLLGTARTVRKFVGHDGHQEQPWRETLQNQLPRHQPRDPGPSNEGRTTQDPGEEEHRRPQSSIPLILAIRDE

SEQ ID NO: 50 - protein, 1048 aa, Propylea japonica
MHRLFSEYNGTDPLSRPTLPRIRSSKKLAVILKIMNTDVIPKFLSMATQLETIHLILYCAATTVVEVLGMKTKPRQHSNQPCPQPRLPHWQRRLEEKVQRCRQDIGRLTQYENGIRTIKLKSLVESIIYRNRKHSSYEEENTTVKQCIDTLKQKLSVYSERLRRYKESNRRKQDNISFENSEKNFYRHLDGKQQNSPNIYPNKDDMEKFWTEQLSTPTTYNKNAEWIKNEEKTQTNTAQMSLTVITEQELSDILKEMHNWKSPGPDGLHSFWLKKFNCLHSNLTKAVNEILRGPESMPSFLTEGITYLLPKNHQSTDDPATYRPVTCLPTMYKLITSCITRRLYSHCERNNIIASEQKGCSRGAMGSKEQLIIDSIICNQAHKKRRNLFTAYLDYKKAFDSMPHEWLIKVLEIYKVDPRIVSFLKTVMSTWRTNIEISGTGIRTGTVSIRRGIFQGDSLSSLWFCMAMNPLSTILKSSRKGFNLKGNTSNMLINHLLYVDDLKLIAANRDQLECLLRLVEMFSKDVSMNFGLDKCRSLNIAGGKIQQTPLTLSNGEEIKAMLAGDLYKYLGMKQCQRIDQRVMKDELTAEFTRRMRSVLKTKLNSRNLTKAVNTYACSVLTYSFGIVKWSNTDLDRLQRKMRTLCTKANKHHPKCCVERTTIPRTQGGQGFVDIKKMAAEQINNLRNYFIDKANTSDLHKILIEADCSTPLLLSEHPHENTTQTDSDKIQRWREKPLHGRHLNEVTQEHVDIPASNYWLTSGRLFPETEGFLLAIQDQVVQTKNYQKYIMKDRSLTDDRCRYGCQTSETIQHITGGCQMFAGNEYKSRHDAVCKILHQELAIQLKILQSETIPYYKYQPEVILENNLYRLYWDRTVLTNLTVANNRPDIILVKKKEKRAILIDVAIPNNNNLRQKYAEKISKYRELELQIKRQWGMSSTRTIPILISTTGIIPKSLKSNLKELDLDENLFKVMQKAVLLGTARTVRKFVGHDGHQEQPWRETLQNQLPRHQPRDPGPSNEGRTTQGPGEEEHRRPQSSIPLILAIRDE

SEQ ID NO: 51 - protein, 1297 aa, Propylea japonica
MQPIMMVQLRSRNIESLPEDRQGMSGAGAGHDSMRDVSGRALRRRAPVIQNTTAQQEEPRRQTTAVPPPTNSATQDLQPAFTQAGLPRRRMKWTSCINETIMRIYYKITNLGQELTGYRQRLFNEFKRCFPDLQVTEQRIADQYRVILRNKLISEDRLQEIKNEVVNELNNEEDHNREEHTISGNREHNHGATHEERTTELQLPLQDNIQTDDETQNEHSTPQVHTSVETAHKISNEERQALVERLESAMHRLFSEYNGTDPLSRPTLPRIRSSKKLAVILKIMNTDVIPKFLSMATQLETIHLILYCAATTVVEVLGMKTKPRLHSNQPCPQPRLPHWQRRLEEKVQRCRQDIGRLTQYENGIRTIKLKSLVESIIYRNRKHSSYEEENTTVKQCIDTLKQKLSVYSERLRRYKESNRRKQDNISFENSEKNFYRNLDGKQQNSPNIYPNKDDMEKFWTEQLSTPTTYNKNAEWIKNEEKTQTNTAQMSLTVITEQELSDILKEMHNWKSPGPDGLHSFWLKKFNCLHSNLTKAVNEILRGPESMPSFLTKGITYLLPKNHQSTDDPATYRPVTCLPTMYKLITSCITRRLYSHCERNNIIASEQKGCSRGAMGSKEQLIIDSIICNQAHKKRRNLFTAYLDYKKAFDSMPHDWLIKVLEIYKVDPRIVSFLKTVMSTWRTNIEISGTGIRTGTVSIRRGIFQGDSLSSLWFCMAMNPLSTILKSSRKGFNLKGNTSNMLINHLLYVDDLKLIAANRDQLECLLRLVEMFSKDVSMNFGLDKCRSLNIAGGKIQQTPLTLSNGEEIKAMLAGDLYKYLGMKQCQRIDQRVMKDELTAEFTRRMRSVLKTKLNSRNLTKAVNTYACSVLTYSFGIVKWSNTDLDRLQRKMRTLCTKANKHHPKCCVERTTIPRTQGGQGFVDIKKMAAEQINNLRNYFIDKANTSDLHKILIEADCSTPLLLSEHPHENTTQTDSDKIQRWREKPLHGRHLNEVTQEHVDIPASNYWLTSGRLFPETEGFLLAIQDQVVQTKNYQKYIMKDRSLTDDRCRYGCQTSETIQHITGGCQMFAGNEYKSRHDAVCKILHQELAIQLKILQSETIPYYKYQPEVILENNLYRLYWDRTVLTNLTVANNRPDIILVKKKEKRAILIDVAIPNNNNLRQKYAEKISKYRELELQIKRQWGMSSTRTIPILISTTGIIPKSLKSNLKELDLDENLFKVMQKAVLLGTARTVRKFVGHDGHQEQPWRETLQNQLPRHQPRDPGPSNEGRTTQDPGEEEHRRPQSSIPLILAIRDE

SEQ ID NO: 52 - protein, 962 aa, Propylea japonica
MHRLFSEYNGTDPLSRPTLPRIRSSKKLAVILKIMNTDVIPKFLSMATQLETIHLILYCAATTVVEVLGMKTKPRQHSNQPCPQPRLPHWQRRLEEKVQRCRQDIGRLTQYENGIRTIKLKSLVESIIYRNRKHSSYEEENTTVKQCIDTLKQKLSVYSERLRRYKESNRRKQDNISFENSEKNFYRHLDGKQQNSPNIYPNKDDMEKFWTEQLSTPTTYNKNAEWIKNEEKTQTNTAQMSLTVITEQELSDILKEMHNWKSPGPDGLHSFWLKKFNCLHSNLTKAVNEILRGPESMPSFLTEGITYLLPKNHQSTDDPATYRPVTCLPTMYKLITSCITRRLYSHCERNNIIASEQKGCSRGAMGSKEQLIIDSIICNQAHKKRRNLFTAYLDYKKAFDSMPHEWLIKVLEIYKVDPRIVSFLKTVMSTWRTNIEISGTGIRTGTVSIRRGIFQGDSLSSLWFCMAMNPLSTILKSSRKGFNLKGNTSNMLINHLLYVDDLKLIAANRDQLECLLRLVEMFSKDVSMNFGLDKCRSLNIAGGKIQQTPLTLSNGEEIKAMLAGDLYKYLGMKQCQRIDQRVMKDELTAEFTRRMRSVLKTKLNSRNLTKAVNTYACSVLTYSFGIVKWSNTDLDRLQRKMRTLCTKANKHHPKCCVERTTIPRTQGGQGFVDIKKMAAEQINNLRNYFIDKANTSDLHKILIEADCSTPLLLSEHPHENTTQTDSDKIQRWREKPLHGRHLNEVTQEHVDIPASNYWLTSGRLFPETEGFLLAIQDQVVQTKNYQKYIMKDRSLTDDRCRYGCQTSETIQHITGGCQMFAGNEYKSRHDAVCKILHQELAIQLKILQSETIPYYKYQPEVILENNLYRLYWDRTVLTNLTVANNRPDIILVKKKEKRAILIDVAIPNNNNLRQKYAEKYRNIESLNFRLKGSGECLVPEPFPFSYQPQELFLRASSPTSRS

SEQ ID NO: 53 - protein, 1289 aa, Propylea japonica
MQPIMMVQLRNRNIESLPEDRQGMSGAGAGHDSMRDVSGRVLRRRAPVIQNTTAQQEEPRRQTTAVSPPTVSATQDLQPAFTQAGLPRRRMKWTSCMNETIMRIYFKITTMGQEQTGYRQRLFNEFKRCFPDLQVTEQRIADQYRVILRNKLISEDRLQEIKNEVVNELNIEENRTREEHTTYENRDHNSETTREGITTELQLPLQENVRTNEETQTEHIPSQVNSSDDERQALVERLQSAMCRVFIEYNGTDPLSRPTLPRIRSSKKLAVILKIMNTDVIPKFISMATQLETIHLILYCAATTVVEVLGMKTKPRQHTIQPCPQPRLPHWQRRLEEKVQRCRQDIGRLTQYENGIRTIKLKSLVESIIYRNRKHSSYEEENTTVKQCIDTLKQKLSVYSERLRRYKDSNRRKQDNISFENSEKNFYRHLDGKQQNSSNIYPNKDDMEKFWTEQLSTPTSYNTNAEWIKDEEKTQTNTEQMPLTVITPQELSDILKEMHNWKSPGPDGLHSFWLKKFNCLHSSLTKAVNEILRVPESMPSFLTEGVTYLLPKNHQSTDDPATYRPVTCLPTMYKLITSCITRRLYSHCERNNIIASEQKGCSRGAMGSKEQLIIDSIICNQAHKKRRNLFTAYLDYKKAFDSMPHEWLIKVLEIYKVDPRIVSFLKTVMSTWRTNIEISGTGIRTGTVSIKRGIFQGDSLSSLWFCMAMNPLSTILKSSRKGFNLKGNTRNMLINHLLYVDDLKLFAANRDQLECLLRLVEKFSKDVSMNFGLDKCRSLNIAGGKIQQTPLTLSNGEEIKAMLAGDLYKYLGMKQCQRIDQRVMKDELTAEFTRRMRSVLKTKLNSRNLTKAVNTYACSVLTYSFGIVKWSNTDLDHLQRKMRTLCTKANKHHPKCCVERTTIPRPQGGQGFVDIKKMAAEQLSNLRNYFVDKSNTSDLHKILIEADGSTPLLLSEHPHENTTQTDSDKIQRWREKPLHGRHLNEVTQEHVDIPASNYWLTSGRLFPETEGFLLAIQDQVVQTKNYQKYIMKDRSLTDDKCRYGCQTSETIQHITGGCQMFAGNEYKSRHDAVCKILHQELAIQLKIMQSETVPYYKYQPEVILENHHYRLYWDRTVLTNLTVANNRPDIILVKKKEKRAILIDVAIPNNNNLRQKYAEKISKYRELELQIKRQWGMSNTRTIPILISTTGVIPKSLKSNLKELDLDENLYKIMQKAVLLGTARTVRKFVGHDGHQEQPWREISQDRLAGHQARNPGPSNEGRPTQGPGEEEHRGPQSSIPLILAIRDE

SEQ ID NO: 54 - protein, 979 aa, Propylea japonica
MKTKPRQHTIQPCPQPRLPHWQRRLEEKVQRCRQDIGRLTQYENGIRTIKLKSLVESIIYRNRKHSSYEEENTTVKQCIDTLKQKLSVYSERLRRYKDSNRRKQDNISFENSEKNFYRHLDGKQQNSSNIYPNKDDMEKFWTEQLSTPTSYNTNAEWIKDEEKTQTNTEQMPLTVITPQELSDILKEMHNWKSPGPDGLHSFWLKKFNCLHSSLTKAVNEILRVPESMPSFLTEGVTYLLPKNHQSTDDPATYRPVTCLPTMYKLITSCITRRLYSHCERNNIIASEQKGCSRGAMGSKEQLIIDSIICNQAHKKRRNLFTAYLDYKKAFDSMPHEWLIKVLEIYKVDPRIVSFLKTVMSTWRTNIEISGTGIRTGTVSIKRGIFQGDSLSSLWFCMAMNPLSTILKSSRKGFNLKGNTRNMLINHLLYVDDLKLFAANRDQLECLLRLVEKFSKDVSMNFGLDKCRSLNIAGGKIQQTPLTLSNGEEIKAMLAGDLYKYLGMKQCQRIDQRVMKDELTAEFTRRMRSVLKTKLNSRNLTKAVNTYACSVLTYSFGIVKWSNTDLDHLQRKMRTLCTKANKHHPKCCVERTTIPRPQGGQGFVDIKKMAAEQLSNLRNYFVDKSNTSDLHKILIEADGSTPLLLSEHPHENTTQTDSDKIQRWREKPLHGRHLNEVTQEHVDIPASNYWLTSGRLFPETEGFLLAIQDQVVQTKNYQKYIMKDRSLTDDKCRYGCQTSETIQHITGGCQMFAGNEYKSRHDAVCKILHQELAIQLKIMQSETVPYYKYQPEVILENHHYRLYWDRTVLTNLTVANNRPDIILVKKKEKRAILIDVAIPNNNNLRQKYAEKISKYRELELQIKRQWGMSNTRTIPILISTTGVIPKSLKSNLKELDLDENLYKIMQKAVLLGTARTVRKFVGHDGHQEQPWREISQDRLAGHQARNPGPSNEGRPTQGPGEEEHRRPQSSIPLILAIRDE

SEQ ID NO: 55 - protein, 843 aa, Propylea japonica
MEKFWTEQLSTPTSYNTNAEWIKDEEKTQTNTEQMPLTVITPQELSDILKEMHNWKSPGPDGLHSFWLKKFNCLHSSLTKAVNEILRVPESMPSFLTEGVTYLLPKNHQSTDDPATYRPVTCLPTMYKLITSCITRRLYSHCERNNIIASEQKGCSRGAMGSKEQLIIDSIICNQAHKKRRNLFTAYLDYKKAFDSMPHEWLIKVLEIYKVDPRIVSFLKTVMSTWRTNIEISGTGIRTGTVSIKRGIFQGDSLSSLWFCMAMNPLSTILKSSRKGFNLKGNTRNMLINHLLYVDDLKLFAANRDQLECLLRLVEKFSKDVSMNFGLDKCRSLNIAGGKIQQTPLTLSNGEEIKAMLAGDLYKYLGMKQCQRIDQRVMKDELTAEFTRRMRSVLKTKLNSRNLTKAVNTYACSVLTYSFGIVKWSNTDLDHLQRKMRTLCTKANKHHPKCCVERTTIPRPQGGQGFVDIKKMAAEQLSNLRNYFVDKSNTSDLHKILIEADGSTPLLLSEHPHENTTQTDSDKIQRWREKPLHGRHLNEVTQEHVDIPASNYWLTSGRLFPETEGFLLAIQDQVVQTKNYQKYIMKDRSLTDYKCRYGCQTSETIQHITGGCQMFAGNEYKSRHDAVCKILHQELAIQLKIMQSETVPYYKYQPEVILENHHYRLYWDRTVLTNLTVANNRPDIILVKKKEKRAILIDVAIPNNNNLRQKYAEKISKYRELELQIKRQWGMSNTRTIPILISTTGVIPKSLKSNLKELDLDENLYKIMQKAVLLGTARTVRKFVGHDGHQEQPWREISQDRLAGHQARNPGPSNEGRPTQGPGEEEHRGPQSSIPLILAIRDE

SEQ ID NO: 56 - protein, 961 aa, Propylea japonica
MHRLFSEYNGTDPLSRPTLPRIRSSKKLAVILKIMNTDVIPKFLSMATQLETIHLILYCAATTVVEVLGMKTKPRQHSNQPCPQPRLPHWQRRLEEKVQRCRQDIGRLTQYENGIRTIKLKSLVESIIYRNRKHSSYEEENTTVKQCIDTLKQKLSVYSERLRRYKESNRRKQDNISFENSEKNFYRHLDGKQQNSPNIYPNKDDMEKFWTEQLSTPTTYNKNAEWIKNEEKTQTNTAQMSLTVITKQELSDILKEMHNWKSPGPDGHSFWLKKFNCLHSNLTRAVNEILRGPESMPSFLTEGITYLLPKNHQSTDDPATYRPVTCLPTMYKLITSCITRRLYSHCERNNIIASEQKGCSRGAMGSKEQLIIDSIICNQAHKKRRNLFTAYLDYKKAFDSMPHEWLIKVLEIYKVDPRIVSFLKTVMSTWRTNIEISGTGIRTGTVSIRRGIFQGDSLSSLWFCMAMNPLSTILKSSRKGFNLKGNTSNMLINHLLYVDDLKLIAANRDQLECLLRLVEMFSKDVSMNFGLDKCRSLNIAGGKIQQTPLTLSNGEEIKAMLAGDLYKYLGMKQCQRIDQRVMKDELTAEFTRRMRSVLKTKLNSRNLTKAVNTYACSVLTYSFGIVKWSNTDLDRLQRKMRTLCTKANKHHPKCCVERTTIPRTQGGQGFVDIKKMAAEQINNLRNYFIDKANTSDLHKILIEADCSTPLLLSEHPHENTTQTDSDKIQRWREKPLHGRHLNEVTQEHVDIPASNYWLTSGRLFPETEGFLLAIQDQVVQTKNYQKYIMKDRSLTDDRCRYGCQTSETIQHITGGCQMFAGNEYKSRHDAVCKILHQELAIQLKILQSETIPYYKYQPEVILENNLYRLYWDRTVLTNLTVANNRPDIILVKKKEKRAILIDVAIPNNNNLRQKYAEKISKYRELELQIKSSGECLIPEPFPFSYQPQELFLRASSPTSRS

SEQ ID NO: 57 - protein, 1204 aa, Propylea japonica
MQPIMMVQLRNRNIESLPEDRQGMSGAGAGHDSMRVVSGRVLRRRAPFIQNTTAQQEEPRRQTTAVSPPTVSATQDLQPAFTQAGLPRRRMKWTSCMNETIMRIYFKITNMGREQTGYRQRLFNEFKRCFPDLQVTEQRIADQYRVILRNKLISEDRLQEIKNEVVNELNIEENRTTEEHTTYENRDHNSETTREGITTELQLPLQENVRTNEETQTEHIPSQVNSSDDERQALVERLQSAMCRLFIEYNGTDPLSRPTLPRIRSSKKLAVILKIMNTDVIPKFISMATQLETIHLILYCAATTVVEVLGMKTKPRQHTIQPCPQPRLPHWQRRLEEKVQRCRQDIGRLTQYENGIRTIKLKSLVESIIYRNRKHSSYEEENTTVKQCIDTLKQKLSVYSERLRRYKESNRRKQDNISFENSEKNFYKHLDGKQQNSSNIYLNKDDMEKFWTEQLSTPTSYNTNAEWIKDEEKTQTNTEQMPLTVITPQELSEIFKEMHNWKSPGPDGLHSFWLKKFNCLHSYSTNAVNEILRVPESMPPFLTEGVTYLLPKNHQSTNDPATYRPVTCLPTMYKLITSCITRRIYSHCERNNIIASEQKGCSRGAMGSKEQLIIDSIICNQAHKKRRNLFTAYLDYKKAFDSIPHEWLIKVLEIYKVDPRIVSFLKTVMATWRTNIEISGTGIRTGTVSIKRGIFQGDSLSSLWFCMAMNPLSSILKSSRKGFNLKGNTRNILINHLLYVDDLKLFAANRDQLKCLLRLVEKFSKDVSMNFGLDKCRSLNIAGGKIQQTPLTLSNGEEIKAMLAGDLYKYLGMKQCQRIDQRVMKDELTAEFTRRMRSILKTKLNSRNLTKAVNTYACSVLTYSFGIVKWSNTDLDNLQRKMRTLCTKANKHHPKCCVERTTIPRTQGGQGFADIKKMAAEQISNLRNYFVDKSNTSDLHTILIEADGSTPLLLSEHPHENTTQTDSDKIQRWKEKPLHGRHLNEVIQEHVDIPASNYWLTSGRLFPETEGFLLAIQDQVVQTKNYQKYIMKDRSLTDDKCRYGCQTSETIQHITGGCQMFAGNEYKSRHDAVCKILHQELAIQLKMLQSEPMPYYKYQPEVILENHHYRLYWDRTVLTNLTVANNRPDIILVKKKEKKAILIDVAIPNNNNLRQKYAEKISKYRELELQIKRQWGMSSTRTIPILSYQSQELFLRASSPTSRS

SEQ ID NO: 58 - protein, 1196 aa, Propylea japonica
MRIYYKITNLGQELTGYRQRLFNEFKRCFPDLQVTEQRIADQYRVILRNKLISEDRLQEIKNEVVNELNNEENHNREEHTTSGNREHNHGATHEERTTELQLPLQEDIQTDDETQNEHSSPQVHTSVETAHKISNEERQALVERLESAMHRLFTEYNGTDPLSRPTLPRIRSSKKLAVILKIMNTDVIPKFLSMATQLETIHLILYCAATTVVEVLGMKTKPRQHSNQPCPQPRLPHWQRRLEEKVQRSRQDIGRLTQYENGIRTIKLKSLVESIIYRNRKHSSYEEENTTVKQCIDTLKQKLSVYSERLRRYKESNRRKQDNISFENSEKNFYRHLDGKQQNSPNIYPNKDDMEKFWTEQLSTPTTYNKNAEWIKNEEKTQTNTAQMSLTVITEQELSDILKEMHNWKSPGPDGLHSFWLKKFNCLHSNLTNAVNEILRDPESMPSFLTEGITYLLPKNHQSTDDPATYRPVTCLPTMYKLITSCITRRLYSHCERNNIIASEQKGCSRGAMGSKEQLIIDSIICNQAHKKRRNLFTAYLDYKKAFDSMPHEWLIKVLEIYKVDPRIVSFLKTVMSTWRTNIEISGTGIRTGTVSIRRGIFQGDSLSSLWFCMAMNPLSTILKSSRKGFNLKGNTSNMLINHLLYVDDLKLIAANRDQLECLLRLVEMFSKDVSMNFGLDKCRSLNIAGGKIQQTPLTLSNGEEIKAMLAGDLYKYLGMKQCQRIDQRVMKDELTAEFTRRMRSVLKTKLNSRNLTKAVNTYACSVLTYSFGIVKWSNTDLDRLQRKMRTLCTKANKHHPKCCVERTTIPRTQGGQGFVDIKKMAAEQINNLRNYFTDKANTSDLHKILIEADCSTPLLLSEHPHENTTQTDSDKIQRWREKPLHGRHLNEVTQEHVDIPASNYWLTSGRLFPETEGFLLAIQDQVVQTKNYQKYIMKDRSLTDDRCRYGCQTSETIQHITGGCQMFAGNEYKSRHDAVCKILHQELAIQLKILQSETIPYYKYQPEVILENNLYRLYWDRTVLTNLTVANNRPDIILVKKKEKRAILIDVAIPNNNNLRQKYAEKISKYRELELQIKRQWGMSSTRTIPILISTTGIIPKSLKSNLKELDLDENLFKVMQKAVLLGTARTVRKFVGHDGHQEQPWRETLQNQLPRHQPRDPGPSNEGRTTQDPGEEEHRRPQSSIPLILAIRDE

SEQ ID NO: 59 - protein, 1297 aa, Propylea japonica
MQPIMMVQLRSRNIESLPEDRQGMSGAGAGHDSMRDVSGRALRRRAPVIQNTTAQQEEPRRQTTAVPPPTNSATQDLQPAFTQAGLPRRRMKWTSCINETIMRIYYKITNLGQELTGYRQRLFNEFKRCFPDLQVTEQRIADQYRVILRNKLISEDRLQEIKNEVVNELNNEENHNREEHTTSGNREHNHGATHEERTTELQLPLQEDIQTDDETQNEHSSPQIHTSVETAHKFSNEERQALVERLESAIHRLFTEYNGTDPLSRPTLPRIRSSKKLAVILKIMNTDVIPKFLSMATQLETIHLILYCAATTVVEVLGMKTKPRQHSNQPCPQPRLPHWQRRLEEKVQRCRQDIGRLTQYENGIRTIKLKSLVESIIYRNRKHSSYEEENTTVKQCIDTLKQKLSVYSERLRRYKESNRRKQDNISFENSEKNFYRHLDGKQQNSPNIYPNKDDMEKFWTEQLSTPTTYNKNAEWIKNEEKTQTNTAQMSLTIITEQELSDILKEMHNWKSPGPDGLHSFWLKKFNCLHSNLTNAVNEILRNPESMPSFLIEGITYLLPKNHQSTDDPATYRPVTCLPTMYKLITSCITRRLYSHCERNNIIASEQKGCSRGAMGSKEQLIIDSIICNQAHKKRRNLFTAYLDYKKAFDSMPHEWLIKVLEIYKVDPRIVSFLKTVMSTWRTNIEISGTGIRTGTVSIRRGIFQGDSLSSLWFCMAMNPLSTILKSSRKGFNLKGNTSNMLINHLLYVDDLKLIAANRDQLECLLRLVEMFSKDVSMNFGLDKCRSLNIAGGKIQQTPLTLSNGEEIKAMLAGDLYKYLGMKQCQRIDQRVMKDELTAEFTRRMRSVLKTKLNSRNLTKAVNTYACSVLTYSFGIVKWSNTDLDRLQRKMRTLCTKANKHHPKCCVERTTIPRTQGGQGFVDIKKMAAEQINNLRNYFTDKANTSDLHKILIEADCSTPLLLSEHPHENTTQTDSDKIQRWREKPLHGRHLNEVTQEHVDIPASNYWLTSGRLFPETEGFLLAIQDQVVQTKNYQKYIMKDRSLTDDRCRYGCQTSETIQHITGGCQMFAGNEYKSRHDAVCKILHQELAIQLKILQSETIPYYKYQPEVILENNLYRLYWDRTVLTNLTVANNRPDIILVKKKEKRAILIDVAIPNNNNLRQKYAEKISKYRELELQIKRQWGMSSTRTIPILISTTGIIPKSLKSNLKELDLDENLFKVMQKAVLLGTARTVRKFVGHDGHQEQPWRETLQNQLPRHQPRDPGPSNEGRTTQDPGEEEHRRPQSSIPLILAIRDE

SEQ ID NO: 60 - protein, 1297 aa, Propylea japonica
MQPIMMVQLRSRNIESLPEDRQGMSGAGAGHDSMRDVSGRALRRRAPVIQNTTAQQEEPRRQTTAVPPPTNSATQDLQPAFTQAGLPRRRMKWTSCINETIMRIYYKITNLGQELTGYRQRLFNEFKRCFPDLQVTEQRIADQYRVILRNKLISEDRLQEIKNEVVNELNNEENHNREEHTISGNREHNHGATHEERTTELQLPLQDNIQTDDETQNEHSSPQVHTSVESAHKISNEERQAVVERLESAMHRLFSEYNGTDPLSRPTLPRIRSSKKLAVILKIMNTDVIPKFLSMATQLETIHLILYCAATTVVEVLGMKTKPRQHSNQPCPQPRLPHWQRRLEEKVQRCRQDIGRLTQYENGIRTIKLKSLVESIIYRNRKHSSYEEENTTVKQCIDTLKQKLSVYSERLRRYKESNRRKQDNISFENSEKNFYRHLDGKQQNSPNIYPNKDDMEKFWTEQLSTPTTYNKNAEWIKNEEKTQTNTAQMSLTVITEQEISDILKQMHNWKSPGPDGLHSFWLKKFNCLHSNLTKAVNEILRGPESMPSFLTEGITYLLPKNHQSTDDPATYRPVTCLPTMYKLITSCITRRLYSHCERNNIIASEQKGCSRGAMGSKEQLIIDSIICNQAHKKRRNLFTAYLDYKKAFDSMPHEWLIKVLEIYKVDPRIVSFLKTVMSTWRTNIEISGTGIRTGTVSIRRGIFQGDSLSSLWFCMAMNPLSTILKSSRKGFNLKGNTSNMLINHLLYVDDLKLIAANREQLECLLRLVEMFSKDVSMNFGLDKCRSLNIAGGKIQQTPLTLSNGEEIKAMLAGDLYKYLGMKQCQRIDQRVMKDELTAEFTRRMRSVLKTKLNSRNLTKAVNTYACSVLTYSFGIVKWSNTDLDRLQRKMRTLCTKANKHHPKCCVERTTIPRTQGGQGFVDIKKMAAEQINNLRNYFIDKANTSDLHKILIEADCLTPLLLSEHPHENTTQTDSDKIQRWREKPLHGRHLNEVTQEHVDIPASNYWLTSGRLFPETEGFLLAIQDQVVQTKNYQKYIMKDRSLTDDRCRYGCQTSETIQHITGGCQMFAGNEYKSRHDAVCKILHQELAIQLKILQSETIPYYKYQPEVILENNLYRLYWDRTVLTNLTVANNRPDIILVKKKEKRAILIDVAIPNNNNLRQKYAEKISKYRELELQIKRQWGMSSTRTIPILISTTGIIPKSLKSNLKELDLDENLFKVMQKAVLLGTARTVRKFVGHDGHQEQPWRETLQNQLPRHQPRDPGPSNEGRTTQDPGEEEHRRPQSSIPLILAIRDE

SEQ ID NO: 61 - protein, 757 aa, Propylea japonica
MEKFWTEQLSTPTTYNKNAEWIKNEEKTQTNTAPMSLTVITEQELSDILKEMHNWKSPGPDGLHSFWLKKFNCLHSNLTNAVNEILRDPESMPSFLTEGITYLLPKNHQSTDDPATYRPVTCLPTMYKLITSCITRRLYSHCERNNIIASEQKGCSRGAMGSKEQLIIDSIICNQAHKKRRNLFTAYLDYKKAFDSMPHEWLIKVLEIYKVDPRIVSFLKTVMSTWRTNIEISGTGIRTGTVSIRRGIFQGDSLSSLWFCMAMNPLSTILKSSRKGFNLKGNTSNMLINHLLYVDDLKLIAANRDQLECLLRLVEMFSKDVSMNFGLDKCRSLNIAGGKIQQTPLTLSNGEEIKAMLAGDLYKYLGMKQCQRIDQRVMKDELTAEFTRRMRSVLKTKLNSRNLTKAVNTYACSVLTYSFGIVKWSNTDLDRLQRKMRTLCTKANKHHPKCCVERTTIPRTQGGQGFVDIKKMAAEQINNLRNYFTDKANTSDLHKILIEADCSTPLLLSEHPHENTTQTDSDKIQRWREKPLHGRHLNEVTQEHVDIPASNYWLTSGRLFPETEGFLLAIQDQVVQTKNYQKYIMKDRSLTDDRCRYGCQTSETIQHITGGCQMFAGNEYKSRHDAVCKILHQELAIQLKILQSETIPYYKYQPEVILENNLYRLYWDRTVLTNLTVANNRPDIILVKKKEKRAILIDVAIPNNNNLRQNMLKKYRNIESLNFRLKGSGECLVPEPFPFSYQPQELFLRASSPTSRS

SEQ ID NO: 62 - protein, 1142 aa, Propylea japonica
MQPIMMVQLRNRNIESLPEDRQGMSGAGAGHDSMRVVSGRVLRRRAPFIQNTTAQQEEPRRQTTAVSPPTVSATQDLQPAFTQAGLPRRRMKWTSCMNETIMRIYFKITNMGREQTGYRQRLFNEFKRCFPDLQVTEQRIADQYRVILRNKLISEDRLQEIKNEVVNELNIEENRTTEEHTTYENRDHNSETTREGITTELQLPLQENVRTNEETQTEHIPSQVNSSDDERQALVERLQSAMCRLFIEYNGTDPLSRPTLPRIRSSKKLAVILKIMNTDVIPKFISMATQLETIHLILYCAATTVVEVLGMKTKPRQHTIQPCPQPRLPHWQRRLEEKVQRCRQDIGRLTQYENGIRTIKLKSLVESIIYRNRKHSSYEEENTTVKQCIDTLKQKLSVYSERLRRYKESNRRKQDNISFENSEKNFYKHLDGKQQNSSNIYLNKDDMEKFWTEQLSTPTSYNTNAEWIKDEEKTQTNTEQMPLTVITPQELSEIFKEMHNWKSPGPDGLHSFWLKKFNCLHSYSTNAVNEILRVPESMPPFLTEGVTYLLPKNHQSTNDPATYRPVTCLPTMYKLITSCITRRIYSHCERNNIIASEQKGCSRGAMGSKEQLIIDSIICNQAHKKRRNLFTAYLDYKKAFDSIPHEWLIKVLEIYKVDPRIVSFLKTVMATWRTNIEISGTGIRTGTVSIKRGIFQGDSLSSLWFCMAMNPLSSILKSSRKGFNLKGNTRNILINHLLYVDDLKLFAANRDQLKCLLRLVEKFSKDVSMNFGLDKCRSLNIAGGKIQQTPLTLSNGEEIKAMLAGDLYKYLGMKQCQRIDQRVMKDELTAEFTRRMRSILKTKLNSRNLTKAVNTYACSVLTYSFGIVKWSNTDLDNLQRKMRTLCTKANKHHPKCCVERTTIPRTQGGQGFADIKKMAAEQISNLRNYFVDKSNTSDLHTILIEADGSTPLLLSEHPHENTTQTDSDKIQRWKEKPLHGRHLNEVIQEHVDIPASNYWLTSGRLFPETEGFLLAIQDQVVQTKNYQKYIMKDRSLTDDKCRYGCQTSETIQHITGGCQMFAGNEYKSRHDAVCKILHQELAIQLKMLQSEPMPYYKYQPEVILENHHYRLYWDRTVLTNLTVANNRPDIILVKKKEKKQYS

SEQ ID NO: 63 - protein, 1297 aa, Propylea japonica
MQPIMMVQLRSRNIESLPEDRQGMSGAGAGHDSMRDVSGRALRRRAPLIQNTTAQQEEPRRQTTAVPPPTNSATQDLQPAFTQAGLPRRRMKWTSCINETIMRIYYKITNLGQELTGYRQRLFNEFKRCFPDLQVTEQRIADQYRVILRNKLISEDRLQEIKNEVVNELNNEANHNREEHTTSGNREHNHGATHEERTTELQLPLQKDIQTYDETQNEHSSPQVHTSVETAHKISNEERQALVERLESAMHRLFTEYNGTDPLSRPTLPRIRSSKKLAVILKIMNTDVIPKFLSMATQLETIHLILYCAATTVVEVLGMKTKPRQHSNQPCPQPRLPHWQRRLEEKAQRSRQDIGRLTQYENGIRTIKLKSLVESIIYRNRKHSSYEEENTTVKQCIDTLKQKLSVYSERLRRYKESNRRKQDNISFENSEKNFYRHLDGKQQNSPNIYPNKDDMEKFWTEQLSTPTTYNKNAEWIKNEEKTQTNTAQMSLTVITEQELSDILKGMHNWKSPGPDGLHSFWLKKFNCLHSNLTNAVNEILRDPESMPSFLTEGITYLLPKNHQSTDDPATYRPVTCLPTMYKLITSCITRRLYSHCERNNIIASEQKGCSRGAMGSKEQLIIDSIICNQAHKKRRNLFTAYLDYKKAFDSMPHEWLIKVLEIYKVDPRIVSFLKTVMSTWRTNIEISGTGIRTGTVSIRRGIFQGDSLSSLWFCMAMNPLSTILKSSRKGFNLKGNTSNMLINHLLYVDDLKLIAANRDQLECLLRLVEMFSKDVSMNFGLDKCRSLNIAGGKIQQTPLTLSNGEEIKAMLAGDLYKYLGMKQCQRIDQRVMKDELTAEFTRRMRSVLKTKLNSRNLTKAVNTYACSVLTYSFGIVKWSNTDLDRLQRKMRTLCTKANKHHPKCCVERTTIPRTQGGQGFVDIKKMAAEQINNLRNYFTDKANTSDLHKILIEADCSTPLLLSEHPHENTTQTDSDKIQRWREKPLHGRHLNEVTQEHVDIPASNYWLTSGRLFPETEGFLLAIQDQVVQTKNYQKYIMKDRSLTDDRCRYGCQTSETIQHITGGCQMFAGNEYKSRHDAVCKILHQELAIQLKILQSETIPYYKYQPEVILENNLYRLYWDRTVLTNLTVANNRPDIILVKKKEKRAILIDVAIPNNNNLRQKYAEKISKYRELELQIKRQWGMSSTRTIPILISTTGIIPKSLKSNLKELDLDENLFKVMQKAVLLGTARTVRKFVGHDGHQEQPWRETLQNQLPRHQPRDPGPSNEGRTTQDPGEEEHRRPQSSIPLILAIRDE

SEQ ID NO: 64 - protein, 1289 aa, Propylea japonica
MQPIMMVQLRNRNIESLPEDRQGMSGAGAGHDSMRDVSGRVLRRRAPVIQNTTAQQEEPRRQTTAVSPPTVSATQDLQPAFTRAGLPRRRMKWTSCMNETIMRIYFEITTMGQEQTGYRQRLFNEFKRCFPDLQVTEQRIADQYRVILRNKLISEDRLQEIKNEVVNELNIEENRTREEHTTYENRDHNSETTREGITTELQLPLQENVRTNEETQTEHIPSQVNSSDDERQALVERLQSAMCRVFIEYNGTDPLSRPTLPRIRSSKKLAVILKIMNTDVIPKFISMATQLEKIHLILYCAATTVVEVLGMKTKPRQHTIQPCPQPRLPHWQRRLEEKVQRCRQDIGRLTQYENGIRTIKLKSLVESIIYRNRKHSSYEEENTTVKQCIDTLKQKLSVYSERLRRYKDSNRRKQDNISFENSEKNFYRHLDGKQQNSSNIYPNKDDMEKFWTEQLSTPTSYNTNAEWIKDEEKTQTNTEQMPLTVITPQELSDILKEMHNWKSPGPDGLHSFWLKKFNCLHSSLTKAVNEILRVPESMPSFLTEGVTYLLPKNHQSTDDPATYRPVTCLPTMYKLITSCITRRLYSHCERNNIIASEQKGCSRGAMGSKEQLIIDSIICNQAHKKRRNLFTAYLDYKKAFDSMPHEWLIKVLEIYKVDPRIVSFLKTVMSTWRTNIEISGTGIRTGTVSIKRGIFQGDSLSSLWFCMAMNPLSTILKSSRKGFNLKGNTRNMLINHLLYVDDLKLFAANRDQLECLLRLVEKFSKDVSMNFGLDKCRSLNIAGGKIQQTPLTLSNGEEIKAMLAGDLYKYLGMKQCQRIDQRVMKDELTAEFTRRMRSVLKTKLNSRNLTKAVNTYACSVLTYSFGIVKWSNTDLDHLQRKMRTLCTKANKHHPKCCVERTTIPRPQGGQGFVDIKKMAAEQLSNLRNYFVDKSNTSDLHKILIEADGSTPLLLSEHPHENTTQTDSDKIQRWREKPLHGRHLNEVTQEHVDIPASNYWLTSGRLFPETEGFLLAIQDQVVQTKNYQKYIMKDRSLTDDKCRYGCQTSETIQHITGGCQMFAGNEYKSRHDAVCKILHQELAIQLKIMQSETVPYYKYQPEVILENHHYRLYWDRTVLTNLTVANNRPDIILVKKKEKRAILIDVAIPNNNNLRQKYAEKISKYRELELQIKRQWGMSNTRTIPILISTTGVIPKSLKSNLKELDLDENLYKIMQKAVLLGTARTVRKFVGHDGHQEQPWREISQDRLAGHQARNPGPSNEGRPTQGPGEEEHRGPQSSIPLILAIRDE

SEQ ID NO: 65 - protein, 1297 aa, Propylea japonica
MQPIMMVQLRSRNIESLPEDRQGMSGAGAGHDSMRDVSGRALRRRAPVIQNTTAQQEEPRRQTTAVPPPTNSATQDLQPAFIQAGLPRRRMKWTSCINETIMRIYYKITNLGQELTGYRQRLFNEFKRCFPDLQVTEQRIADQYRVILRNKLISEDRLQEIKNEVVNELNNEEDHNREEHTTSGNREHNHGATHEERTTELQLPLQEDIQTDDETQNEHSSPQVHTSVETAHKISNEERQALVKRLETAMHRLFSEYNGTDPLSRPTLPRIRSSKKLAVILKIMNTDVIPKFLSMATQLETIHLILYCAATTVVEVLGMKTKPRQHSNQPCPQPRLPNWQRRLEEKVQRCRQDIGRLTQYENGIRTIKLKSLVESIIYRNRKHSSYEEENTTVKQCIDTLKQKLSVYSERLRRYKESNRRKQDNISFENSEKNFYRHLDGKQQNSPNIYPNKDDMEKFWTEQLSTPTTYNKNAEWIKNEEKTQTNTAQMSLTVITEQELSDILKEMHNWKSPGPDGLHSFWLKKFNCLHSNLTKAVNEILRVPESMPSFLTEGITYLLPKNHQSTDDPATYRPVTCLPTMYKLITSCITRRLYFHCERNNIIASEQKGCSRGAMGSKEQLIIDSIICNQAHKKRRNLFTAYLDYKKAFDSMPHEWLIKVLEIYKVDPRIVSFLKTVMSTWRTNIEISGTGIRTGTVSIRRGIFQGDSLSSLWFCMAMNPLSTILKSSRKGFNLKGNTSNMLINHLLYVDDLKLIAANRDQLECLLRLVEMFSKDVSMNFGLDKCRSLNIAGGKIQQTPLTLSNGEEIKAMLAGDLYKYLGMKQCQRIDQRVMKDELTAEFTRRMRSVLKTKLNSRNLTKAVNTYACSVLTYSFGIVKWSNTDLDRLQRKMRTLCTKANKHHPKCCVERTTIPRTQGGQGFVDIKKMAAEQINNLRNYFIDKANTSDLHKILIEADCSTPLLLSEHPHENTTQTDSDKIQRWREKPLHGRHLNEVTQEHVDIPASNYWLTSGRLFPETEGFLLAIQDQVVQTKNYQKYIMKDRSLTDDRCRYGCQTSETIQHITGGCQMFAGNEYKSRHDAVCKILHQELAIQLKILQSETIPYYKYQPEVILENNLYRLYWDRTVLTNLTVANNRPDIILVKKKEKRAILIDVAIPNNNNLRQKYAEKISKYRELELQIKRQWGMSSTRTIPILISTTGIIPKSLKSNLKELDLDENLFKVMQKAVLLGTARTVRKFVGHDGHQEQPWRETLQNQLPRHQPRDPGPSYEGRTTQDPGEEEHRRPQSSIPLILAIRDE

SEQ ID NO: 66 - protein, 1289 aa, Propylea japonica
MQPIMMVQLRNRNIESLPEDRQGMSGAGAGHDSMRDVSGRVLRRRAPVIQNTTAQQEEPRRQTTAVSPPTVSATQDLQPAFTQAGLPRRRMKWTNSMNETIMRIYFKITNMGQEQTGYRQRLFNEFKRCFPDLQVTEQRIADQYRVILRNKLISEDRQQEIENEVVNELNIEENRTREEHTTHENRDHNSETTREGSTTELQLPLQENVLTNEETQTEHIPSQVNSSDDERQALVERLQSAMYRIFIEYNGTDPLSRPTLPRIRSSKKLAVILKIMNTDVIPKFLSMATQLETIHLILYCAATTVVEVLGMKTKPRQHTIQPCSQPRLPHWQRRLEEKVQRCRQDIRRLTQYENGIRTIKLKSLVESIIYRNRKHSSYEEDNTTVKQCIDTLKQKLSVYSERLRRYKESNRRKHDNISFENSEKNFYRHLDGKQQNSSNIYPNKDDMEKFWTEQLSTPTSYNTNAEWIKDEEKTRTNTEQMPLTVITPQELSEIFKEMHNWKSPGPDGLHSFWLKKFNCLHSNLTNAVNEILRVPESMPSFLTEGVTYLLPKNHQSTDDPATYRPVTCLPTMYKLITSCITRRLYSHCERNNIIASEQKGCSRGAMGSKEQLIIDAIICNQAHKKRRNLFTAYLDYKKAFDSMPHEWLIKVLEIYKVDPRIVNFLKTVMSTWRTNIEISGTGIRTGTVSIRRGIFQGDSLSSLWFCMAMNPLSSILKSSRKGFNLKGNTRNMLINHLLYVDDLKLFAANRDQLECLLRLVEKFSKDVSMNFGLDKCRSLNIAGGKIQQTPLTLSNGEEIKAMLAGDLYKYLGMKQCQRIDQRVMKDELTAEFTRRMRSVLKTKLNSRNLTKAVNTYACSVLTYSFGIVKWSNTDLDRLQRKMRTLCTKANKHHPKCCVERTTIPRAQGGQGFVDIKKMAAEQINNLRNYFIDKANTSDLHKILIEADGSTPLLLSEHPHENTTQTDSDKIQRWKEKPLHGRHLNEVTQEHVDIPASNYWLTSGRLFPETEGFLLAIQDQVVQTKNYQKYIMKDRSLTDDKCRYGCQTSETIQHITGGCQMFAGNEYKSRHDAVCKILHQELAIQLKMLQSEPIPYYKYQPEVILENHHYRLYWDRTVLTNLTVANNRPDIILVKKKEKKAILIDVAIPNNNNLRQKYAEKISKYRELELQIKRQWGMSSTRTIPILISTTGIIPKSLKSNLKELDLDENLFKVMQKAVLLGTARTVRKFVGHDGHQEQPWKETLQNQLPRRQPRDPEPSNEGRTTQDPGEEEHRRPQSSIPLILAIRDE

SEQ ID NO: 67 - protein, 1289 aa, Propylea japonica
MQPIMMVQLRNRNIESLPEDRQGMSGAGAGHDSMRDVSGRVLRRRAPVIQNITAQQEEPRRQTTAVSPPTVSATQDLQPAFTQAGLPRRRMKWTSCMNDTIMRIYFKITNMGQEQTGYRQRLFNEFKRCFPDLQVTEQRIADQYRVILRNKLISEDRLQEIKNEVVNELNIEENRTREEHTTYENRDHNSETTREGITTELQLPLQENVRTNEETQTEHIPSQVNSSDDERQALVERLQSAMCRLFIEYNGTDPLSRPTLPRIRSSKKLAVILKIMNTNVIPKFISMATQLETIHLILYCAATTVVEVLGMKTKPRQHTIQPCPQPRLPHWQRRLEEKVQRCRQDIGRLTQYENGIRTIKLKSLVESIIYRNRKHSSYEEENTTVKQCIDTLKQKLSVYSERLRRYKESNRRKQDNISFENSEKNFYRHLDGKQQNSSNIYPNKDDMEKFWTEQLSTPTSYNTNAEWIKDEEKTQTNTEQMPLTVITPQELSEIFKEMHNWKSPGPDGLHSFWLKKFNCLHSNLTNAMNEILRVPESMPSFLTEGVTYLLPKNHQSTDDPATYRPVTCLPTMYKLITSCITRRLYSHCERNNIIASEQKGCSRGAMGSKEQLIIDSIICNQAHKKRRNLFTAYLDYKKAFDSMPHEWLIKVLEIYKVDPRIVSFLKTVMSTWRTNIEISGTGIRTGTVSIKRGIFQGDSLSSLWFCMAMNPLSSILKSSRKGFNLKGNTSNMLINHLLYVDDLKLFAANRDQLECLLRLVEKFSKDVSMNFGLDKCRSLNIAGGKIQQTPLTLSNGEEIKAMLAGDLYKYLGMKQCQRIDQRVMKDELTAEFTRRMRSVLKTKLNSRNLTKAVNTYACSVLTYSFGIVKWSNTDLDNLQRKMRTLCTKANKHHPKCCVERTTIPRTQGGQGFVDIKKMAAEQISNLRNYFVDKSNTSDLHKILIEADGSTPLLLSEHPHENTTQTDSDKIQRWKEKPLHGRHLNEVIQEHVDIPASNYWLTSGRLFPETEGFLLAIQDQVVQTKNYQKYIMKDRSLTDDKCRYGCQTSETIQHITGGCQMFAGNEYKSRHDAVCKILHQELAIQLKMLQSEPIPYYKYQPEVILENHHYRLYWDRTVLTNLTVANNRPDIILVKKKEKKAILIDVAIPNNNNLRQKYAEKISKYRELELQIKRQWGMSSTRTIPILISTTGIIPKSLKSHLKELDLDENLFKVMQKAVLLGTARTVRKFVGHDGHQEQPWRETLQNQQPRRQPRDPGPSNEGRTTQDPGEEEHRRPQSSIPLILAIRDE

SEQ ID NO: 68 - protein, 1289 aa, Propylea japonica
MQPIMMVQLRSRNIESLPEDRQGMSGAGAGHDSMRDVSGRALRRRAPVIQNTTAQQEEPRRQTTAVPPPTNSATQDLQPAFTQAGLPRRRMKWTSCINETIMRIYYKITNLGQELTGYRQRLFNEFKRCFPDLQVTEQRIADQYRVILRNKLISEDRLQEIKNEVVNELNNEENHNREEHTTSGNREHNHGATHEERTTELQLPLQEDIQTDDETQNEHSSPQVHTSVETAHKISNEERQALVERLESAMHRLFSEYNGTDPLSRPTLPRIRSSKKLAVILKIMNTDVIPKFLSMATQLETIHLILYCAATTVVEVLGMKTKPRQHSNQPCPQPRLPHWQRRLEEKVQRCRQDIGRLTQYENGIRTIKLKSLVESIIYRNRKHSSYEEENTTVKQCIDTLKQKLSVYSERLRRYKESNRRKQDNISFENSEKNFYRHLDGKQQNSPNIYPNKDDMEKFWTEQLSTPTTYNKNAEWIKNEEKTQTNTAQMSLTVITEQELSDILKEMHNWKSPGPDGLHSFWLKKFNCLHSNLTNAVNEILRGPESMPSFLTEGITYLLPKNHQSTDDPATYRPVTCLPTMYKLITSCITRRLYSHCERNNIIASEQKGCSRGAMGSKEQLIIDSIICNQAHKKRRNLFTAYLDYKKAFDSMPHEWLIKVLEIYKVDPRIVSFLKTVMSTWRTNIEISGTGIRTGTVSIRRGIFQGDSLSSLWFCMAMNPLSTILKSSRKGFNLKGNTSNMLINHLLYVDDLKLIAANRDQLECLLRLVEMFSKDVSMNFGLDKCRSLNIAGGKIQQTPLTLSNGEEIKAMLAGDLYKYLGMKQCQRIDQRVMKDELTAEFTRRMRSVLKTKLNSRNLTKAVNTYACSVLTYSFGIVKWSNTDLDRLQRKMRTLCTKANKHHPKCCVERTTIPRTQGGQGFVDIKKMAAEQINNLRNYFIDKANTSDLHKILIEADCSTPLLLSEHPHENTTQTDSDKIQRWREKPLHGRHLNEVTQEHVDIPASNYWLTSGRLFPETEGFLLAIQDQVVQTKNYQKYIMKDRSLTDDRCRYGCQTSETIQHITGGCQMFAGNEYKSRHDAVCKILHQELAIQLKILQSETIPYYKYQPEVILENNLYRLYWDRTVLTNLTVANNRPDIILVKKKEKRAILIDVAIPNNNNLRQKYAEKISKYRELELQIKRQWGMSSTRTIPILISTTGIIPKSLKSNLKELDLDENLFKVMQKAVLLGTARTVRKFVGHDGHQEQPWRETLQNQLPRLNREIQDQATKDEQPRTQEKKNTEDLRAQSP

SEQ ID NO: 69 - protein, 1014 aa, Propylea japonica
MNTDVIPKFISMATQLETIHLILYCAATTVVEVLGMKTKPRQHTIQPCPQPRLPHWQRRLEEKVQRCRQDIGRLTQYENGIRTIKLKSLVESIIYRNRKHSSYEEENTTVKQCIDTLKQKLSVYSERLRRYKESNRRKQANISFENSEKNFYKHLDGKQQNSSNIYPNKDDMEKFWTEQLSTPTSYNTNAEWIKDEEKTQTNTEQMPLTVITPQELSEIFKEMHNWKSPGPDGLHSFWLKKFNCLHSNLTNAVNEILRVPESMPPFLTEGVTYLLPKNHQSTNDPATYRPVTCLPTMYKLITSCITRRIYSHCERNNIIASEQKGCSRGAMGSKEQLIIDSIICNQAHKKRRNLFTAYLDYKKAFDSIPHEWLIKVLEIYKVDPRIVSFLKTVMSIWRTNIEISGTGIRTGTVSIKRGIFQGDSLSSLWFCMAMNPLSSILKSSRKRFNLKGNTRNMLINHLLYVDDLKLFAANRDQLKCLLRLVEKFSKDVSMNFGLDKCRSLNIAGGKIQQTPLTLSNGEEIKAMLAGDLYKYLGMKQCQRIDQRVMKDELTAEFTRRMRSILKTKLNSRNLTKAVNTYACSVLTYSFGIVKWSNTDLDNLQRKMRTLCTKANKHHPKCCVERTTIPRTQGGQGFADIKKMAAEQISNLRNYFVDKSNTSDLHTILIEADGSTPLLLSEHPHENTTQTDSDKIQRWKEKPLHGRHLNEVIQEHVDIPASNYWLTSGRLFPETEGFLLAIQDQVVQTKNYQKYIMKDRSLTDDKCRYGCQTSETIQHITGGCQMFAGNEYKSRHDAVCKILHQELAIQLKMLQSEPMPYYKYQPEVILENHHYRLYWDRTVLTNLTVANNRPDIILVKKKEKKAILIDVAIPNNNNLRQKYAEKISKYRELELQIKRQWGMSSTRTIPILISTTGIVPKSLKSNLKELDLDENLFKVMQKAVLLGTARTVRKFVGHDGHQEQPWRETLQNQQPRRQPRDPGPSNEGRTTQDPGEEEHRRPQSSIPLILAIRDE

SEQ ID NO: 70 - protein, 843 aa, Propylea japonica
MEKFWTEQLSTPTTYNKNAEWIKNEEKTQTNTAQMSLTVITEQELSDILKEMHNWKSPGPDGLHSFWLKKFNCLHSNLTNAVNEILRGPESMPSFLTEGITYLLPKNHQSTDDPATYRPVTCLPTMYKLITSCITRRLYSHCERNNIIASEQKGCSRGAMGSKEQLIIDSIICNQAHKKRRNLFTAYLDYKKAFDSMPHEWLIKVLEIYKVDPRIVSFLKTVMSTWRTNIEISGTGIRTGTVSIRRGIFQGDSLSSLWFCMAMNPLSTILKSSRKGFNLKGNTSNMLINHLLYVDDLKLIAANRDQLECLLRLVEMFSKDVSMNFGLDKCRSLNIAGGKIQQTPLTLSNGEEIKAMLAGDLYKYLGMKQCQRIDQRVMKDELTAEFTRRMRSVLKTKLNSRNLTKAVNTYACSVLTYSFGIVKWSNTDLDRLQRKMRTLCTKANKHHPKCCVERTTIPRTQGGQGFVDIKKMAAEQINNLRNYFIDKANTSDLHKILIEADCSTPLLLSEHPHENTTQTDSDKIQRWREKPLHGRHLNEVTQEHVDIPASNYWLTSGRLFPETEGFLLAIQDQVVQTKNYQKYIMKDRSLTDDRCRYGCQTSETIQHITGGCQMFAGNEYKSRHDAVCKILHQELAIQLKILQSETIPYYKYQPEVILENNLYRLYWDRTVLTNLTVANNRPDIILVKKKEKRAILIDVAIPNNNNLRQKYAEKISKYRELELQIKRQWGMSSTRTIPILISTTGIIPKSLKSNLKELDLDENLFKVMQKAVLLGTARTVRKFVGHDGHQEQPWRETLQNQLPRHQPRDPGPSNEGRTTQDPGEEEHRRPQSSIPLILAIRDE

SEQ ID NO: 71 - protein, 1207 aa, Propylea japonica
MKWTSCINETIMRIYYKITNLGQELTGYRQRLFNEFKRCFPDLQVTEQRIADQYRVILRNKLISEDRLQEIKNEVFNELNNEENHNREEHTTSGNREHNHGATHEERTTELQLPLQEDIQTDDETQNEHSSPQVHTSVETAHKISNEERQALVERLESAMHRLFTEYNGTDPLSRPTLPRIRSSKKLAVILKIMNTDVIPKFLSMATQLETIHLILYCAATTVVEVLGMKTKPRQHSNQPCPQPRLPHWQRRLEEKVQRCRQDIGRLTQYENGIRTIKLKSLVESIIYRNRKHSSYEEENTTVKQCIDTLKQKLSVYSERLRRYKESNRRKQDNISFENSEKNFYRHLDGKQQNSPNIYPNKDDMEKFWTEQLSTPTTYNKNAEWIKNEEKTQTNTAQMSLTVITEQELSDILKEMHNWKSPGPDGLHSFWLKKFNCLHSNLTNAVNEILRDPESMPSFLTEGITYLLPKNHQSTDDPATYRPVTCLPTMYKLITSCITRRLYSHCERNNIIASEQKGCSRGAMGSKEQLIIDSIICNQAHKKRRNLFTAYLDYKKAFDSMPHEWLIKVLEIYKVDPRIVSFLKTVMSTWRTNIEISGTGIRTGTVSIRRGIFQGDSLSSLWFCMAMNPLSTILKSSRKGFNLKGNTSNMLINHLLYVDDLKLIAANRDQLECLLRLVEMFSKDVSMNFGLDKCRSLNIAGGKIQQTPLTLSNGEEIKAMLAGDLYKYLGMKQCQRIDQRVMKDELTAEFTRRMRSVLKTKLNSRNLTKAVNTYACSVLTYSFGIVKWSNTDLDRLQRKMRTLCTKANKHHPKCCVERTTIPRTQGGQGSVDIKKMAAEQINNLRNYFIDKANTSDLHKILIEADCSTPLLLSEHPHENTTQTDSDKIQRWREKPLHGRHLNEVTQEHVDILASNYWMTSGRLFPETEGFLLAIQDQVVQTRNYQKYIMKDKSLTDDRCRYGCQTSETIQHITGGCQMFAGNEYKSRHDAVCKILHQELAIQLKILQTETIPYYKYQPEVILENNLYRLYWDRTVLTNLTVANNRPDIILVKKKEKRAILIDVAIPNNNNLRQKYAEKISKYRELELQIKRQWGMSSTRTIPILISTTGIIPKSLKSNLKELDLDENLFKVMQKAVLLGTARTVRKFVGHDGHQEQPWRETLQNQLPRHQPKRSGPSNEGRTTQDPGEEEHRRPQSSIPLILAIRDE

SEQ ID NO: 72 - protein, 1048 aa, Propylea japonica
MHRLFSEYNGTDPLSRPTLPRIRSSKKLAVILKIMNTDVIPKFLSMATQLETIHLILYCAATTVVEVLGMKTKPRQHSNQPCPQPRLPHWQRRLEEKVQRCRQDIGRLTQYENGIRTIKLKSLVESIIYRNRKHSSYEEENTTVKQCIDTLKQKLSVYSERLRRYKESNRRKQDNISFENSEKNFYRHLDGKQQNSPNIYPNKDDMEKFWTEQLSTPTTYNKNAEWIKNEEKTQTNTAQMSLTVITEQELSDILKEMHNWKSPGPDGLHSFWLKKFNCLHSNLTKAVNEILRGPESMPSFLTEGITYLLPKNHRSTDDPATYRPVTCLPTMYKLITSCITRRLYSHCERNNIIASEQKGCSRGAMGSKEQLIIDSIICNQAHKKRRNLFTAYLDYKKAFDSMPHEWLIKVLEIYKVDPRIVSFLKTVMSTWRTNIEISGTGIRTGTVSIRRGIFQGDSLSSLWFCMAMNPLSTILKSSRKGFNLKGNTRNMLINHLLYVDDLKLIAANRDQLECLLRLVEMFSKDVSMNFGMDKCRSLNIAGGKIQQTPLTLSNGEEIKAMLAGDLYKYLGMKQCQRIDQRVMKDELTAEFTRRMRNVLKTKLNSRNLTKAVNTYACSVLTYSFGIVTWSNTDLDRLQRKMRTLCTKANKHHPKCCVERTTIPRTQGGQGFVDIKKMAAEQINNLRNYFIDKANTSDLHKILIEADCSTPLLLSEHPHENTTQTDSDKIQRWREKPLHGRHLNEVTQEHVDIPASNYWLTSGRLFPETEGFLLAIQDQVVQTKNYQKYIMKDRSLTDDRCRYGCQTSETIQHITGGCQMFAGNEYKSRHDAVCKILHQELAIQLKILQSETIPYYKYQPEVILENNLYRLYWDRTVLTNLTVANNRPDIILVKKKEKRAILIDVAIPNNNNLRQKYAEKISKYRELELQIKRQWGMSSTRTIPILISTTGIIPKSLKSNLKELDLDENLFKVMQKAVLLGTARTVRKFVGHDGHLEQPWRETLQNQLPRHQPRDPGPSNEGRTTQDPGEEEHRRPQSSIPLILAIRDE

SEQ ID NO: 73 - protein, 1281 aa, Propylea japonica
MQPIMMVQLRSRNIESLPEDRQGMSGTGAGHDSMRDVSGRALRRRAPVIQNTTAQQEEPRRQTTAVPPPTNSATQDLQPAFTQAGLPRRRMKWTSCINETIMRIYYKITNLGQELTGYRQRLFNEFKRCFPDLQVTEQRIADQYRVILRNKLISEDRLQEIKNEVVNELNNEENHNREEHTTSGNREHNHGATHEERTELQLPLQEDIQTDDETQNEHSSPQVHTSVETAHKISNEERQALVERLESAMHRLFTEYNGTDPLSRPTLPRIRSSKKLILKIMNTDVIPKFLSMATQLETIHLILYCAATTVVEVLGMKTKPRQHSNQPCPQPRLPHWQRRLEEKVQRSRQDIGRLTQYENGIRTIKLKSLVESIIYRNRKHSSYEEENTTVKQCIDTLKQKLSVYSERLRRYKESNRRKQDNISFENSEKNFYRHLDGKQQNSPNIYPNKDDMEKFWTEQLSTPTTYNKNAEWIKNEEKTQTNTAQMSLTVITEQELSDILKKMHNWKSPGPDGLHSFWLKKFNCLHSNLTNAVNEILRDPESMPSFLTEGITYLLPKNHQSTDDPATYRPVTCLPTMYKLITSCITRRLYSHCERNNIIASEQKGCSRGAMGSKEQLIIDSIICNQAHKKRRNLFTAYLDYKKPFDSMPHEWLIKVLEIYKLDPRIVSFLKTVMSTWRTNIEISGTGIRTGTVSIRRGIFQGDSLSSLWFCMAMNPLSTILKSSRKGFNLKGNTSNMLINHLLYVDDLKLIAANRDQLECLLRLVEMFSKDVSMNFGLDKCRSLNIAGGKIQQTPLTLSNGEEIKAMLAGDLYKYLGMKQCQRIDQRVMKDELTAEFTRRMKSVLKTKLNSRNLTKAVNSYACSVLTYSFGIVKWSNIDLDRLQRKMRTLCTKANKHHPKCCVERTTIPRTQGGQGFVDIKKMAAEQINNLRNYFTDKANTSDLHKILIEADCSTPLLLSEHPHENTTQTDSDKIQRWREKPLHGRHLNEVTQEHVDIPASNYWLTSGRLFPETEGFLLAIQDQVVQTKNYQKYIMKDRSLTDDRCRYGCQTSETIQHITGGCQMFAGNEYKSRHDAVCKILHQELATQLKILQSETIPYYKYQPEVILENNLYRLYWDRTVLTNLTVANNRPDRILVKKKEKRAILIDVAIPNNNNLRQKYAEKISKYRELELQIKRQWGMSSTRTISILISTTGIIPKSLKSNLKELDLDENLFKVMQKAVLLGTARTVRKFVSHDGHQEQPWRETLQNQLPRHQPRDPGQSNEGRTTQDPLILAIRDE

SEQ ID NO: 74 - protein, 1048 aa, Propylea japonica
MHRLFSEYNGTDPLSRPTLPRIRSSKKLAVTLKIMNTDVVPKFLSMATQLETIHLILYCAATTVVEVLGIKTKPRQHSNQPCPQPRLPHWQRRLEEKVQRCRQDIGRLTQYENGIRTIKLKSLVESIIYRNRKHSSYEEENTTVKQCIDTLKQKLSVYSERLRRYKESNRRKQDNISFENSEKNFYRHLDGKQQNSPNSYPNKDDMEKFWTEQLSTPTTYNKNAEWIKNEEKTQTNTAQMSLTVITEQELSDILKEMHNWKSPGPDGLHSFWLKKFNCLHSNLTNAVNEILRDPESMPSFLTEGITYLLPKNHQSTDDPATYRPVTCLPTMYKLITSCITRRLYSHCERNNIIASEQKGCSRGAMGSKEQLIIDSIICNQAHKKRRNLFTAYLDYKKAFDSMPHEWLIKVLEIYKVDPRIVSFLKTVMSTWRTNIEISGTGIRTGTVSIRRGIFQGDSLSSLWFCMAMNPLSTILKSSRKGFNLKGNTSNMLINHLLYVDDLKLIAANRDQLECLLRLVEMFSKDVSMNFGLDKCRSLNIAGGKIQQTPLTLSNGEEIKAMLAGDLYKYLGMKQCQRIDQRVMKDELTAEFNRRMRSVLKTKLNSRNLTKAVNTYACSVLTYSFGIVKWSNTDLDRLQRKMRTLCTKANKHHPKCCVERTTIPRTQGGQGFVDIKKMAAEQINNLRNYFTDKANTSDLHKILIEADCSTPLLLSEHPHENTTQTDSDKIQRWREKPLHGRHLNEVTQEHVDIPASNYWLTSGRLFPETEGFLLAIQDQVVQTKNYQKYIMKDRSLTDDRCRYGCQTSETIQHITGGCQMFAGNEYKSRHDAVCKILHQELAIQLKILQSETIPYYKYQPEVILENNLYRLYWDRTVLTNLTVANNRPDIILVKKKEKRAILIDVAIPNNNNLRQKYAEKISKYRELELQIKRQWGMSSTRTIPILISTTGIIPKSLKSNLKELDLDENLFKVMQKAVLLGTARTVRKFVGHDGHQEQPWRETLQNQLPRHQPRDPGPSNEGRTTQDPGEEEHRRPQSSIPLILAIRDE

SEQ ID NO: 75 - protein, 1150 aa, Propylea japonica
MQPIMMVQLRSRDIESLPEDRQGMSGAGAGHDSMRDVSGRALRRRAPVIQNTTAQQEEPRRQTTAVPPPTNSATQYLQPAFTQAGLPRRRMKWTSCMNETIMRIYFKITNLGQELTGYRQRLFNEFKRCFPDLQVTEQRKADQYRVILRNKLISEDRLQEIKNEVVNELNNEENHNREEHTTSGNREHNHGATHEERTTELQLPLQEDIQTDDETQNEHSSPQVHTSVETAHKISNEEQQALVERLESAMHRLFSEYNGTDPLSRPTLPRIRSSKKLAVILKIMNTDVIPKFLSMATQLETIHLILYCAATTVVEVLGMKTKPRQHSNQPCPQPRLPHWQRRLEEKVQRCRQDIGRLTQYENGIRTIKLKSLVESIMYRNRKHSSYEEENTTVKQCIDTLKQKLSVYSERLRRYKESNRRKQDNISSENSEKNFYRNLDGKQQNSPNIYPNKDDMEKFWTEQLSTPTTYNKNAEWIKNEEKTQTNTAQMSLTVITEQELSDILKEMHNWKSPGPDGLHSFWLKKFNSLHSNLTKAVNEILRGAEGMPSFLTEGITYLLPKNHQSTDDPATYRPVTCLPTMYKLITSCITRRLYSHCERNNIIASEQKGCSRGVMGSKEELIIDSIICNQAYKKRRNLFTAYLDYKKAFDSMPHEWLIKVLEIYKVDPRIVSFLKTVMSTWRTNIEISGTGIRTGTVSIKRGIFQGDSLSSLWFCMAMNPLSTISKSSRKGFNLKGNTSNMLINHLLYVDDLKLIAANRDQLECLLRLVEMFSKDVSMNFGLDKCRSLNIAGGKIQQTPLTLSNGEEKKAMLAGDLYKYLGTKQCQRIDQRAMKDELTAEFTRRMRSVLKTKLNSRNLTNAVNTYACSVLTYSFGIVKWSNTDLDRLQRKMRTLCTKANKHHPKCCVERTTIPRTQGGQGFVDIKKMAPEQINNLRNYFIDKANTSDLHKILIEADCSTPLLLSEHPHENTTQTDSDKIQRWREKPLHGRHLNEVTQEHVDIPASNYWLTSGRLFPETEGFLLAIQDQVVQTKNYQKYIMKDRSLTDDRCRYGCQTSETIQHITGGCQMFAGNEYKSRHDAVCKILHQELAIQLKILQSETIPYYKYQPEVILENNLYRLYWDRTVLTNLTVANNRPDIILVKKKRREQYL

SEQ ID NO: 76 - protein, 1130 aa, Propylea japonica
MKWTSCINETIMRIYYKITNLGQELTGYRQRLFNEFKRCFPDLQVTEQRIADQYRVILRNKLISEDRLQEIKNEVVNELNNEENHNREEHTTSGNREHNHGATHEERTTELQLPLQEDIQTDDETQNEHSSPQVHTSVETAHKISNEERQALVERLESAMHRLFTEYNGTDPLSRPTLPRIRSSKKLAVILKIMNIDVIPKFLSMATQLETIHLILYCAATTVVEVLGMKTKPRQHSNQPCPQPRLPHWQRRLEEKVQRCRQDIGRLTQYENGIRTIKLKSLVESIIYRNRKHSSYEEENTTVKQCIDTLKQKLSVYSERLRRYKESNRRKQDNISFENSEKNFYRHLDGKQQNSPNIYPNKDDMEKFWTEQLSTPTTYNKNAEWIKNEEKTQTNTAQMSLTVITEQELSDILKEMHNWKSPGPDGLHSFWLKKFNCLHSNLTNAVNEILRDPESMPSFLTEGITYLLPKNHQSTDDPATYRPVTCLPTMYKLITSCITRRLYSHCERNNIIASEQKGCSRGAMGSKEQLIIDSIICNQAHKKRRNLFTSYLDYKKAFDSMPHEWLIKVLEIYKVDPRIVSFLKTVMSTWRTNIEISGTGIRTGTVSIRRGIFQGDSLSSLWFCMAMNPLSTILKSSRKGFNLKGNTSNMLINHLLYVDDLKLIAANRDQLECLLRLVEMFSKDVSMNFGLDKCRSLNIAGGKIQQTPLTLSNGEEIKAMLAGDLYKYLGMKQCQRIDQRVMKDELTAEFTRRMRSVLKTKLNSRNLTKAVNTYACSVLTYSFGIVKWSNTDLDRLQRKMRTLCTKANKHHPKCCVERTTIPRTQGGQGFVDIKKMAAEQINNLRNYFTNKANTSDLHKILIEADCSTPLLLSEHPHENTTQTDSDKIQRWREKPLHGRHLNEVTQEHVDIPASNYWLTSGRLFPETEGFLLAIQDQVVQTKNYQKYIMKDRSLTDDRCRYGCQTSETIQHITGGCQMFAGNEYKSRHDAVCKILHQELAIQLKIRQSETIPYYKYQPEVILENHLYRLYWDRTVLTNLTVANNRPDIILVKKKEKRAILIDVAIPNNNNLRQKYAEKISKYRELELQIKRQWGMSSTRTIPILISTTGIIPKSLKSNLKELDLDETCLK

SEQ ID NO: 77 - protein, 1297 aa, Propylea japonica
MQPIMMVQLRSRNIESLPEDRQGMSGAGAGHDSMRDVSGRALRRRAPVIQNTTAQQEEPRRQTTAVPPPTNSATQDLQPAFTQAGLPRRRMKWTSCINETIMRIYYKITNLGQELTGYRQRLFNDFKRCFPDLQVTEQRIADQYRVILRNKLISEDRLQEIKNEVVNELNNEENHNREEHTTSGNREHNHGATHEERTTELQLPLQEDIQTDDETQNEHSSPQVHTSVETAHKISNEERQALVERLESAMHRLFSEYNGTDPLSRPTLPRIRSSKKLAVILKIMNTDVIPKFLSMGTQLETIHLILYCAATTVVEVLGMKTKPRQHSNQPCPQPRLPHWQRRLEEKVQRCRQDIGRLTQYENGIRTIKLKSLVESIIYRNRKHSSYEEENTTVKQCIDTLKQKLSVYSERLRRYKESNRRKQDNISFENSEKNFYRHLDGKQQNSPNIYPNKDDMKKFWTEQLSTPTTYNKNAEWIKNEEKTQTNTAQMSLTVITEQELSDILKEMHNWKSPGPDGLHSFWLKKFNCLHSNLTKAVNEILQGAESMPSFLTEGITYLLPKNHQSTDDPATYRPVTCLPTMYKLITSYITRRLYSHCERNNIIASEQKGCSRGAMGSKEQLIIDSIICNQAYKKRRNLFTAYFDYKKAFDSMPHEWLIKVLEIYKVDPRIVSFLKTVMSTWRTNIEISGTGIRTGTVSIRRGIFQGDSLSSLWFCMAMNPLSTILKSSRKGFNLKGNTSNMLINHLLYVDDLKLIAANRDQLECLLRLVEMFSKDVSMNFGLDKCRSLNIAGGKIQQTPLTLSNGEEIKAMLAGDLYKYLGMKQCQRIDQRVMKDELTAEFTRRMRSVLKTKLNSRNLTKAVNTYACSVLTYSFGIVKWSNTDLDRLQRKMRTLCTKANKHHPKCCVERTTIPRTQGGQGFVDIKKMAAEQINNLRNYFIDKANTSDLHKILIEADCSTPLLLSEHPHENTTQTDSDKIQRWREKPLHGRHLNEVTQEHVDIPASNYWLTSGRLFPETEGFLLAIQDQVVQTKNYQKYIMKDRSLTDDRCRYGCQTSETIQHITGGCQMFAGNEYKSRHDAVCKILHQELAIQLKILQSETIPYYKYQPEVILENNLYRLYWDRTVLTNLTVANNRPDIILVKKKEKRAILIDVAIPNNNNLRQKYAEKISKYRELELQIKRQWGMSSTRTIPILISTTGIIPKSLKSNLKELDLDENLFKVMQKAVLLGTARTVRKFVGHDGHQEQPWRETLQNQLPRHQPRDPGPSNEGRTTQDPGEEEHRRPQSSIPLILAIRDE

SEQ ID NO: 78 - protein, 1285 aa, Propylea japonica
MQPIMMVQLRSRNIESLPEDRQGMSGAGAGHDSMRDVSGRALRRRAPVIQNTTAQQEEPRRQTTAVPPPTNSATQDLQPAFTQAGLPRRRMKWTSCINETIMRIYYKITNLGQELTGYRQRLFNEFKRCFPDLQVTEQRIADQYRVILRNKLISEDRLQEIKNEVVNELNNEENHKREEHTTSGNREHNHGATHEERTTELQLPLQEDIQTDDETQSEHSSPQVHTSVETAHKISNEERQALVERLESAMHRLFSEYNGTDPLSRPTLPRIRSSKKLAVILKIMNTNVIPKFLSMATQLETIHLILHCAATTVVEVLGMKTKPRQHSNQPCPQPRLPHWQRRLEEKVQRCRQDIGRLTQYENGIRTIKLKSLVESIIYRNRKHSSYEEENTTVKQCIDTLKQKLSVYSERLRRYKESNRRKQDNISFENSEKNFYRHLDGKQQNSPNIYPNKDDMEKFWTEQLSTPTTYNKNAEWIKNEEKTQTNTGSDILKEMHNWKSPGPDGLHSFWLKKFNCLHSNLTKAVNEILRVPESMPSFLTEGITYLLPKNHQSRNDPATYRPVTCLPTMYKLITSCITRRLYSHCERNNIIASEQKGCSRGAMGSKEQLIIDSIICNQAYKKRRNLFTAYLDYKKAFDSMPHEWLIKVLEIYKVDPRIVSFLKTVMSTWRTNIEISGTGIRTGTVSIRRGIFQGDSLSSLWFCMAMNPLSTILKSSRKGFNLKGNTSNMLINHLLYVDDLKLIAANRDQLECLLRLVEMFSKDVSMNFGLDKCRSLNIAGGKIQQTPLTLSNGEEIKAMLAGDLYKYLGMKQCQRIDQRVMKDELTAEFTRRMRSVLKTKLNSRNLTKAVNTYACSVLTYSFGIVKWSNTDLDRLQRKMRTLCTKANKHHPKCCVERTTIPRTQGGQGFVDIKKMAAEQINNLRNYFIDKANTSDLHKILIEADCSTPLLLSEHPHENTTQTDSDKIQRWREKPLHGRHLNEVTQEHVDIPASNYWLTSGRLFPETEGFLLAIQDQVVQTKNYQKYIMKDRSLTDDKCRYGCQTSETIQHITGGCQMFAGNEYKSRHDAVCKILHQELAIQLKMLQSEPIPYYKYQPEVILENHHYRLYWDRTVLTNLTVANNRPDIILVKKKEKKAILIDVAIPNNNNLRQKYAEKISKYRELELQIKRQWGMSSTRTIPILISTTGIIPKSLKSNLKELDLDENLFKVMQKAVLLGTARTVRKFVGHDGHQEQPWRETLQNQLPRHQPRDPGPSNEGRTTQDPGEEEHRRPQSSIPLILAIRDE

SEQ ID NO: 79 - protein, 1191 aa, Propylea japonica
MKWTSCMNETIMRIYFKITNMGQEQTGYRQRLFNEFKRCFPDLQVTEQRIADQYRVILRNKLISEDRLQEIKNEVVNELNIKENRTREEHTTYENRDHNSETTREGITTELQLPLQENVRTNEETQTEHIPSQVNSSDDERQALVERLQSAMCRVFIEYNGTDPLSRPTLPRIRSSKKLAVILKIMNTDVIPKFISMATQLETIHLILYCAATTVVEVLGMKTKPRQHTIQPCPQPRLPHWQRRLEEKVQRCRQDIGRLTQYENGIRTIKLKSLVESIIYRNRKHSSYEEENTTVKQCIDTLKQKLSVYSERLRRYKESNRRKQDNISFENSEKNFYRHLDGKQQNSSNIYPNKDDMEKFWTEQLSTPTSYNTNAEWIKDEEKTQTNTEQMPLTVITPQELSDILKEMHNWKSPGPDGLHSFWLKKFNCLHSSLTKAVNEILRVPESMPSFLTEGVTYLLPKNHQSTDDPATYRPVTCLPTMYKLITSCITRRLYSHCERNNIIASEQKGCSRGAMGSKEQLIIDSIICNQAHKKRRNLFTAYLDYKKAFDSMPHEWLIKVLEIYKVDPRIVSFLKTVMSTWRTNIEISGTGIRTGTVSIKRGIFQGDSLSSLWFCMAMNPLSTILKSSRKGFNLKGNTRNMLINHLLYVDDLKLFAANRDQLECLLRLVEKFSKDVSMNFGLDKCRSLNIAGGKIQQTPLTLSNGEEIKAMLAGDLYKYLGMKQCQRIDQRVMKDELTAEFTRRMRSVLKTKLNSRNLTKAVNTYACSVLTYSFGIVKWSNTDLDHLQRKMRTLCTKANKHHPKCCVERTTIPRPQGGQGFVDIKKMAAEQLSNLRNYFVDKSNTSDLHKILIEADGSTPLLLSEHPHENTTQTDSDKIQRWREKPLHGRHLNEVTQEHVDIPASNYWLTSGRLFPETEGFLLAIQDQVVQTKNYQKYIMKDRSLTDDKCRYGCQTSETIQHITGGCQMFAGNEYKSRHDAVCKILHQELAIQLKIMQSETVPYYKYQPEVILENHHYRLYWDRTVLTNLTVANNRPDIILVKKKEKRAILIDVAIPNNNNLRQKYAEKISKYRELELQIKRQWGMSSTRTIPILISTTGVIPKSLKSNLKELDLDENLYKIMQKAVLLGTARTVRKFVGHDGHQEQPWREISQDRLAGHQARNPGPSNEGRPTQGPGEEEHRGPQSSIP

SEQ ID NO: 80 - protein, 966 aa, Propylea japonica
MKTKPRQHSNQPCPQPRLPHWQRRLEEKVQRSRQDIGRLTQYENGIRTIKLKSLVESIIYRNRKHSSYEEENTTVKQCIDTLKQKLSVYSERLRRYKESNRRKQDNISFENSEKNFYRHLDGKQQNSPNIYPNKDDMEKFWTEQLSTPTTYNKNAEWIKNEEKTQTNTAQMSLTVITEQELSDILKKMHNWKSPGPDGLHSFWLKKFNCLHSNLTNAVNEILRDPESMPSFLTEGITYLLPKNHQSTDDPATYRPVTCLPTMYKLITSCITRRLYSHCERNNIIASEQKGCSRGAMGSKEQLIIDSIICNQAHKKRRNLFTAYLDYKKPFDSMPHEWLIKVLEIYKLDPRIVSFLKTVMSTWRTNIEISGTGIRTGTVSIRRGIFQGDSLSSLWFCMAMNPLSTILKSSRKGFNLKGNTSNMLINHLLYVDDLKLIAANRDQLECLLRLVEMFSKDVSMNFGLDKCRSLNIAGGKIQQTPLTLSNGEEIKAMLAGDLYKYLGMKQCQRIDQRVMKDELTAEFTRRMKSVLKTKLNSRNLTKAVNSYACSVLTYSFGIVKWSNIDLDRLQRKMRTLCTKANKHHPKCCVERTTIPRTQGGQGFVDIKKMAAEQINNLRNYFTDKANTSDLHKILIEADCSTPLLLSEHPHENTTQTDSDKIQRWREKPLHGRHLNEVTQEHVDIPASNYWLTSGRLFPETEGFLLAIQDQVVQTKNYQKYIMKDRSLTDDRCRYGCQTSETIQHITGGCQMFAGNEYKSRHDAVCKILHQELATQLKILQSETIPYYKYQPEVILENNLYRLYWDRTVLTNLTVANNRPDRILVKKKEKRAILIDVAIPNNNNLRQKYAEKISKYRELELQIKRQWGMSSTRTISILISTTGIIPKSLKSNLKELDLDENLFKVMQKAVLLGTARTVRKFVSHDGHQEQPWRETLQNQLPRHQPRDPGQSNEGRTTQDPLILAIRDE

SEQ ID NO: 81 - protein, 1048 aa, Propylea japonica
MHRLFSEYNGTDPLSRPTLPRIRSSKKLAVILKIMNTDVIPKFLSMATQLEPIHLILYCAATTVVEVLGMKTKPRQHSNQPCPQPRLPHWQRRLEEKVQRCRQDIGRLTQYENGIRTIKLKSLVESIIYRNRKHSSYEEENTTVKQCIDTLKQKLSVYSERLRRYKESNKRKQDNISFENSEKNFYRHLDGKQQNSPNIYPNKDDMEKFWTEQLSTPTTYNKNAEWIKNEEKTQTNTAQMSLTVITEQELSDILKEMHNWKSPGPDGLHSFWLKKFNCLHSNLAKAVNEILRGPESMPSFLTEGITYLLPKNHQSTDDPATYRPVTCLPTMYKLITSCITRRLFSHCERNNIIASEQKGCSRGAMGSKEQLIIDSIICNQAHKKRRNLFTAYLDYKKAFDSMPHEWLIKVLEIYKVDPRIVSFLKTVMSTWRTNIEISGTGIRTGTVSIRRGIFQGDSLSSLWFCMAMNPLSTILKSSRKGFNVKGNTSNMLINHLLYVDDLKLIAANRDQLECLLRLVEMFSSDVSMNFGLDKCRSLNIAGGKIQQTPLTLSNGEEIKAMLAGDLYKYLGMKQCQRIDQRVMKDELTAEFTRRMRSVLKTKLNSRNLTKAVNTYACSVLTYSFGIVKWSNTDLDRLQRKMRTLCTKANKHHPKCCVERTTIPRTQGGQGFVDIKKMAAEQINNLRNYFIDKANTSDLHKILIEADCSTPLLLSEHPHENTTQTDSDKIQRWREKPLHGRHLNEVTQEHVDIPASNYWLTSGRLFPETEGFLLAIQDQVVQTKNYQKYIMKDRSLTDDRCRYGCQTSETIQHITGGCQMFAGNEYKSRHDAVCKIVHQELAIQLKILQSETIPYYKYQPEVILENNLYRLYWDRTVLTNLTVANNRPDIILVKKKEKRAILIDVAIPNNNNLRQKYAEKISKYRELELQIKRQWGMSSTRTIPILISTTGIIPKSLKSNLKELDLDENLFKVMQKAVLLGTARTVRKFVGHDGHQEQPWRETLQNQLPRHQPRDPGPSNEGRTTQDPGEEEHRRPQSSIPLILAIRDE

SEQ ID NO: 82 - protein, 1297 aa, Propylea japonica
MQPIMMVQLRSRNIESLPEDRQGMSGAGAGHDSMRDVSGRALRRRAPVIQNTTAQQEEPRRQTTAVPPPTNSATQDLQPAFTQAGLPRRRMKWTSCINETIMRIYYKITNLGQELTGYRQRLFNEFKRCFPNLQVTEQRIADQYRVILRNKLISEDRLQEIKNEVVNELNNEENHNREEHTTSGNREHNHGATHEERTTELQLPLQEDIQMDDETQNEHSSPQVHTSVEPAHKISNEERQALVERLESAMHRLFTEYNGTDPLSRPTLPRIRSSKKLAVILKIMNTDVIPKFLSMATQLETIHLILYCAATTVVEVLGMKTKPRQHSNQPCPQPRLPHWQRRLEEKVQRCRQDIGRLTQYENGIRTIKLKSLVESIIYRNRKHSSYEEENTTVKQCIDTLKQKLSVYSERLRRYKESNRRKQDNISFENSEKNFYRHLDGKQQNSPNIYPNKDDMEKFWTEQLSTPTTYNKNAEWIKNEEKTQTNTAQMSLTVITEQELSDILKEMHNWKSPGPDGLHSFWLKKFNCLHSNLTNAVNEILRDPESMPSFLTEGITYLLPKNHQSTDDPATYRPVTCLPTMYKLITSCITRRLYSHCERNNIIASEQKGCSRGAMGSKEQLIIDSIICNQAHKKRRNLFTAYLDYKKAFDSMPHEWLIKVLEIYKVDPRIVSFLKTVMSTWRTNIEISGTGIRTGTVSIRRGIFQGDSLSSLWFCMAMNPLSTILKSSRKGFNLKGNTSNMLINHLLYVDDLKLIAANRDQLECLLRLVEMFSKDVSMNFGLDKCRSLNIAGGKIQQTPLTLSNGEEIKAMLAGDLYKYLGMKQCQRIDQRVMKDELTAEFTRRMRSVLKTKLNSRNLTKAVNTYACSVLTYSFGIVKWSNTDLDRLQRKMRTLCTKANKHHPKCCIERTTIPRTQGGQGFVDIKKMAAEQINNLRNYFTDKANTSDLHKILIEADCSTPLLLSEHPHENTTQTDSDKIQRWREKPLHGRHLNEVTQEHVDIPASNYWLTSGRLFPETEGFLLAIQDQVVQTKNYQKYIIKDRSLTDDRCRYGCQTSETIQHITGGCQMFAGNEYKSRHDAVCKILHQELAIQLKILQSETIPYYKYQPEVILENNLYRLYWDRTVLTNLTVANNRPDIILVKKKEKRAILIDVAIPNNNNLRQKYAEKISKYRELELQIKRQWGMSSTRTIPILISTTGIIPKSLKSNLKELDLDENLFKVMQKAVLLGTARTVRKFVGHDGHQEQPWRETLQNQLPRHQPRDPGPSNEGRTTQDPGEEEHRRPQSSIPLILAIRDE

SEQ ID NO: 83 - protein, 1048 aa, Propylea japonica
MHRLFTEYNGTDPLSRPTLPRIRSSKKLAVILKIMNTDVIPKFLSMATQLETIHLILYCAATTVVEVLGMKTKPRQHSNQPCPQPRLPHWQRRLEEKVQRSRQDIGRLTQYENGIRTIKLKSLVESIIYRNRKHSSYEEENTTVKQCIDTLKQKLSVYSERLRRYKESNRRKQDNISFENSEKNVYRHLDGKQQNSPNIYPNKDDMEKFWTEQLSTPTTYNKNAEWIKNEEKTQTNTAQMSLTVITEQELSDILKEMHNWKSPGPDGLHSFWLKKFNCLHSNLTNEVNEILRDPESMPSFLTEGITYLLPKNHQSTDDPATYRPVTCLPTMYKLITSCITRRLYSHCERNNIIASEQKGCSRGAMGSKEQLIIDSIICNQAHKKRRNLFTAYLDYKKAFDSMPHEWLIKVLEIYKVDPRIVSFLKTVMSTWRTNIEISGTGIRTGTVSIRRGIFQGDSLSSLWFCMAMNPLSTILKSSRKGFNLKGNTSNILINHLLYVDDLKLIAANRDQLECLLRLVEMFSKDVSMNFGLDKCRSLNIAGGKIQQTPLTLSNGEEIKAMLAGDLYKYLGMKQCQRIDQRVMKDELTAEFTRRMRSVLKTKLNSRNLTKAVNTYACSVLTYSFGIVKWSNTDLDRLQRKMRTLCTKANKHHPKCCVERTTIPRTQGGQGFVDIKKMAAEQINNLRNYFTDKANTSDLHKILIEADCSTPLLLSEHPHENTTQTDSDKIQRWREKPLHGRHLNEVTQEHVDIPASNYWLTSGRLFPETEGFLLAIQDQVVQTKNYQKYIMKDRSLTDDRCRYGCQTSETIQHITGGCQMFAGNEYKSRHDAVCKILHQELATQLKILQSETIPYYKYQPEVILENNLYRLYWDRTVLTNLTVANNRPDIILVKKKEKRAILIDVAIPNNNNLRQKYAEKISKYRELELQIKRQWGMSSTRTIPILISTTGIIPKSLKSNLKELDLDENLFKVMQKAVLLGTARTVRKFVGHDGHQEQPWRETLQNQLPRHQPRDPGPSNEGRTTQDPGEEEHRRPQSSIPLILAIRDE

SEQ ID NO: 84 - protein, 1297 aa, Propylea japonica
MQPIMMVQLRSRNIESLPEDRQGMSGAGAGHDSIRDVSGRALRRRAPVIQNTTAQQEEPRRQTTAVPPPTNSATQDLQPAFTQAGLPRRRMKWTSCINETIMRIYYKITNLGQELTGYRQRLFNEFKRCFPDLQVTEQRIADQYRVILRNKLISEDRLQEIKNEVVNELNNEENHNREEHTTSGNREHNHGATHEERTTELQLPLQEDIQTDDETQNEHSSPQVHTSVETAHKISNEERQALVERLESAMHRLFTEYNGTDPLSRPTLPRIRSSKKLAVILKIMNTDVIPKFLSMATQLETIHLILYCAATTVVEVLGMKTKPRQHSNQPCPQPRLPHWQRRLEEKVQRSRQDIGRLTQYENGIRTIKLKSLVESIIYRNRKHSSYEEENTTVKQCIDTLKQKLSVYSERLRRYKESNRRKQDNISFENSEKNFYRHLDGKQQNSPNIYPNKDDMEKFWTEQLSTPTTYNKNAEWIKNEEKTQTNTAQMSLTVITEQELSDILKEMHNWKSPGPDGLHSFWLKKFNCLHSNLTNAVNEILRDPESMPSFLTEGITYLLPKNHQSTDDPATYRPVTCLPTMYKLITSCITRRLYSHCERNNIIASEQKGCSRGAMGSKEQLIIDSIICNQAHKKRRNLFTAYLDYKKAFDSMPHEWLIKVLEIYKVDPRIVSFLKTVMSTWRTNIEISGTGIRTGTVSIRRGIFQGDSLSSLWFCMAMNPLSTILKSSRKGFNLKGNTSNMLINHLLYVDDLKLIAANRDQLECLLRLVEMFSKDVSMNFGLDKCRSLNIAGGKIQQTPLTLSNGEEIKAMLAGDLYKYLGMKQCQRIDQRVMKDELTAEFTRRMRSVLKTKLNSRNLTKAVNTYACSVLTFSFGIVKWSNTDLDRLQRKMRTLCTKANKHHPKCCVERTTIPRTQGGQGFVDIKKMAAEQINNLRNYFTDKANTSDLHKILIEADCSTPLLLSEHPHENTTQTDSDKIQRWREKPLHGRHLNEVTQEHVDIPASNYWLTSGRLFPETEGFLLAIQDQVVQTKNYQKYIMKDRSLTDDRCRYGCQTSETIQHITGGCQMFAGNEYKSRHDAVCKILHQELATQLKILQSETIPYYKYQPEVILENNLYRLYWDRTVLTNLTVANNRPDIILVKKKEKRAILIDVAIPNNNNLRQKYAEKISKYRELELQIKRQWGMSSTRTIPILISTTGIIPKSLKSNLKELDLDENLFKVMQKAVLLGTARTVRKFVGHDGHQEQPWRETLQNQLPRHQPRNPGPSNEGRTTQDPGEEEHRTPQSSIPLILAIRDE

SEQ ID NO: 85 - protein, 1282 aa, Propylea japonica
MQPIMMVQLRSRNIESLPEDRQGMSGAGAGHDSMRDVSGRALRRRAPVIQNTTAQQEEPRRQTTAVPPPTNSATQDLQPAFTQAGLPRRRMKWTSCINETIMRIYYKITNLGQELTGYRQRLFNEFKRCFPDLQVTEQRIADQYRVILRNKLISEDRLQEIKNEVVNELNNEENHNREEHTTSGNREHNHGATHEERTTELQLPLQEDIQTDDETQNEHSSPQVHTSVETAHKISNEERQALVERLESAMHRLFTEYNGTDPLSRPTLPRIRSSKKLAVILKIMNTDVIPKFLSMATQLETIHLILYCAATTVVEVLGMKTKPRQHSNQPCPQPRLPHWQRRLEEKVQRSRQDIGRLTQYENGIRTIKLKSLVESIIYRNRKHSSYEEENTTVKQCIDTLKQKLSVYSERLRRYKESNRRKQDNISFENSEKNFYRHLDGKQQNSPNIYPNKDDMEKFWTEQLSTPTTYNKNAEWIKNEEKTQTNTAQMSLTVITEQELSDILKGMHNWKSPGPDGLHSFWLKKFNCLHSNLTNAVNEILRDPESMPSFLTEGITYLLPKNHQSTDDPATYRPVTCLPTMYKLITSCITRRLYSHCERNNIIASEQKGCSRGAMGSKEQLIIDSIICNQAHKKRSNLFTAYLDYKKAFDSMPHEWLIKVLEIYKVDPRIVSFLKTVMSTWRTNIEISGTGIRTGTVSIRRGIFQGDSLSSLWFCMAMNPLSTILKSSRKGFNLKGNTSNMLINHLLYVDDLKLIAANRDQLECLLRLVEMFSKDVSMNFGMDKCRSINIAGGKIQQTPLTLSNGEEIKAMLAGDLYKYLGMKQCQRIDQRVMKDELTAEFTRRMRSVLKTKLNSRNLTKAVNTYACSVLTYSFGIVKWSNTDLDRLQRKMRTLCTKANKHHPKCCVERTTIPRTQGGQGFVDIKKMAAEQINNLRNYFTDKANTSDLHKILIEADCSTPLLLSEHPHENTTQTDSDKIQRWREKPLHGRHLNEVTQEHVDIPASNYWLTSGRLFPETEGFLLAIQDQVVQTKNYQKYIMKDRSLTDDRCRYGCQTSETIQHITGGCQMFAGNEYKSRHDAVCKILHQELAIQLKILQSETIPYYKYQPEVILENNLYRLYWDRTVHTNLTVANNRPDIILVKKKEKRAILIDVAIPNNNNLRQTYAEKISKYRELELQIKRQWGIIPKSLKSNLKELDLDENLFKVMQKAVLLGTARTVRKFVGHDGHQEQPWRETLQNQLPRHQPRDPGPSNEGRTTQDPGEEEHRRPQSSIPLILAIRDE

SEQ ID NO: 86 - protein, 1207 aa, Propylea japonica
MKWTSCINETIMRIYYKITNLGQELTGYRQRLFNEFKRCFPDLQVTEQRIADQYRVILRNKLISEDRLQEIKNEVVNELNNEENHNREEHTTSGNREHNHGATHEERTTELQLPLQEDIQTDDETQNEHSSPQVHTSVETAHKISNEERQALVERLESAMHRLFTEYNGTDPLSRPTLPRIRSSKKLAVILKIMNTDVIPKFLSMATQLETIHLILYCAATTVVEVLGMKTKPRQHSNQPCPQPRLPHWQRRLEEKVQRCRQDIGRLTQYENGIRTIKLKSLVESIIYRNRKHSSYEEENTTVKQCIDTLKQKLSVYSERLRRYKESNRRKQDNISFENSEKNFYRHLDGKQQNSPNIYPNKDDMEKFWTEQLSTPTTYNKNAEWIKNEEKTQTNTAQMSLTVITEQELSDILKEMHNWKSPGPDGLHSFWLKKFNCLHSNLTNAVNEILRDPESMPSFLTEGITYLLPKNHQSTDDPATYRPVTCLPTMYKLITSCITRRLYSHCERNNIIASEQKGCSRGAMGSKEQLIIDSIICNQAHKKRRNLFTAYLDYKKAFDSMPHEWLIKVLEIYKVDPRIVSFLKTVMSTWRTNIEISGTGIRTGTVSIRRGIFQGDSLSSLWFCMAMNPLSTILKSSRKGFNLKGNTSNMLINHLLYVDDLKLIAANRDQLECLLRLVEMFSKDVSMNFGLDKCRSLNIAGGKIQQTPLTLSNGEEIKAMLAGDLYKYLGMKQCQRIDQRVMKDELTAEFTRRMRSVLKTKLNSRNLTKAVNTYACSVLTYSFGIVKWSNTDLDRLQRKMRTLCTKANKHHPKCCVERTTIPRTQGGQGFVDIKKMAAEQINNLRNYFTDKANTSDLHKILIEADCSTPLLLSEHPHENTTQTDSDKIQRWREKPLHGRHLNEVTQEHVDIPASNYWLTSGRLFPETEGFLLAIQDQVVQTKNYQKYIMKDRSLTDDRCRYGCQTSETIQHITGGCQMFAGNEYKSRHDAVCKILHQELAIQLKILQSETIPYYKYQPEVILENNLYRLYWDRTVLTNLTVANNRPDIILVKKKEKRAILIDVAIPNNNNLRQKYAEKISKYRELELQIKRQWGMSSTRTIPILISTTGIIPKSLKSNLKELDLDENLFKVMQKAVLLGTARTVRKFVGHDGHQEQPWRETLQNQLPRHQPRDPGPSNEGRTTQDPGEEEHRRPQSSIPLILAIRDE

SEQ ID NO: 87 - protein, 979 aa, Propylea japonica
MKTKPRQHSNQPCPQPRLPHWQRRLEEKVQRSRQDIGRLTQYENGIRTIKLKSLVESIIYRNRKHSSYEEENTTVKQCIDTLKQKLSVYSERLRRYKESNRRKQDNISFENSEKNFYRHLDGKQQNSPNIYPNKDDMEKFWTEQLSTPTTYNKNAEWIKNEEKTQTNTAQMSLTVITEQELSDILKGMHNWKSPGPDGLHSFWLKKFNCLHSNLTNAVNEILRDPESMPSFLTEGITYLLPKNHQSTDDPATYRPVTCLPTMYKLITSCITRRLYSHCERNNIIASEQKGCSRGAMGSKEQLIIDSIICNQAHKKRRNLFTAYLDYKKAFDSMPHEWLIKVLEIYKVDPRIVSFLKTVMSTWRTNIEISGTGIRTGTVSIRRGIFQGDSLSSLWFCMAMNPLSTILKSSRKGFNLKGNTSNMLINHLLYVDDLKLIAANRDQLECLLRLVEMFSKDVSMNFGLDKCRSLNIAGGKIQQTPLTLSNGEEIKAMLAGDLYKYLGMKQCQRIDQRVMKDELTAEFTRRMRSVLKTKLNSRNLTKAVNTYACSVLTYSFAIVKWSNTDLDRLQRKMRTLCTKANKHHPKCCVERTTIPRTQGGQGFVDIKKMAAEQINNLRNYFTDKANTSDLHKILIEADCSTPLLLSEHPHENTTQTDSDKIQRWREKPLHGRHLNEVTQEHVDIPASNYWLTSGRLFPETEGFLLAIQDQVVQTKNYQKYIMKDRSLTDDRCRYGCQTSETIQHITGGCQMFAGNEYKSRHDAVCKILHQELAIQLKILQSETIPYYKYQPEVILENNLYRLYWDRTVLTNLTVANNRPDIILVKKKEKRAMLIDVAIPNNNNLRQKYAEKISKYRELELQIKRQWGMSSTRTIPILISTTGMIPKSLKSNLKELDLDENLFKVMQKAVLLGTARTVRKFVGHDGHQERPWRETLQNQLPRHQPRDPGPSNEGRTTQDPGEEEHRRPQSSIPLILAIRDE

SEQ ID NO: 88 - protein, 1048 aa, Propylea japonica
MHRLFSEYNGTDPLSRPTLPRIRSSKKLAVILKIMNTDVIPKFLSMATQLETIHLILYCAATTVVEVLGMKTKPRQHSNQPCPQPRLPHWQRRLEEKVQRCRQDIGRLTQYENGIRTIKLKSLVESIIYRNRKHSSYEEENTTIKQCIDTLKQKLSVYSERLRRYKESNRRKQDNISFENSEKNFYRHLDGKQQNSPNIYPNKDDMEKFWTEQLSTPTTYNKNAEWIKNEEKTQTNTAQMSLTVITEQELSDILKEMHNWKSPGPDGLHSFWLKKFNCLHSNLTKAVNEILRGAESMPSFLTEGITYLLPKNHQSTDDPATYRPVTCLPTMYKLITSCITRRLYSHCERNNIIASEQKGCTRGAMGSKEQLIIDSIICNQAYKKRRNLFTAYLDYKKAFDSMPHEWLIKVLEIYKVDTRIVSFLKTVMSTWRTNIEISGTGIRTGTVSIRRGIFQGDSLSSLWFCMEMNPLSTILKSSRKGFNLKGNTSNMLINHLLYVDDLKLIAANRDQLECLLRLVEMFSKDVSMNFGLDKCRSLNIAGGKIQQTPLTLSNGEEIKAMLAGDLYKYLGMKQCQRIDQRVMKDELTAEFTRRMRSVLKTKLNSRNLTKAVNTYACSVLTYSFGIVKWSNTDLDRLQRKMKTLCTKANKHHPKCCVERTTIPRTQGGQGFVDIKKMAAEQINNLRNYFIDKANTSDLPKILIEADCSTPLLLSEHPQENTTQTDSDKIQRWREKPLHGRHLNEVTQEHVDIPASNYWLTSGRLFPETEGFLLAIQDQVVQTKNYQKYIMKDRSLTDDRCRYGCQTSETIQHITGGCQMFAGNEYKSRHDAVCKILHQELAIQLKILQSETIPYYKYQPEVILENNLYRLYWDRTVHTNLTVANNRSDIILVKKKEKRAILIDVAIPNNNNLRQKYTEKISKYRELELQIKRQWGMSSTRTIPILISTTGIIPKSLKSNLKELDLDENLFKVMQKAVLLSTARTARKFVGHDGHQEQPWRETLQNQLPRHQPRDPGPSNEGRTTQDPGEEEHRRPQSSIPPILAIRDE

SEQ ID NO: 89 - protein, 1014 aa, Propylea japonica
MNTDVIPKFISMATQLETIHLILYCAATTVVEVLGMKTKPRQHTIQPCPQPRLPHWQRRLEEKVQRCRQDIGRLTQYENGIRTIKLKSLVESIIYRNRKHSSYEEENTTVKQCIDTLKQKLSVYSERLRRYKDSNRRKQDNISFENSEKNFYRHLDGKQQNSSNIYPNKDDMEKFWTEQLSTPTSYNTNAEWIKDEEKTQTNTEQMPLTVITPQELSDILKEMHNWKSPGPDGLHSFWLKKFNCLHSSLTKAVNEILRVPESMPSFLTEGVTYLLPKNHQSTDDPATYRPVTCLPTMYKLITSCITRRLYSHCERNNIIASEQKGCSRGAMGSKEQLIIDSIICNQAHKKRRNLFTAYLDYKKAFDSMPHEWLIKVLEIYKVDPRIVSFLKTVMSTWRTNIEISGTGIRTGTVSIKRGIFQGDSLSSLWFCMAMNPLSTILKSSRKGFNLKGNTRNMLINHLLYVDDLKLFAANRDQLECLLRLVEKFSKDVSMNFGLDKCRSLNIAGGKIQQTPLTLSNGEEIKAMLAGDLYKYLGMKQCQRIDQRVMKDELTAEFTRRMRSVLKTKLNSRNLTKAVNTYACSVLTYSFGIVKWSNTDLDHLQRKMRTLCTKANKHHPKCCVERTTIPRPQGGQGFVDIKKMAAEQLSNLRNYFVDKSNTSDLHKILIEADGSTPLLLSEHPHENTTQTDSDKIQRWREKPLHGRHLNEVTQEHVDIPASNYWLTSGRLFPETEGFLLAIQDQVVQTKNYQKYIMKDRSLTDDKCRYGCQTSETIQHITGGCQMFAGNEYKSRHDAVCKILHQELAIQLKIMQSETVPYYKYQPEVILENHHYRLYWDRTVLTNLTVANNRPDIILVKKKEKRAILIDVAIPNNNNLRQKYAEKISKYRELELQIKRQWGMSNTRTIPILISTTGVIPKSLKSNLKELDLDENLYKIMQKAVLLGTARTVRKFVGHGGHQEQPWREISQDRLAGHQARNPGPSNEGRPTQGPGEEEHRGPQSSIPLILAIRDE

SEQ ID NO: 90 - protein, 1297 aa, Propylea japonica
MQPIMMVQLRSRNIESLPEDRQGMSGAGAGHDSMRDVSGRALRRRAPVIQNTTAQQEEPRRQTTAVPPPTNSATQDLQPAFTQAGLPRRRMKWTSCINETIMRIYYKITNLGQELTGYRQRLFNEFKRCFPDLQVTEQRIADQYRVILRNKLISEDRLQEIKNEVVNELNNEENHNREEHTTSGNTEHNDGATHEERTTELQLPLQEDIQTDDETQNEHSSPQVHTSVETAHKISNEERQALVERLESAMHRLFSEYNGTDPLSRPTLPRIRSSKKLAVILKIMNTDVIPKFLSMATQLETIHLILYCAATTVVEVLGMKTKPRQHSNQPCPQPRLPHWQRRLEEKVQRCRQDIGRLTQYENGIRTIKLKSLVESIIYRNRKHSSYEEENTTVKQCIDTLKQKLSVYSERLRRYKESNRRKQDNISFENSEKNFYRHLDGKQQNSPNIYPNKDDMEKFWTEQLSTPTTYNKNAEWIKNEEKTQTNTAQMSLTVITEQELSDILKEMHNWKSPGPDGLHSFWLKKFNCLHSNLTNAVNEILRGPESMPSFLTEGITYLLPKNHQSTDDPATYRPVTCLPTMYKLITSCITRRLYSHCERNNIIASEQKGCSRGAMGSKEQLIIDSIICNQAHKKRRNLFTAYLDYKKAFDSMPHEWLIKVLEIYKVDPRIVSFLRTVMSTWRTNIEIRGTGIRTGTVSIRRGIFQGDSLSSLWFCMAMNPLSTILKSSRKGFNLKGNTSNMLINHLLYVDDLKLIAANRDQLECLLRLVEMFSKDVSMNFGLDKCRSLNIAGGKIQQTPLTLSNGEEIKAMLAGDLYKYLGMKQCQRIDQRVMKDELTAEFTRRMRSVLKTKLNSRNLTKAVNTYACSVLTYSFGIVKWSNTDLDRLQRKMRTLCTKANKHHPKCCVERTTIPRTQGGQGFVDIKKMAAEQINNLRNYFIDKANTSDLHKILIEADCSTPLSLSEHPHENTTQTDSDKIQRWREKPLHGRHLNEVTQEHVDIPASNYWLTSGRLFPETEGFLLAIQDQVVQTKNYQKYIMKDRSLTDDRCRYGCQTSETIQHITGGCQMFAGNEYKSRHDAVCKILHQELAIQLKILQSETIPYYKYQPEVILENNLYRLYWDRTVLTNLTVANNRPDIILVKKKEKRAILIDVAIPNNNNLRQKYAEKISKYRELELQIKRQWGMSSTRTIPILISTTGIIPKSLKSNLKELDLDENLFKVMQKAVLLGTARTVRKFVGHDGHQEQPWRETLQNQLPRLQPRDPGPSNQGRTTQDPGEEEHRRSQSSIPLILAIRDE

SEQ ID NO: 91 - protein, 766 aa, Propylea japonica
MEKFWTEQLSTPTTYNKNAEWIKNEEKTQTNTAQMSLTVITEQELSDILKEMHNWKSPGPDGLHSFWLKKFNCLHSNLTNAVNEILRDPESMPSFLTEGITYLLPKNHQSTDDPATYRPVTCLPTMYKLITSCITRRLYSHCERNNIIASEQKGCSRGAMGSKEQLIIDSIICNQAHKKRRNLFTAYLDYKKAFDSMPHEWLIKVLEIYKVDPRIVSFLKTVMSTWRTNIEISGTGIRTGTVSIRRGIFQGDSLSSLWFCMAMNPLSTILKSSRKGFNLKGNTSNMLINHLLYVDDLKLIAANRDQLECLLRLVEMFSKDVSMNFGLDKCRSLNIAGGKIQQTPLTLSNGEEIKAMLAGDLYKYLGMKQCQRIDQRVMKDELTAEFTRRMRSVLKTKLNSRNLTKAVNTYACSVLTYSFGIVKWSNTDLDRLQRKMRTLCTKANKHHPKCCVERTTIPRTQGGQGFVDIKKMAAEQINNLRNYFTDKANTSDLHKILIEADCSTPLLLSEHPHENTTQTDSDKIQRWREKPLHGRHLNEVTQEHVDIPASNYWLTSGRLFPETEGFLLAIQDQVVQTKNYQKYIMKDRSLTDDRCRYGCQTSETIQHITGGCQMFAGNEYKSRHDAVCKILHQELAIQLKILQSETIPYYKYQPEVILENNLYRLYWDRTVLTNLTVANNRPDIILVKKKEKRAILIDVAIPNNNNLRQKYAEKISKYRELELQIKRQWGMSSTRTIPILISTTGIIPKSLKSNLKELDLDETCLK

SEQ ID NO: 92 - protein, 1296 aa, Propylea japonica
MQPIMMVQLRSRNIESLPEDRQGMSGAGAGHDSMRDVSGRALRRRAPVIQNTTAQQEEPRRQTTAVPPPTNSATQDLQPAFTQAGLPRRRMKWTSCINETIMRIYYKITNMGQELTGYRQRLFNEFKRCFPDLQVTEQRIADQYRVILRNKLISEDRLQEIKNEVVNELNNEENHNREEHTTSENREHNHGATHEERTTELQLPLQEDIQTDDETQNEHSSPQVHTSVETAHKISNEERQALVERLESAMHRLFSEYNGTDPLSRPTLPRIRSSKKLAVTLKIMNTDVVPKFLSMATQLETIHLILYCAATTVVEVLGIKTKPRQHSNQPCPQPRLPHWQRRLEEKVQRCRQDIGRLTQYENGIRTIKLKSLVESIIYRNRKHSSYEEENTTVKQCIDTLKQKLSVYSERLRRYKESNRRKQDNISFENSEKNFYRHLDGKQQNSPNIYPNKDDMEKFWTEQLSTPTTYNKNSEWIKNEEKTQTNTAQMSLTVITEQELSDILKEMHNWKSSEPDGLHSFWLKKFNCLHSNLTNAVNEILRDPESMPSFLTEGITYLLPKNHQSTDDPATYRPVTCLPTMYKLITSCITRRLYSHCERNNIIASEQKGCSRGAMGSKDQLIIDSIICNQAHKKRRNLFTAYLDYKKAFDSMPHEWLIKVLEIYKVDPRIVSFLKTVMSTWRTNIEISGTGIRTGTVSIRRGIFQGDSLSSLWFCMAMNPLSTILKSSRKGFNLKGNTSNMLINHLLYVDDLKLIAANRDQLECLLRLVEMFSKDVSMNFGLDKCRSLNIAGGKIQQTPLTLSNGEEIKAMLAGDLYKYLGMKQCQRIDQRVMKDELTAEFTRRMRSVLKTKLNSRNLTKAVNTYACSVLTYSFGIVKWSNTDLDRLQRKMRTLCTKANKHHPKCCVERTTIPRTQGGQGFVDIKKMAAELNNLRKYFTDKANTSDLHKILIEADCSTPLLLSEHPHENTTQTDSDKIQRWREKPLNGRHLNEVTQEHVDIPASNYWLTSGRLFPETEGFLLAIQDQVVQTKNYQKYIMKDRSLTDDRCRYGCQTSETIQHITGGCQMFAGNEYKSRHDAVCKILHQELAVQLKILQSETIPYYKYQPEVILENNLYRLYWDRTVLTNLTVANNRPDIILVKKKEKRAILIDVAIPNNNNQRQKYAEKISKYRELVLQIKRQWGMSSTRTIPILISTTGIIPKSLKSNLKELDLDENLFKVMQKAVLLGTARTVRKFVGHDGHQEQPWRETLQNQLPRHQPRDPGPSNEGRTTQDPGEEEHRRPQSSIPLILAIRDE

SEQ ID NO: 93 - protein, 1266 aa, Propylea japonica
MARWTPDEISTLKRRMNEKNGVLIGEDLENLKQHIPGRSTAAIKKKYLEIKGNPNIAGEQQRESQTTMKGAKWTEEEETRLVQKYSERQESQSGARIRAILNLFPGRSEKAIATKLREKYTNIYYMRSHLTENDNPSQTVQEVRPPLEEPPPSQLYNANLTSLPIPEQVTNLVDELLLPEVECVAPPPQLDNENLTSLPTEQQVANLVDELLPPEVGCALDPDGDEEDVNRRAEEPREQSYNGDVSVLLEKFEKMLKSTGKNKQKIAQFYLRPHDRGLAMALDLILKNKIHELEESRRTEHSKRVAIKNAIYTAGRLLSKEIGREETARNTPLYRKTENKIKKYTKHVDNAKKILEVRGKLSKPLLKEMEVIKKLKMTVKQYINSTEERLRLLKEQAQQQKKRHDRQKLRSRFFKTPSMRILEKSANKELTPDLDAVEAYYENTYRKETENRPTPIFNQWLSKLKQFSNTVDNSNQTDTEDLEKKINTVLKRLSPWKAPGEDGIPTYLYKIFTSAKEYLIKSTILFLQGNRELSQVDTRATVTLIYKKGDAKNPGSYRPIAVLNADYKILTAVMTKIIEQHLPDWAIPPEQLARENIWGTVHGFLLDKSISQVAKMRRTRHYSAWYDFSKAYDSVHHRDLKRLIDCLPINLKIRRLLKNMMSKWTIRVRVGKTMTKEISIRRGLFQGDPAAPLFFKLLTGGLISHIKTDKKINRISRGKHQLIAFMDDFKCHGPNKKSLEIITIELEEGAAEIGLELNKAKCGYYTRDLNNQEDNDSAPFLPEIREGYKYLGLHQLERDTIENYEDIEKKIEQKVQEIAKSDLTTPQKISLINNTVNPAASYVLGNIYTSEKRSSTLKKCRDIDTKVRKILTANNIKGKTQSNARLYLSTQKGGLGLRPIELEVELQFIRKGIYLQKHAEMKEALKAYQALKKAGWRNPISDFDYILEKYEIEFDLDEEIDPKKCTRDIIKKIQVKHQIITEKEWSSNLSYAKNVLGEPNILFPANSSPSMDSWRLSVLLSAAEEQLHGLGANPNNRRRCRLGCEADENSYHVACACPSRAITTRHDFVVHWVLKTLLRGLGAPYELERSLQFGKATICCELGNAKIQAGHKILTGKKLYHNKPDIMVKTSDPDIIYLIEVSVSHIQNFRQQEELKRARYTINSAKKLDFFNFREAQRDLNLATELENLYRCPVKLGVFVIGCYGEIIQTQEHNNFCSIMREIGLGRRDIQLLKNKASYSVAVSTTNMLLQRMRDGRDGLIQDANC

SEQ ID NO: 94 - protein, 1256 aa, Coccinella septempunctata
MARWTPDEISTLKIKMNEKNGILISGDFDNLKEYIPGRSTAAIKKKYLEIKGTQSIPDVFQREPQTTSKGAKWTEEEETRLVQKYSMRTENQSGARIKAILSLFPNRTEKAIATKLREKYPDIYYMRVSTSESESFRRTEPQPPADPPPLLQVTQQPVAVTSTIPAAAPPQIRTRQRKETPPEPFATTIQISDKNLVDEHLQTRIETGTGPDNNKRNVKRREERLEGPPYDEFTQDVLRKYENILKSTGRNKQKIAQFYIRPQDGRMLEATDRILEEKISEIKRTEGTEHFKRTAIKKAIYAAGRLLSREIGKREITGKIPLYKITDRKIKKFMKHLENAKKIQKTRGKLNRPLLREMEIIKKLKMSVKQYISSTEERLKLLKEQLKQQKNRHEKQKLRSRFWKTPSMKILGKPTGDVRIPNVTKIETYYTNIYKKESCEQPTPIFNGWLSKLKKYSNTIDTSDQTDTGELKKKITNILKRTAPWKAPGEDGIPAYLYKILMSAQEYLVESTIAYLQGRKDLTQVDTRATITLIYKKGDEEDPANYRPIAVLNADYKILTAVMTKIIKQRLPEWAIPPEQLARENIWGTVHGFLLDKSFTQVARMRRTKHYSAWYDLSKAYDSIHHRDLKRLIDCLPINPAIRRLFKNAMKKWTIRIKAGKNITKEIPVQRGLFQGDPASPLLFILATGGLLSHVRSDKKINRSSRGKHQLIAFMDDFKCHTPNKKSLELITKELEEGASEIGLRLNKAKCGYYTRGMESQDDNDSSPFLPEIREGYKYLGLHQLERDTIDNYDDIQIKIEEKVREIAESDLTTMQKITLINTSVNPAATYVLGNIFTDEKRATTLKKSRDIDAKIRKILVEQNIKGKTQSNARLYLSTQKGGLGLRPLELEVELQFVRKGVYLQKHEEMKEALIAYQALKNAGWRNPISDFEYILEKYEIEVDLSEESDTPKLTKDLIKRIEERHQAEIEKEWSSNLSYAKNVLKEPNIRFPANSSPNMDSWRLGVLLSASEEQIHGLGANPNNRRKCQLGCGLDENSYHVACACPSRAATTRHDFIVHWVLKILLQGLGAPDELRRELQFGKASLNCDIGKIKIQAGNKILTGKKIYHNKPDIMVRTTDPDKIYLIEVAVSHIQNLRQQEELKRTRYAVNSTKKLDFSNYREAQRDLNLVTELENLYKCPVKLGVYVVGCFGELVLTQEHKNFCSILEEIDLGKEEIKKVHNKCSYSVAVSTTNMILRRIRDGMGGMGQDTNII

SEQ ID NO: 95 - protein, 1206 aa, Coccinella septempunctata
MARWTTDEISTLKIKMNEKNGILISGDFDNLKEYIPGRSTAAIKKKYLEIKGTQSIPDVFQREPQTTSKGAKWTEEEETRLVQKYSMRTENQSGARIKATLSLFPNRTEKAIATKLREKYTDIYYMRVSASESESFRRTEPQPPADPPPPADPPPLLQVTQQPVAVTSTIPAAAPPQIRTRQRKETPPEPFATTIQISDKNLVDEHLQTRIETGTGPDNNKRNVKKREERPEGPPYDELTQDVLRKYENILKSTGRNKQKIAQFYIRPQDGRMLEATDRILEGKISEIKRTEGTEHFKRTAIKKAIYAAGRLLSREIGKREITGKIPLYKITDKKIKKFMKHLENAKKIQKTRGKLNRPLLREMEIIKKLKMSVKQYISSTEERLKLLKEQLKQQKNRHEKQKLRSRFWKTPSMKILGKPTGDVRIPNVTKIETYYTNIYKKESCEQPTPIFNGWLSKLKKYSNTIDTSDQTDTGELKKKITNILKRTAPWKAPGEDGIPAYLYKILMSAQEYLVESTIAYLQGRKDLTQVDTRATITLIYKKGDEEDPANYRPIAVLNADYKILTAVMTKIIKQRLPEWAIPPEQLARENIWGTVHGFLLDKSFTQVARMRRTKHYSAWYDLSKAYDSIHHRDLKRLIDCLPINPAIRRLFKNAMKKWTIRIKAGKNITKEIPVQRGLFQGDPASPLLFILATGGLLSHVRSDKKINRSSRGKHQLIAFMDDFKCHTPNKKSLELITKELEEGASEIGLRLNKAKCGYYTREMESQDDNDSSPFLPEIREGYKYLGLHQLERDTIDNYDDIQIKIEEKVREIAESDLTTMQKITLINTSVNPAATYVLGNIFTDEKRATTLKKSRDIDAKIRKILVEQNIKGKTQSNARLYLSTQKGGLGLRPLELEVELQFVRKGVYLQKHEEMKEALIAYQALKNAGWRNPISDFEYILEKYEIEVDLSEESDTPKLTKDLIKRIEERHQAEIEKEWSSNLSYAKNVLKEPNIRFPANSSPNMDSWRLGVLLSASEEQIHGLGANPNNRRKCQLGCGLDENSYHVACACPSRAATTRHDFIVHWVLKILLQGLGAPDELRRELQFGKASLNCDIGKIKIQAGNKILTGKKIYHNKPDIMVRTTDPDKIYLIEVAVSHIQNLRQQEELKRTRYAVNSTKKLDFSNYREAQRDLNLVTELENLYKCPVKLGVYRSTKTSAPFSKR

SEQ ID NO: 96 - protein, 1262 aa, Coccinella septempunctata
MARWTTDEISTLKIKMNEKNGILISGDFDNLKEYIPGRSTAAIKKKYLEIKGTQSIPDVFQREPQTTSKGAKWTEEEETRLVQKYSMRTENQSGARIKAILSLFPNRTEKAIATKLREKYTDIYYMRVSASESESFRRTEPQPPADPPPPADPPPLLQVTQQPVAVTSTIPAAAPPQIRTRQRKETPPEPFAKTIQISDKNLVDEHLQTRIETGTGPDNNKRNVKKREERPEGPPYDELTQDVLRKYENILKSTGRNKQKIAQFYIRPQDGRMLEATDRILEGKISEIKRTEGTEHFKRTAIKKAIYAAGRLLSREIGKREITGKIPLYKITDKKIKKFMKHLENAKKIQKTRGKLNRPLLREMEIIKKLKMSVKQYISSTEERLKLLKEQLKQQKNRHEKQKLRSRFWKTPSMKILGKPTGDVRIPNVTKIETYYTNIYKKESCEQPTPIFNGWLSKLKKYSNTIDTSDQTDTGELKKKITNILKRTAPWKAPGEDGIPAYLYKILMSAQEYLVESTIAYLQGRKDLTQVDTRATITLIYKKGDEEDPANYRPIAVLNADYKILTAVMTKIIKQRLPEWAIPPEQLARENIWGTVHGFLLDKSFTQVARMRRTKHYSAWYDLSKAYDSIHHRDLKRLIDCLPINPAIRRLFKNAMKKWTIRIKAGKNITKEIPVQRGLFQGDPASPLLFILATGGLLSHVRSDKKINRSSRGKHQLIAFMDDFKCHTPNKKSLELITKELEEGASEIGLRLNKAKCGYYTREMESQDDNDSSPFLPEIREGYKYLGLHQLERDTIDNYDDIQIKIEEKVREIAESDLTTMQKITLINTSVNPAATYVLGNIFTDEKRATTLKKSRDIDAKIRKILVEQNIKGKTQSNARLYLSTQKGGLGLRPLELEVELQFVRKGVYLQKHEEMKEALIAYQALKNAGWRNPISDFEYILEKYEIEVDLSEESDTPKLTKDLIKRIEERHQAEIEKEWSSNLSYAKNVLKEPNIRFPANSSPNMDSWRLGVLLSASEEQIHGLGANPNNRRKCQLGCGLDENSYHVACACPSRAATTRHDFIVHWVLKILLQGLGAPDELRRELQFGKASLNCDIGKIKIQAGNKILTGKKIYHNKPDIMVRTTDPDKIYLIEVAVSHIQNLRQQEELKRTRYAVNSTKKLDFSNYREAQRDLNLVTELENLYKCPVKLGVYVVGCFGELVLTQEHKNFCSILEEIGLGKEEIKKVHNKCSYSVAVSTTNMILRRIKDGMGGMGQDTNII

SEQ ID NO: 97 - protein, 1262 aa, Coccinella septempunctata
MARWTTDEISTLKIKMNEKNGILISGDFDNLKEYIPGRSTAAIKKKYLEIKGTRSIPDVFQREPQTTSKGAKWTEEEETRLVQKYSMRTENQSGARIKAILSLFPNRTEKAIATKLREKYTDIYYMRVSASESESFRRTEPQPPADPPPPADPPPLLQVTQQPVAVTSTIPAAAPPQIRTRQRKETPPEPFATTIQISDKNLVDEHLQTRIETGTGPDNNKRNVKKREERPEGPPYDELTQDVLRKYENILKSTGRNKQKIAQFYIRPQDGRMLEATDRILEGKISEIKRTEGTEHFKRTAIKKAIYAAGRLLSREIGKREITGKIPLYKITDKKIKKFMKHLENAKKIQKTRGKLNRPLLREMEIIKKLKMSVKQYISSTEERLKLLKEQLKQQKNRHEKQKLRSRFWKTPSMKILGKPTGDVRIPNVTKIETYYTNIYKKESCEQPTPIFNGWLSKLKKYSNTIDTSDQTDTGELKKKITNILKRTAPWKAPGEDGIPAYLYKILMSAQEYLVESTIAYLQGRKDLTQVDTRATITLIYKKGDEEDPANYRPIAVLNADYKILTAVMTKIIKQRLPEWAIPPEQLARENIWGTVHGFLLDKSFTQVARMRRTKHYSAWYDLSKAYDSIHHRDLKRLIDCLPINPAIRRLFKNAMKKWTIRIKAGKNITKEIPVQRGLFQGDPASPLLFILATGGLLSHVRSDKKINRSSRGKHQLIAFMDDFKCHTPNKKSLELITKELEEGASEIGLRLNKAKCGYYTREMESQDDNDSSPFLPEIREGYKYLGLHQLERDTIDNYDDIQIKIEEKVREIAESDLTTMQKITLINTSVNPAATYVLGNIFTDEKRATTLKKSRDIDAKIRKILVEQNIKGKTQSNARLYLSTQKGGLGLRPLELEVELQFVRKGVYLQKHEEMKEALIAYQALKNAGWRNPISDFEYILEKYEIEVDLSEESDTPKLTKDLIKRIEERHQAEIEKEWSSNLSYAKNVLKEPNIRFPANSSPNMDSWRLGVLLSASEEQIHGLGANPNNRRKCQLGCGLDENSYHVACACPSRAATTRHDFIVHWVLKILLQGLGAPDELRRELQFGKASLNCDIGKIKIQAGNKILTGKKIYHNKPDIMVRTTDPDKIYLIEVAVSHIQNLRQQEELKRTRYAVNSTKKLDFSNYREAQRDLNLVTELENLYKCPVKLGVYVVGCFGELVLTQEHKNFCSILEEIGLGKEEIKKVHNKCSYSVAVSTTNMILRRIKDGMGGMGQDTNII

SEQ ID NO: 98 - protein, 1096 aa, Ancistrocerus nigricornis
MDSEGHRYVEAEGAWGGALPGPETALRGPRPEPGRTGDPCDSGRVRQECTRSNPGATPEWGEPAGTVNTENRVVGSTAGTSVPVTGRTSGTRSAGEEELSGAEGRRIGGERCEQAVDEGFECPQCLVTFNSKIGLGVHRKKKHGKVVNEEIITERRKERWREEEIEILAQAEARCEPGRTGMNMYLMGLARSNRTLEAIKGVRKRKAYRERVISIRSARRAVPTTGEDVGETGSTGSTEEQMDSDTKLEHWLVQARGRVMHSMPGAAWITRAIDIVVAGGDPTVVLEGWQREVFQEARRNPSVDGARRRTDQTSSNKKRRAEYKALQKLWRRSMTKAAKKILDGDTDDIQHPDIKMQEDFWGKLIEEKEMAQPAIQDAAGGGRQCEYQVMYPILEREVVENKVPKGSAAGPDGISTAEWNSKVPVIMKAIIMNTILRCGTIPKAWRDSRTVLIPKTPGSMDPAQYRPISIASVILRHLHKILAKRIAALNILDHRQRAFISQDGLAENVFTMATILEDAKKRLAPLQVATLDVKKAFDTVSRKKLREVLQKKGLEDKFVLYLMRLLDEARTVLEVDGTRSRELKPTRGVRQGDPLSPQLFNMAIDEVVRAVPDHLGYRIGGTNINAMAFADDLVLVASTAQGLQTMLDRVVEVLGSLGLTVMPAKCHVLSMEPDGKNKKIKVLTNPKFQVSGASIKQMGVSEVWKYLGVGFSSGGPVPVTEDLKQKLKRITKGPLKPQQRLKILHTYLLPRYLHQLVFGRIKHVTLRKMDKLVRKEVRKWLHLPNDVPLGFFHAAIREGGLGIPALESWVPTTKLKRINNMDLSDWSGARIISKEEYASGVRRWCRKARYRREDWAKLLYASVDGVELREVEKSKLSYGWVNDPYVSIPSRDYIQYLRTRINALPSAVRTSRGRRNNANSAKCRAGCNRNETTAHIIQECHRTHGGRIQRHDAIARKIAELLQAKGYRVARERIFPTAAGARKPDILAVKDGTAHVLDVQIVSASEPLSQLGKRKTSYYRNNRDLVAGVAGWAGVTATAVRVSAVTISWRGVWAAEAADTLRELGLPNSALRGLTTRVLQGSHTNFTRFNQMTTMR

SEQ ID NO: 99 - protein, 1096 aa, Ancistrocerus nigricornis
MDKGNHSYSEATGAGGGAQPGPETALRGPRPKPGRTNISCDKGTRRQIYTGSDPSVTPEWGEPVGHDDTTTGVEGCFAGTSVPASDGTSGTRSGYEGGSNEGEGQETAPGRYEQAEDEELRCPQCLVVFNSKIGLGVHRRRKHGEIVNEEINTERKKERWREEEIEILAQAKARYDPGKPGMNIHLMGHARTNRTLEAIKGLRKRRAYRERVLNIRSTLVAIPPLREDGWRSEDPSLDAVQNSDTKLDQWLRRAKDKILSNMPGADWVNRAVDMALSGGDPTRELELWHLEVFQTTRRHPMANGTRRLTEYASNNKRRKAEYKALQKLWRKSMTKAAKKILDGDTDALQHPDIKAQEDFWGRLIEEEEWMQPEGGSTEESGNPCKYQVMYPVLERDVVENKVPKGSAAGPDGISTAEWNAKVPVIIKATIMNVILRCGTVPKTWRDSRTVLIPKIPGSLDPAHYRPISIASVVLRHLHKILAKRIVALNILDPRQRAFINQDSLAENVLVMATILEDARKRLVPLHMVTLDVKKAFDTVSRAALLKVIRKKGLEDKFRLYLAELLDEARTVLEVDSSRSRELKPTKGVRQGDPISPLLFNMAVDEVLEAVPAHLGYRIGEAIINGMAFADDLVLVASTAQGLQIMLNQVETKLSSLGLAVMPTKCHALSLEPDGRNKKIKVLTDPRFQVAGANIKQMGLGEVWRYLGVGFSSKGPAAAPEDLKQKLQSISEGPLKPQQRLKILQAYLLPRYLHRLVFGKVKHVTLRKMDRLVRRAVRKWLHLPNDVPLGFFHAAIREGGLGIPALESWVPETKMKRINNLERSEWQVARVVGREDCAQEMKRWCRKARYRREDWAKLLYASVDGSELKEVQKSKLSYGWVNDPYVSIPSRDYIQYIRTRINALPSTMRTSRGRRSNGSNTKCRAGCNRNETTAHIIQECHRTHGGRIQRHDAVARKIAELLHARGYRVAREKIFPTAVGSRKPDILVVKDEMAYVLDVQIVSAYEPLNQLGKRKANYYRNNSDLVAGVARWAGVLEAAVKVSAITISWRGVWATEAVEVLQRLGLSNSALRGITSRVLQGSHTNFTRFNQMTTMQR

SEQ ID NO: 100 - protein, 1096 aa, Ancistrocerus nigricornis
MDSEGHRYVEAEGAWGGALPGPETALRGPRPEPGRTGDPCDSGRVRQECTRSNPGATPEWGEPAGTVNTENRVVGSTAGTSVPVTGRTSGTRSAGEEELSGAEGRRIGGERCEQAVDEGFECPQCLVTFNSKIGLGVHRKKKHGKVVNEEIITERRKERWREEEIEILAQAEARCEPGRTGMNMYLMGLARSNRTLEAIKGVRKRKAYRERVISIRSARRAVPTTGEDVGETGITGPTEEQMDSDTKLEHWLVQARGRVMHSMPGAAWITRAIDIVVAGGDPTVILEGWQREVFQEARRNPSVDGARRRTDQTSSNKKRRAEYKALQKLWRRSMTKAAKKILDGDTDDIQHPDIKMQEDFWGKLIEEKEMAQPAIQDAAGGGRPCKYQVMYPILEREVVENKVPKGSAAGPDGISTAEWNSKIPVIMKAIIMNTILRCGTIPKAWRDSRTVLIPKTPGSMDPAQYRPISIASVILRHLHKILAKRIAALNILDHRQRAFVSQDGLAENVFTMATILEDAKKRLAPLQVATLDVKKAFDTVSRKKLREVLQKKGLEDKFVLYLMRLLDEARTVLEVDGTRSRELKPTRGVRQGDPLSPQLFNMAIDEVVRAVPDHLGYRIGGTNINAMAFADDLVLVASTAQGLQTMLDRVVEVLGSLGLTVMPAKCHVLSMEPDGKNKKIKVLTNPKFQVSGASIKQMGVSEVWKYLGVGFSSGGPVPVTEDLKQKLKRITKGPLKPQQRLKILHTYLLPRYLHQLVFGRIKHVTLRKMDKLVRKEVRKWLHLPNDVPLGFFHAAIREGGLGIPALESWVPTTKLKRINNMDLSGWSGARIISKEEYASGVRRWCRKARYRREDWAKLLYASVDGVELREVEKSKLSYGWVNDPYVSIPSRDYIQYLRTRINALPSAVRTSRGRRNNANSAKCRAGCNRNETTAHIIQECHRTHGGRIQRHDAIARKIAELLQAKGYRVARERIFPTAAGARKPDILAVKDGTAHVLDVQIVSASEPLSQLGKRKTSYYRNNRDLVAGVAGWAGVTATAVRVSAVTISWRGVWAAEAADTLRELGLPNSALRGLTTRVLQGSHTNFTRFNQMTTMR

SEQ ID NO: 101 - protein, 1520 aa, Sacculina carcini
MSANTPLVAHQSTTLDADGDVLRVFLPLPDVTACPYEDCGATYAITRRGGYTQVRASILRHLEAAHADVRTSVYMCRRCRQPMGVRPSTHRCRQQTPPAEAHTAVLAPSFTCRHCHQRFTNSRALVNHTNVCRRQQSTGANRRQRPSDPQQQQRRRPTHQRQTNGERHTPPSHSQSPQSETPPPSPPTPPPHVMSPRPPLLPTPPLLRTPPLLPTPLLLPTLALPLSPLRPHQISFSYTPSPLTPRIPTFTSPTTPTPTHTYTVSPPTSPPTTYTTLAMVPGAGLAPVDARPRRLSTFVRLAGGVRERPTASDTATRPAPSVSPPRGRWTAADPAAPPASPRSYLAALIGSISPSPPPRPPRLPSSSPPSSSPSSSSSSSSPSSPRPSSSQSSSSSSSSSSSPALHIRSQHSPSTPPARTHHHTSPANNVGNAPRASGVPSSRPARRQKRQPQQVSTARGSQSQQRASVPPTHRPHNNHHTRNTTNRPHNNHHTRSTTNMHTNTLPRTSTPSSHSTLTPNNTRQHTFITPNRYALLSQSDDNSASPSVSQQNHTSQITSPGRRRVVGEQSNGPTHQHRNNHTSLQNTLTQFHEPLTQINCNTPFCILDILINTLTQQARDLSGLNTRHQNHPRQNTNTHTNNHTHTHTAQFSHHTEHHDHRQMWRSPPYDPVVAAKIQRDYRTGKAVVYRQLVGETTPPCDIEPLVVGRHFCGETASSPRWSDRPTSVPDITPTPATTLSQPITTAEIQRRINNTQNTTPGPDGLRYSDWKRLDPDCSILTAMFNACRLTGRTPTAWKSSRTILLHKGGDPQELKSWRPIALGNTIAKLYAGIWADRLSHWAETHNILTHSQKGFRPFDGVLEHNFVVQSAIARARKSNTSTHITFIDIKNAFGSVSHALLWETLSLLGVPTDTLSIITDIYTNSTTTFTTQRGVSAPIPQIGGVRQGCPLSGILFAFAMEPLLRSLTEAGVEHLALADDVALICHSESQLSLALSQVHDICAWAGLSINASKCAVLSPVAPLSTPAVLNGVPLPSLEAEGQYRYLGRPTGRSFLHADMDQLMSDVRRKSNLILHSALAPWQKLDSLRSFITPILTHPLRLGLLTKTSLSRLQREIVWKVKGLLNLPSRSTLHYLFSPTSCGGIGLSDLCQEADILLVSSSLQLLHCKDARVATLALDQLRRVVAGRVQSEPTTQQLVDYLNGCRMRQGGGYATRTSRTRVAFRTIMARSALRWGPTADGVPALFLNGKEVSPRKSSAIIRDEVRKWRQAKLVGLPHQGKVMSSVAEQPVSSHYTYNGSFTRFAEWRFVHRARLGLVPLNGYSRGAQAVNTSCRRCGYANETLPHVLTHCRVHSAAQQHRHNAILARLVRALPAADRTGGNTRVNQRVPGSTSTLRPDLIVTRGNQVVIVDVTVAFENGCQAFQSAADEKVAKYAELAAEIRSRGKQVDLLAFVVGSLGTWWKGNERVLGRLHISRRYSRLMRRLMVSETLRWSRDVYVEHVTGHRQYAEPAPRADTYLL

SEQ ID NO: 102 - protein, 1520 aa, Sacculina carcini
MSANTPLVAHQSTTLDADGDVLRVFLPLPDVTACPYEDCGATYAITRRGGYTQVRASILRHLEAAHADVRTSVYMCRRCRQPMGVRPSTHRCRQQTPPAEAHTAVLAPSFTCRHCHQRFTNSRALVNHTNVCRRQQSTGANRRQRPSDPQQQQRRRPTHQRQTNGERHTPPSHSQSPQSETPPPSPPTPPPHVMSPRPPLLPTPPLLRTPPLLPTPLLLPTLALPLSPLRPHQISFSYTPSPLTPRIPTFTSPTTPTPTHTYTVSPPTSPPTTYTTLAMVPGAGLAPVDARPRRLSTFVRLAGGVRERPTASDTATRPAPSVSPPRGRWTAADPAAPPASPRSYLAALIGSISPSPPPRPPRLPSSSPPSSSPSSSSSSSSPSSPRPSSSQSSSSSSSSSSSPALHIRSQHSPSTPPARTHHHTSPANNVGNAPRASGVPSSRPARRQKRQPQQVSTARGSQSQQRASVPPTHRPHNNHHTRNTTNRPHNNHHTRSTTNIHTNTLPRTSTPSSHSTLTPNNTRQHTFITPNRYALLSQSDDNSASPSVSQQNHTSQITSPGRRRVVGEQSNGPTHQHRNNHTSLQNTLTQFHEPLTQINCNTPFCILDILINTLTQQARDLSGLNTRHQNHPRQNTNTHTNNHTHTHTAQFSHHTEHHDHRQMWRSPPYDPVVAAKIQRDYRTGKAVVYRQLVGETTPPCDIEPLVVGRHFCGETASSPRWSDRPTSVPDITPTPATTLSQPITTAEIQRRINNTQNTTPGPDGLRYSDWKRLDPDCSILTAMFNACRLTGRTPTAWKSSRTILLHKGGDPQELKSWRPIALGNTIAKLYAGIWADRLSHWAETHNILTHSQKGFRPFDGVLEHNFVVQSAIARARKSNTSTHITFIDIKNAFGSVSHALLWETLSLLGVPTDTLSIITDIYTNSTTTFTTQRGVSAPIPQIGGVRQGCPLSGILFAFAMEPLLRSLTEAGVEHLAFADDVALICHSESQLSLALSQVHDICAWAGLSINASKCAVLSPVAPLSTPAVLNGVPLPSLEAEGQYRYLGRPTGRSFLHADMDQLMSDVRRKSNLILHSALAPWQKLDSLRSFITPILTHPLRLGLLTKTSLSRLQREIVWKVKGLLNLPSRSTLHYLFSPTSCGGIGLSDLCQEADILLVSSSLQLLHCKDARVATLALDQLRRVVAGRVQSEPTTQQLVDYLNGCRMRQGGGYATRTSRTRVAFRTIMARSALRWGPTADGVPALFLNGKEVSPRKSSAIIRDEVRKWRQAKLVGLPHQGKVMSSVAEQPVSSHYTYNGSFTRFAEWRFVHRARLGLVPLNGYSRGAQAVNTSCRRCGYANETLPHVLTHCRVHSAAQQHRHNAILARLVRALPAADRTGGNTRVNQRVPGSTSTLRPDLIVTRGNQVVIVDVTVAFENGCQAFQSAADEKVAKYAELAAEIRSRGKQVDLLAFVVGSLGTWWKGNERVLGRLHISRRYSRLMRRLMVSETLRWSRDVYVEHVTGHRQYAEPAPRADTYLL

SEQ ID NO: 103 - protein, 1520 aa, Sacculina carcini
MSANTPLVAHQSTTLDADGDVLRVFLPLPDVTACPYEDCGATYAITRRGGYTQVRASILRHLEAAHADVRTSVYMCRRCRQPMGVRPSTHRCRQQTPPAEAHTAVLAPSFTCRHCHQRFTNSRALVNHTNVCRRQQSTGANRRQRPSDPQQQQRRRPTHQRQTNGERHTPPSHSQSPQSETPPPSPPTPPPHVMSPRPPLLPTPPLLRTPPLLPTPLLLPTLALPLSPLRSNQISFSYTPSPLTPRIPTFTSPTTPTPTHTYTVSPPTSPPTTYTTLAMVPGAGLTSVDARPRRLSTFVRLAGGVRERPTASDTATRPAPSVSPPRGRWTAADPAAPPASPRSYLAALIGSISPSPPPRPPRLPSSSPPSSSPSSSSSSSSPSSPRPSSSQSSSSSSSSSSSPALHIRSQHSPSTPPARTHHHTSPANNVGNAPRASGVPSSRPARRQKRQPQQVSTARGSQSQQRASVPPTHRPHNNHHTRNTTNRPHNNHHTRSTTNMHTNTLPRTSTPSSHSTLTPNNTRQHTFITPNRYALLSQSDDNSASPSVSQQNHTSQITSPGRRRVVGEQSNGPTHQHRNNHTSLQNTLTQFHEPLTQINCNTPFCILDILINTLTQQARDLSGLNTRHQNHPRQNTNTHTNNHTHTHTAQFSHHTEHHDHRQMWRSPPYDPVVAAKIQRDYRTGKAVVYRQLVGETTPPCDIEPLVVGRHFCGETASSPRWSDRPTSVPDITPTPATTLSQPITTAEIQRRINNTQNTTPGPDGLRYSDWKRLDPDCSILTAMFNACRLTGRTPTAWKSSRTILLHKGGDPQELKSWRPIALGNTIAKLYAGIWADRLSHWAETHNILTHSQKGFRPFDGVLEHNFVVQSAIARARKSNTSTHITFIDIKNAFGSVSHALLWETLSLLGVPTDTLSIITDIYTNSTTTFTTQRGVSAPIPQIGGVRQGCPLSGILFAFAMEPLLRSLTEAGVEHLAFADDVALICHSESQLSLALSQVHDICAWAGLSINASKCAVLSPVAPLSTPAVLNGVPLPSLEAEGQYRYLGRPTGRSFLHADMDQLMSDVRRKSNLILHSALAPWQKLDSLRSFITPILTHPLRLGLLTKTSLSRLQREIVWKVKGLLNLPSRSTLHYLFSPTSCGGIGLSDLCQEADILLVSSSLQLLHCKDARVATLALDQLRRVVAGRVQSEPTTQQLVDYLNGCRMRQGGGYATRTSRTRVAFRTIMARSALRWGPTADGVPALFLNGKEVSPRKSSAIIRDEVRKWRQAKLVGLPHQGKVMSSVAEQPVSSHYTYNGSFTRFAEWRFVHRARLGLVPLNGYSRGAQAVNTSCRRCGYANETLPHVLTHCRVHSAAQQHRHNAILARLVRALPAADRTGGNTRVNQRVPGSTSTLRPDLIVTRGNQVVIVDVTVAFENGCQAFQSAADEKVAKYAELAAEIRSRGKQVDLLAFVVGSLGTWWKGNERVLGRLHISRRYSRLMRRLMVSETLRWSRDVYVEHVTGHRQYAEPAPRADTYLL

SEQ ID NO: 104 - protein, 1520 aa, Sacculina carcini
MSANTPLVAHQSTTLDADGDVLRVFLPLPDVTACPYEDCGATYAITRRGGYTQVRASILRHLEAAHADVRTSVYMCRRCRQPMGVRPSTHRCRQQTPPAEAHTAVLAPSFTCRHCHQRFTNSRALVNHTNVCRRQQSTGANRRQRPSDPQQQQRRRPTHQRQTNGERHTPPSHSQSPQSETPPPRPPTPPPHVMSPRPPLLPTPPLLRTPPLLPTPLLLPTLALPLSPLRSNQISFSYTPSPLTPRIPTFTSPTTPTPTHTYTVSPPTSPPITYTTLAMVPGAGLTPVDARPRRLSTFVRLAGGVRERPTASDTATRPAPSVSPPRGRWTAADPAAPPASPRSYLAALIGSISPSPPPRPPRLPSSSPPSSSPSSSSSSSSPSSPRPSSSQSSSSSSSSSSSPALHIRSQHYPSTPPARTHHHTSPANNVGNAPRASGVPSSRPARRQKRQPQQVSAARGSQSQQRASVPPTHRPHNNHHTRNTTNRAHNNHHTRSTTNTHTNTLPRTSTPSSHSTLTPNNTRQHTFITPNRYALLSQSDDNSASPSVSQQNHTSQITSPGRRRVVGEQSNGPTHQHRNNHTSIQNTLTQFHEPLTQINCNTPFCILDILINTLTQQARDLSGLNTRHQNHPRQNTNTHTNNHTHTHTAQFRHHTEHHDHRQMWRSPPYDPVVAAKIQRDYRTGKAVVYRQLVGETTPPCDIEPLVVGRHFCGETASSPRWSDRPTSVPDITPTPATTLSQPITTAEIQRRINNTQNTTPGPDGLRYSDWKRLDPDCSILTAMFNACRLTGRTPTAWKSSRTILLHKGGDPQELKSWRPIALGNTIAKLYAGIWADRLSHWAETHNILTNSQKGFRPFDGVLEHNFVVQSAIARARKSNTSTHITFIDIKNAFGSVSHALLWETLSLLGVPTDTLSIITDIYTNSTTTFTTQRGVSAPIPQIGGVRQGCPLSGILFAFAMEPLLRSLTEAGVEHLAFADDVALICHSESQLSLALSQVHDICAWAGLSINASKCAVLSPVAPLSTPAVLNGVPLPSLEAEGQYRYLGRPTGRSFLHADMDQLMSDVRRKSNLILHSALAPWQKLDSLRSFITPILTHPLRLGLLTKTSLSRLQREIVWKVKGLLNLPSRSTLHYLFSPTSCGGIGLSDLCQEADILLVSSSLQLLHCKDARVATLALDQLRRVVAGRVQSEPTTQQLVDYLNGCRMRQGGGYATRTSRTRVAFRTIMARSALRWGPTADGVPALFLNGKEVSPRKSSAIIRDEVRKWRQAKLVGLPHQGKVMSSVAEQPVSSHYTYNGSFTRFAEWRFVHRARLGLVPLNGYSRGAQAVNTSCRRCGYANETLPHVLTHCRVHSAAQQHRHNAILARLVRALPAADRTGGNTRVNQRVPGSTSTLRPDLIVTRGNQVVIVDVTVAFENGCQAFQSAADEKVAKYAELAAEIRSRGKQVDLLAFVVGSLGTWWKGNERVLGRLHISRRYSRLMRRLMVSETLRWSRDVYVEHVTGHRQYAEPAPRADTYLL

SEQ ID NO: 105 - protein, 1520 aa, Sacculina carcini
MSANTPLVAHQSTTLDADGDVLRVFLPLPDVTACPYEDCGATYAITRRGGYTQVRASILRHLEAAHADVRTSVYMCRRCRQPMGVRPSTHRCRQQTPPAEAHTAVLAPSFTCRHCHQRFTNSRALVNHTNVCRRQQSTGANRRQRPSDPQQQQRRRPTHQRQTNGERHTPPSHSQSPQSETPPPSPPTPPPHVMSPRPPLLPTPPLLRTPPLLPTPLLLPTLALPLSPLRPHQISFSYTPSPLTPRIPTFTSPTTPTPTHTYTVSPPTSPPTTYTTLAMVPGAGLAPVDARPRRLSTFVRLAGGVRERPTASDTATRPAPSVSPPRGRWTAADPAAPPASPRSYLAALIGSISPSPPPRPPRLPSSSPPSSSPSSSSSSSSPSSPRPSSSQSSSSSSSSSSSPALHIRSQHSPSTPPARTHHHTSPANNVGNAPRASGVPSSRPARRQKRQPQQVSTARGSQSQQRASVPPTHRPHNNHHTRNTTNRPHNNHHTRSTTNMHTNTLPRTSTPSSHSTLTPNNTRQHTFITPNRYALLSQSDDNSASPSVSQQNHTSQITSPGRRRVVGEQSNGPTHQHRNNHTSLQNTLTQFHEPLTQINCNTPFCILDILINTLTQQARDLSGLNTRHQNHPRQNTNTHTNNHTHTHTAQFSHHTEHHDHRQMWRSPPYDPVVAAKIQRDYRTGKAVVYRQLVGETTPPCDIEPLVVGRHFCGETASSPRWSDRPTSVPDITPTPATTLSQPITTAEIQRRINNTQNTTPGPDGLRYSDWKRLDPDCSILTAMFNACRLTGRTPTAWKSSRTILLHKGGDPQELKSWRPIALGNTIAKLYAGIWADRLSHWAETHNILTHSQKGFRPFDGVLEHNFVVQSAIARARKSNTSTHITFIDIKNAFGSVSHALLWETLSLLGVPTDTLSIITDIYTNSTTTFTTQRGVSAPIPQIGGVRQGCPLSGILFAFAMEPLLRSLTEAGVEHLAFADDVALICHSESQLSLALSQVHDICAWAGLSINASKCAVLSPVAPLSTPAVLNGVPLPSLEAEGQYRYLGRPTGRSFLHADMDQLMSDVRRKSNLILHSALAPWQKLDSLRSFITPILTHPLRLGLLTKTSLSRLQREIVWKVKGLLNLPSRSTLHYLFSPTSCGGIGLSDLCQEADILLVSSSLQLLHCKDARVATLALDQLRRVVAGRVQSEPTTQQLVDYLNGCRMRQGGGYATRTSRTRVAFRTIMARSALRWGPTADGVPALFLNGKEVSPRKSSAIIRDEVRKWRQAKLVGLPHQGKVMSSVAEQPVSSHYTYNGSFTRFAEWRFVHRARLGLVPLNGYSRGAQAVNTSCRRCGYANETLPHVLTHCRVHSAAQQHRHNAILARLVRALPAADRTGGNTRVNQRVPGSTSTLRPDLIVTRGNQVVIVDVTVAFENGCQAFQSAADEKVAKYAELAAEIRSRGKQVDLLAFVVGSLGNWWKGNERVLGRLHISRRYSRLMRRLMVSETLRWSRDVYVEHVTGHRQYAEPAPRADTYLL

SEQ ID NO: 106 - protein, 1520 aa, Sacculina carcini
MSANTPLVAHQSTTLDADGDVLRVFLPLPDVTACPYEDCGATYAITRRGGYTQVRASILRHLEAAHADVRTSVYMCRRCRQPMGVRPSTHRCRQQTPPAEAHTAVLAPSFTCRHCHQRFTNSRALVNHTNVCRRQQSTGAIRRQRPSDQQQQQRRRPTHQRQTNGERHTPPSHSQSPQSETPPPSPPTPPPHVMSPRPPLLPTPPLLRTPPLLPTPLLLPTLALPLSPLRSHQISFSYTPSPLTPRIPTFTSPTTPTPTHTYTVSPPTSPPTTYTTLAMVPGAGLTPVDARPRRLSTFVRLAGGVRERPTASDTATRPAPSVSPPRGRWTAADPAAPPASPRSYLAALIGSISPSPPPRPPRLPSSSPPSSSPSSSSSSSSPSSPRPSSSQSSSSSSSSSSSPALHIRSQHSPSTPPARTHHHTSPANNVGNAPRASGVPSSRPARRQKRQPQQVSTARGSQSQQRASVPPTHRPHNNHHTRNTTNRPHNNHHTRSTTNMHTNTLPRTSTPSSHSTLTPNNTRQHTFITPNRYALLSQSDDNSASPSVSQQNHTSQITSPGRRRVVGEQSNGPTHQHRNNHTSLQNTLTQFHEPLTQIHCNTPFCILDILINTLTQQARDLSGLNTRHQNHPRQNTNTHTNNHTHTHTAQFSHHTEHHDHRQMWRSPPYDPVVAAKIQRDYRTGKAVVYRQLVGETTPPCDIEPLVVGRHFCGETASSPRWSDRPTSVPDITPTPATTLSQPITTAEIQRRINNTQNTTPGPDGLRYSDWKRLDPDCSILTAMFNACRLTGRTPTAWKSSRTILLHKGGDPQELKSWRPIALGNTIAKLYAGIWADRLSHWAETHNILTNSQKGFRPFDGVLEHNFVVQSAIARARKSNTSTHITFIDIKNAFGSVSHALLWETLSLLGVPTDTLSIITDIYTNSTTTFTTQRGVSAPIPQIGGVRQGCPLSGILFAFAMEPLLRSLTEAGVEHLAFADDVALICHSESQLSLALSQVHDICAWAGLSINASKCAVLSPVAPLSTPAVLNGVPLPSLEAEGQYRYLGRPTGRSFLHADMDQLMSDVRRKSNLILHSALAPWQKLDSLRSFITPILTHPLRLGLLTKTSLSRLQREIVWKVKGLLNLPSRSTLHYLFSPTSCGGIGLSDLCQEADILLVSSSLQLLHCKDARVATLALDQLRRVVAGRVQSEPTTQQLVDYLNGCRMRQGGGYATRTSRTRVAFRTIMARSALRWGPTADGVPALFLNGKEVSPRKSSAIIRDEVRKWRQAKLVGLPHQGKVMSSVAEQPVSSHYTYNGSFTRFAEWRFVHRARLGLVPLNGYSRGAQAVNTSCRRCGYANETLPHVLTHCRVHSAAQQHRHNAILARLVRALPAADRTGGNTRVNQRVPGSTSTLRPDLIVTRGNQVVIVDVTVAFENGCQAFQSAADEKVAKYAELAAEIRSRGKQVDLLAFVVGSLGTWWKGNERVLGRLHISRRYSRLMRRLMVSETLRWSRDVYVEHVTGHRQYAEPAPRADTYLL

SEQ ID NO: 107 - protein, 1524 aa, Sacculina carcini
MSANTPLVAHQSTTLDADGDVLRVFLPLPDVTACPYEDCGATYAITRRGGYTQVRASILRHLEAAHADVRTSVYMCRRCRQPMGVRPSTHRCRQQTPPAEAHTAVLAPSFTCRHCHQRFTNSRALVNHTNVCRRQQVHQQSTGANRRQRPSGQRQQQRRRPTHQRQTNGERHTPPSHSQSPQSETPPPSPPTPPPHVISPRPPLLPTPPLLRTPPLLPTPLLLPTLALPLSPLRSHQISFSYTPSPLTPRIPTFTSPTTPTPTHTYTASPPTSPPTTYTTLAMVPGAGLTPVDARPRRLSTFVRLAGGVRERPTASDTATRPASSVSPPRGRWTAADPAAPPASPRSYLAALIGSISPSPPPRPPRLPSSSSPSSSPSSSSSSSSPSSPRPSSSQPSSSSSSSSSSPALQIQSQHSPSTPPARTHHHTSPANNVGNAPRASGVPSSRPARRQKRQPQQVSAARGSQSQQRASVPPTHRPHNNHHTRNTTNRPHNNHHTRSTTNTHTNTLPRTSTPSSHSTLTPNNTRQHTFITPNRYALLSQSDDNSASPSASQQNHTSQITSPGRRRVVGEQSNGPTHQHRNNHTSLQNTLTQFHEPLTQINCNTPFCILDILINTLTQQARDLSGLNTRHQNHPRQNTNTHTNNHTHTHTAQFSHHTEHHDHRQMWRSPPYDPVVAAKIQRDYRTGKAVVYRQLVGETTPPCDIEPLVVGRHFCGETASSPRWSDRPTSVPDITPTPATTLSQPITTAEIQRRINNTQNTTPGPDGLRYSDWKRLDPDCSILTAMFNACRLTGRTPTAWKSSRTILLHKGGDPQELKSWRPIALGNTIAKLYAGIWADRLSHWAETHNILTHSQKGFRPFDGVLEHNFVVQSAIARARKSNTSTHITFIDIKNAFGSVSHALLWETLSLLGVPTDTLSIITDIYTNSTTTFTTQRGVSVPIPQIGGVRQGCPLSGILFAFAMEPLLRSLTEAGVEHLAFADDVALICHSESQLSLALSQVHDICAWAGLSINASKCAVLSPVAPLSTPAVLNGVPLPSLEAEGQYRYLGRPTGRSFLHADMDQLMSDVRRKSNLILHSALAPWQKLDSLRSFITPILTHPLRLGLLTKTSLSRLQREIVWKVKGLLNLPSRSTLHYLFSPTSCGGIGLSDLCQEADILLVSSSLQLLHCKDARVATLALDQLRRVVAGRVQSEPTTQQLVDYLNGCRMRQGGGYATRTSRTRVAFITIMARSALRWGPTADGVPALFLNGKEVSPRKSSAIIRDEVRKWRQAKLVGLPHQGKVMSSVAEQPVSSHYTYNGSFTRFAEWRFVHRARLGLVPLNGYSRGAQAVNTSCRRCGYANETLPHVLTHCRVHSAAQQHRHNAILARLVRALPAADRTGGNTRVNQRVPGSTSTLRPDLIVTRGNQVVIVDVTVAFENGCQAFQSAADEKVAKYAELAAEIRSRGKQVDLLAFVVGSLGTWWKGNERVLGRLHISRRYSRLMRRLMVSETLRWSRDVYVEHVTGHRQYAEPAPRADTYLL

SEQ ID NO: 108 - protein, 1527 aa, Sacculina carcini
MSANTPLVAHQSTTLDADGDVLRVFLPLPDVTACPKNDCGATYAITRRGGYTQVRASILRHLEATHADVRTSVYMCRRCRQPMGVRPSTHRCRQQTPPAEAHTAVLAPSFTCRHCHQRFTNSRALVNHTNVCRRQQVHQQSTGANRRQRPSDQQQQQRRRPTHQRQTNGERHTPPSHSQSPQSETPPPSPPTPPPHVISPRPPLLPTPPVLRTPPLLPTPLLLPTLALPLSPLRSHQISFSYTPSPLTPRIPTFTSPSTPTPTHTYTASPPTSPPTTYTTLAMVPGAGLTPVDARPRRLSTFVRLAGGVRERPTASDTATRPASSVSPPRGRWTAADPAAPPASPRSYLAALIGSISPSPPPRLPSSSSPSSSPSSSSSSSSSSSSSSPSSPRPSSSQPSSSSSSSSSSPALQIRSQHSPPTTPARTHHHTSPANNVGNAPRASGVPSSRPARRQKRQPQQVSAARGSQSQQRASMPPTHRPHNNHHTRNTTNRPHNNHHTRSTTNTHTNTLPRTSTPSSHSTLTPNNTRQHTFITPNRYALLSQSDDNSASPSASQQNHTSQITSPGRRRVVGEQSNGPTHQHRNNHTSLQNTLTQFHEPLTQIYCNTPFCILDILINTLTQQARDLSGLNTRHQNHPRQNTNTHTNNHTHTHTAQFSHHTEHHDHRQMWRSPPYDPVVAAKIQRVYRTGKAVVYRQLVGETTPPCDIEPLVVGRHFCGETASSPRWSDRPTSVPDITPTPATTLSQPITTAEIQRRINNTQNTTPGPDGLRYSDWKRLDPDCSILTAMFNACRLTGRTPTAWKSSRTILLHKGGDPQELKSWRPIALGNTIAKLYAGIWADRLSHWAETHNILTHSQKGFRPFDGVLEHNFVVQSAIARARKSNTSTHITFIDIKNAFGSVSHVLLWETLSLLGVPTDTLSIITDIYTNSTTTITTQRGVSAPIPQIGGVRQGCPLSGILFAFAMEPLLRSLTEAGVEHLAFADDVALICHSESQLSLALSQVHDICAWAGLSINASKCAVLSPVAPLSTPAVLNGVPLPSLEAEGQYRYLGRPTGRSFLHADMDQLMSDVRRKSNLILHSALAPWQKLDSLRSFITPILTHPLRLGLLTKTSLSRLQREIVWKVKGLLNLPSRSTLHYLLSPTSCGGIGLSDLCQEADILLVSSSLQLLHCKDARVATLALDQLRRVVAGRVQSEPTTQQLVDYLNGCRMRQGGCYATRTSRTRVAFRTIMARSALRWGPTADGVPALFLNGKEVSPRKSSAIIRDEVRKWRQAKLVGLPHQGKVMSSVAEQPVSSHYTYNGSFTRFAEWRFVHRARLGLVPLNGYSRGAQAVNTSCRRCGYANETLPHVLTHCRVHSAAQQHRHNAILARLVRALPAADRTGGNTRVNQRVPGSTSTLRPDLIVTRGNQVVIVDVTVAFENGCQAFQSAADEKVAKYAELAAEIRSRGKQVDLLAFVVGSLGTWWKGNERVLGRLHISRRYSRLMRRLMVSETLRWSRDVYVEHVTGHRQYAEPAPRADTYLM

SEQ ID NO: 109 - protein, 1520 aa, Sacculina carcini
MSANTPLVAHQSTTLDADGDVLRVFLPLPDVTACPYEDCGATYAITRRGGYTQVRASILRHLEAAHADVRTSVYMCRRCRQPMGVRPSTHRCRQQTPPAEAHTAVLAPSFTCRHCHQRFTNSRALVNHTNVCRRQQSTGANRRQRPSDPQQQQRRRPTHQRQTNGERHTPPSHSQSPQSETPPPSPPTPPPHVMSPRPPLLPTPPPLRTPPLLPTPLLLPTLALPLSPLRPHQISFSYTPSPLTPRIPTFTSPTTPTPTHTYTVSPPTSPPTTYTTLAMVPGAGLAPVDARPRRLSTFVRLAGGVRERPTASDTATRPAPSVSPPRGRWTAADPAAPPASPRSYLAALIGSISPSPPPRPPRLPSSSPPSSSPSSSSSSSSPSSPRPSSSQSSSSSSSSSSSPALHIRSQHSPSTPPARTHHHTSPANNVGNAPRASGVPSSRPARRQKRQPQQVSTARGSQSQQRASVPPTHRPHNNHHTRNTTNRPHNNHHTRSTTNMHTNTLPRTSTPSSHSTLTPNNTRQHTFITPNRYALLSQSDDNSASPSVSQQNHTSQITSPGRRRVVGEQSNGPTHQHRNNHTSLQNTLTQFHEPLTQINCNTPFCILDILINTLTQQARDLSGLNTRHQNHPRQNTNTHTNNHTHTHTAQFSHHTEHHDHRQMWRSPPYDPVVAAKIQRDYRTGKAVVYRQLVGETTPPCDIEPLVVGRHFCGETASSPRWSDRPTSVPDITPTPATTLSQPITTAEIQRRINNTQNTTPGPDGLRYSDWKRLDPDCSILTAMFNACRLTGRTPTAWKSSRTILLHKGGDPQELKSWRPIALGNTIAKLYAGIWADRLSHWAETHNILTHSQKGFRPFDGVLEHNFVVQSAIARARKSNTSTHITFIDIKNAFGSVSHALLWETLSLLGVPTDTLSIITDIYTNSTTTFTTQRGVSAPIPQIGGVRQGCPLSGILFAFAMEPLLRSLTEAGVEHLAFADDVALICHSESQLSLALSQVHDICAWAGLSINASKCAVLSPVAPLSTPAVLNGVPLPSLEAEGQYRYLGRPTGRSFLHADMDQLMSDVRRKSNLILHSALAPWQKLDSLRSFITPILTHPLRLGLLTKTSLSRLQREIVWKVKGLLNLPSRSTLHYLFSPTSCGGIGLSDLCQEADILLVSSSLQLLHCKDARVATLALDQLRRVVAGRVQSEPTTQQLVDYLNGCRMRQGGGYATRTSRTRVAFRTIMARSALRWGPTADGVPALFLNGKEVSPRKSSAIIRDEVRKWRQAKLVGLPHQGKVMSSVAEQPVSSHYTYNGSFTRFAEWRFVHRARLGLVPLNGYSRGAQAVNTSCRRCGYANETLPHVLTHCRVHSAAQQHRHNAILARLVRALPAADRTGGNTRVNQRVPGSTSTLRPDLIVTRGNQVVIVDVTVAFENGCQAFQSAADEKVAKYAELAAEIRSRGKQVDLLAFVVGSLGNWWKGNERVLGRLHISRRYSRLMRRLMVSETLRWSRDVYVEHVTGHRQYAEPAPRADTYLL

SEQ ID NO: 110 - protein, 858 aa, Sacculina carcini
MWRSPPYDPVVAAKIQRDYRTGKAVVYRQLVGETTPPCDIEPLVVGRHFCGETASSPRWSDRPTSVPDITPTPATTLSQPITTAEIQRRINNTQNTTPGPDGLRYSDWKRLDPDCSILTAMFNACRLTGRTPTAWKSSRTILLHKGGDPQELKSWRPIALGNTIAKLYAGIWADRLSHWAETHNILTHSQKGFRPFDGVLEHNFVVQSAIARARKSNTSTHITFIDIKNAFGSVSHALLWETLSLLGVPTDTLSIITDIYTNSTTTFTTQRGVSAPIPQIGGVRQGCPLSGILFAFAMEPLLRSLTEAGVEHLAFADDVALICHSESQLSLALSQVHDICAWAGLSINASKCAVLSPVAPLSTPAVLNGVPLPSLEAEGQYRYLGRPTGRSFLHADMDQLMSDVRRKSNLILHSALAPWQKLDSLRSFITPILTHPLRLGLLTKTSLSRLQREIVWKVKGLLNLPSRSTLHYLFSPTSCGGIGLSDLCQEADILLVSSSLQLLHCKDARVATLALDQLRRVVTGRVQSEPTTQQLVDYLNGCRMRQGGGYATRTSRTRVAFRTIMARSALRWGPTADGVPALFLNGKEVSPRKSSAIIRDEVRKWRQAKLVGLPHQGKVMSSVAEQPVSSHYTYNGSFTRFAEWRFVHRARLGLVPLNGYSRGAQAVNTSCRRCGYANETLPHVLTHCRVHSAAQQHRHNAILARLVRALPAADRTGGNTRVNQRVPDSTSTLRPDLIVTRGNQVVIVDVTVAFENGCQAFQSAADEKVAKYAELAAEIRSRGKQVDLLAFVVGSLGTWWKGNERVLGRLHISRRYSRLMRRLMVSETLRWSRDVYVEHVTGHRQYAEPAPRADTYLL

SEQ ID NO: 111 - protein, 1524 aa, Sacculina carcini
MSANTPLVAHQSTTLDADGDVLRVFLPLPDVTACPYEDCGATYAITRRGGYTQVRASILRHLEAAHADVRTSVYMCRRCRQPMGLRPSTHRCRQQTPPAEAHTAVLAPSFTCRHCHQRFTNSRALVNHTNVCRRQQVHQQSTGANRRQRPSGQRQQQRRRPTHQRQTNGERHTPPSHSQSPQSETPPPSPPTPPPHVISPRPPLLPTPPLLRTPPLLPTPLLLPTLALPLSPLRSHQISFSYTPSPLTPRIPTFTSPTTPTPTHTYTASPPTSPPTTYTTLAMVPGAGLTPVDARPRRLSTFVRLAGGVRERPTASDTATRPASSVSPPRGRWTAADPAAPPASPRSYLAALIGSISPSPPPRPPRLPSSSSPSSSPSSSSSSSSPSSPRPSSSQPSSSSSSSSSSPALQIQSQHSPSTPPARTHHHTSPANNVGNAPRASGVPSSRPARRQKRQPQQVSAARGSQSQQRASVPPTHRPHNNHHTRNTTNRPHNNHHTRSTTNTHTNTLPRTSTPSSHSTLTPNNTRQHTFITPNRYALLSQSDDNSASPSASQQNHTSQITSPGRRRVVGEQSNGPTHQHRNNHTSLQNTLTQFHEPLTQINCNTPFCILDILINTLTQQARDLSGLNTRHQNHPRQNTNTHTNNHTHTHTAQFSHHTEHHDHRQMWRSPPYDPVVAAKIQRDYRTGKAVVYRQLVGETTPPCDIEPLVVGRHFCGETASSPRWSDRPTSVPDITPTPATTLSQPITTAEIQRRINKTQNTTPGPDGLRYSDWKRLDPDCSILTAMFNACRLTGRTPTAWKSSRTILLHKGGDPQELKSWRPIALGNTIAKLYAGIWADRLSHWAETHNILTHSQKGFRPFDGVLEHNFVVQSAIARARKSNTSTHITFIDIKNAFGSVSHALMWETLSLLGVPTDTLSIITDIYTNSTTTFTTQRGVSAPIPQIGGVRQGCPLSGILFAFAMEPLLRSLTEAGVEHLAFADDVALICHSESQLSLALSQVHDICAWAGLSINASKCAVLSPVAPLSTPAVLNGVPLPSLEAEGQYRYLGRPTGRSFLHADMDQLMSDVRRKSNLILHSALAPWQKLDSLRSFITPILTHPLRLGLLTKTSLSRLQREIVWKVKGLLNLPSRSTLHYLFSPTSCGGIGLSDLCQEADILLVSSSLQLLHCKDARVATLALDQLRRVVACRVQSEPTTQQLVDYLNGCRMRQGGGYATRTSRTRGAFRTIMARSALRWGPTADGVPALFLNGKEVSPRKSSAIIRDEVRKWRQAKLVGLPHQGKVMSSVAEQPVSSHYTYNGSFTRFAEWRFVHRARLGLVPLNGYSRGAQAVNTSCRRCGYANETLPHVLTHCRVHSAAQQHRHNAILARLVRALPAADRTGGNTRVNQRVPGSTSTLRPDLIVTRGNQVVIVDVTVAFENGCQAFQSAADEKVAKYAELAAEIRSRGKQVDLLAFVVGSLGTWWKGNERVLGRLHISRRYSRLMRRLMVSETLRWSRDVYVEHVTGHRQYAEPAPRADTYLL

SEQ ID NO: 112 - protein, 1527 aa, Sacculina carcini
MSANTPLVAHQSTTLDAEGDVLRVFLPLPDVTACPYEDCGATYAITRRGGYTQVRASILRHLEAAHADVRTSVYMCRRCRQPMGVRPSTHRCRQQTPPAEAHTAVLAPSFTCRHCHQRFTNSRALVNHTNVCRRQQSTGANRRQRPSGQRQQQRRRPTHQRQTNGERHTPPSHSQSPQSETPPPSPPTPPPHVMSPRPPLLPTPPLLRTPPLLPTPLLLPTLALPLSPLRSHQISFSYTPSPLTPRIPTFTSLTTPTPTHTYTASPPTSPPTTYTALAMVPGAGLTPVDARPRRLSTFVRLAGGVRERPTASDTATRPASSVSPPRGRWTAADPAAPPASPRSYLAALIGSISPSPPPRPPRLPSSSSPSSSPSSSSSSSSSSSSSSSPSSPRPSSSQPSSSSSSSSSSPALHIRSQHSPSTPPARTHHHTSPANNVGNAPRASGVPSSRPARRQKRQPQQVSAARGSQSQQRASVPPTHGPHNNHHTRNTTNRPHNNHHTRSTTNTHTNTLPRTSTPSSHSTLTPNNTRQHTFITPNRYALLSQSDDNSASPSASQQNHTSQITSPGRRRVVGEQSNGPTHQHRNNHTSLQNTLTQFHEPLTQINCNTPFCILDILINTLTQQARDLSGLNTRHQNHPGQNTNTHTNNHAHTHTAQFSHHTEHHDHRQMWRSPPYDPVVAAKIQRDYRTGKAVVYRQLVGETTPPCDIEPLVVGRHFCDETASSPRWSDRPTSVPDITPTPATTLSQPITTAEIQRRINNTQNTTPGPDGLRYSDWKRLDPDCSILTAMFNACRLTGRTPTAWKSSRTILLHKGGDPQELKSWRPIALGNTIAKLYAGIWADRLSHWAETHNILTHSQKGFRPFDGVLEHNFVVQSAIARARKSNTSTHITFIDIKNAFGSVSHALLWETLSLLGVPTDTLSIITDIYTNSTTTFTTQRGVSVPIPQIGGVRQGCPLSGILFAFAMEPLLRSLTEAGVEHLAFADDVALICHSESQLSLALSQVHDICTWAGLSINASKCAVLSPVAPLSTPAVLNGVPLPSLEAEGQYRYLGRPTGRSFLHADMDQLMSDVRRKSNLILHSALAPWQKLDSLRSFITPILTHPLRLGLLTKTSLSRLQREIVWKVKGLLNLPSRSTLHYLFSPTSCGGIGLSDLCQEADILLVSSSLQLLHCKDARVATLALDQLRRVVAGRVQSEPTTQQLVDYLNGCRMRQGGGYATRTSRTRVAFRTIMARSALRWGPTADGVPALFLNGKEVSPRKSSAIIRDEVRKWRQAKLVGLPHQGKVMSSVAEQPVSSHYTYNGSFTRFAEWRFVHRARLGLVPLNGYSRGAQAVNTSCRRCGYANETLPHVLTHCRVHSAAQQHRHNAILARLVRALPAADRTGGNTRVNQRVPGSTSTLRPDLIVTRGNQVVIVDVTVAFENGCQAFQSAADEKVAKYAELAAEIRSRGKQVDLLAFVVGSLGTWWKGNERVLGRLHISRRYSRLMRRLMVSETLRWSRDVYVEHVTGHRQYAEPAPRADTYLL

SEQ ID NO: 113 - protein, 1520 aa, Sacculina carcini
MSANTPLVAHQSTTLDADGDVLRVILPLPDVTACPYEDCGATYAITRRGGYTQVRASILRHLEAAHADVRTSVYMCRRCRQPMGVRPSTHRCRQQTPPAEAHTAVLAPSFTCRHCHQRFTNSRALVNHTNVCRRQQSTGANRRQRPSDPQQQQRRRPTHQRQTNGERHTPPSHSQSPQSETPPPSPPTPPPHVMSPRPPLLPTPPLLRTPPLLPTPLLLPTLALPLSPLRPHQISFSYTPSPLTPRIPTFTSPTTPTPTHTYTVSPPTSPPTTYTTLAMVPGAGLTPVDARPRRLSTFVRLAGGVRERPTASDTATRPAPSVSPPRGRWTAADPAAPPASPRSYLAALIGSISPSPPPRPPRLPSSSPPSSSPSSSSSSSSPSSPRPSSSQSSSSSSSSSSSPALHIRSQHSPSTPPARTHHHTSPANNVGNAPRASGVPSSRPARRQKRQPQQVSTARGSQSQQRASVPPTHRPHNNHHTRNTTNRPHNNHHTRSTTNTHTNTLPRTSTPSSHSTLTPNNTRQHTFITPNRYALLSQSDDNSASPSASQQNHTSQITSPGRRRVVGEQSNGPTHQHRNNHTSLQNTLTQFHEPLTQINCNTPFCILDILINTLTQQARDLSGLNTRHQNHPRQNTNTHTNNHTHTHTAQFSHHTEHHDHRQMWRSPPYDPVVAAKIQRDYRTGKAVVYRQLVGETTPPCDIEPLVVGRHFCGETASSPRWSDRPTSVPDITPTPATTLSQPITTAEIQRRINNTQNTTPGPDGLRYSDWKRLDPDCSILTAMFNACRLTGRTPTAWKSSRTILLHKGGDPQELKSWRPIALGNTIAKLYAGIWADRLSHWAETHNILTHSQKGFRPFDGVLEHNFVVQSAIARARKSNTSTHITFIDIKNAFGSVSHALMWETLSLLGVPTDTLSIITDIYTNSTTTFTTQRGVSAPIPQIGGVRQGCPLSGILFAFAMEPLLRSLTEAGVEHLAFADDVALICHSESQLSLALSQVHDICAWAGLSINASKCAVLSPVAPLSTPAVLNGVPLPSLEAEGQYRYLGRPTGRSFLHADMDQLMSDVRRKSNLILHSALAPWQKLDSLRSFITPILTHPLRLGLLTKTSLSRLQREIVWKVKGLLNLPSRSTLHYLFSPTSCGGIGLSDLCQEADILLVSSSLQLLHCKDARVATLALDQLRRVVAGRVQSEPTTQQLVDYLNGCRMRQGGGYATRTSRTRVAFRTIMARSALRWGPTADGVPALFLNGKEVSPRKSSAIIRDEVRKWRQAKLVGLPHQGKVMSSVAEQPVSSHYTYNGSFTRFAEWRFVHRARLGLVPLNGYSRGAQAVNTSCRRCGYANETLPHVLTHCRVHSAAQQHRHNAILARLVRALPAADRTGGNTRVNQRVPGSTSTLRPDLIVTRGNQVVIVDVTVAFENGCQAFQSAADEKVAKYAELAAEIRSRGKQVDLLAFVVGSLGTWWKGNERVLGRLHISRRYSRLMRRLMVSETLRWSRDVYVEHVTGHRQYAEPAPRADTYLL

SEQ ID NO: 114 - protein, 1524 aa, Sacculina carcini
MSANTPLVAHQSTTLDADGDVLRVFLPLPDVTACPYEDCGATYAITRRGGYTQVRASILRHLEAAHADVRTSVYMCRRCRQPMGVRPSTHRCRQQTPPAEAHTAVLAPSFTCRHCHQRFTNSRALVNHTNVCRRQQVHQQSTGANRRQRPSGQRQQQRRRPTHQRQTNGERHTPPSHSQSPQSETPPPSPPTPPPHVISPRPPLLPTPPLLRTPPLLPTPLLLPTLALPLSPLRSHQISFSYTPSPLTPRIPTFTSPTTPTPTHTYTASPPTSPPTTYTTLAMVPGAGLTPVDARPRRLSTFVRLAGGVRERPTASDTATRPASSVSPPRGRWTAADPAAPPASPRSYLAALIGSISPSPPPRPPRLPSSSSPSSSPSSSSSSSSPSSPRPSSSQPSSSSSSSSSSPALQIQSQHSPSTPPARTHHHTSPANNVGNAPRASGVPSSRPARRQKRQPQQVSAARGSQSQQRASVPPTHRPHNNHHTRNTTNRPHNNHHTRSTTNTHTNTLPRTSTPSSHSTLTPNNTRQHTFITPNRYALLSQSDDNSASPSASQQNHTSQITSPGRRRVVGEQSNGPTHQHRNNHTSLQNTLTQFHEPLTQINCNTPFCILDILINTLTQQARDLSGLNTRHQNHPRQNTNTHTNNHTHTHTAQFSHHTEHHDHRQMWRSPPYDPVVAAKIQRDYRTGKAVVYRQLVGETTPPCDIEPLVVGRHFCGETASSPRWSDRPTSVPDITPTPATTLSQPITTAEIQRRINNTQNTTPGPDGLRYSDWKRLDPDCSILTAMFNACRLTGRTPTAWKSSRTILLHKGGDPQELKSWRPIALGNTIAKLYAGIWADRLSHWAETHNILTHSQKGFRPFDGVLEHNFVVQSAIARARKSNTSTHITFIDIKNAFGSVSHALLWETLSLLGVPTDTLSIITDIYTNSTTTFTTQRGVSVPIPQIGGVRQGCPLSGILFAFAMEPLLRSLTEAGVEHLAFADDVALICHSESQLSLALSQVHDICAWAGLSINASKCAVLSPVAPLSTPAVLNGVPLPSLEAEGQYRYLGRPTGRSFLHADMDQLMSDVRCKSNLILHSALAPWQKLDSLRSFITPILTHPLRLGLLTKTSLSRLQREIVWKVKGLLNLPSRSTLHYLFSPTSCGGIGLSDLCQEADILLVSSSLQLLHCKDARVATLALDQLRRVVAGRVQSEPTTQQLVDYLNGCRMRQGGGYATRTSRTRVAFRTIMARSALRWGPTADGVPALFLNGKEVSPRKSSAIIRDEVRKWRQAKLVGLPHQGKVMSSVAEQPVSSHYTYNGSFTRFAEWRFVHRARLGLVPLNGYSRGAQAVNTSCRRCGYANETLPHVLTHCRVHSAAQQHRHNAILARLVRALPAADRTGGNTRVNQRVPGSTSTLRPDLIVTRGNQVVIVDVTVAFENGCQAFQSAADEKVAKYAELAAEIRSRGKQVDLLAFVVGSLGTWWKGNERVLGRLHISRRYSRLMRRLMVSETLRWSRDVYVEHVTGHRQYAEPAPRADTYLL

SEQ ID NO: 115 - protein, 1520 aa, Sacculina carcini
MSANTPLVAHQSTTLDADGDVLRVFLPLPDVTACPYEDCGATYAITRRGGYTQVRASILRHLEAAHADVRTSVYMCRRCRQPMGVRPSTHRCRQQTPPAEAHTAVLAPSFTCRHCHQRFTNSRALVNHTNVCRRQQSTGANRRQRPSDPQQQQRRRPTHQRQTNGERHTPPSHSQSPQSETPPPSPPTPPPHVMSPRPPLLPTPPLLRTPPLLPTPLLLPTLALPLSPLRPHQISFSYTPSPLTPRIPTFTSPTTPTPTHTYTVSPPTSPPTTYTTLAMVPGAGLTPVDARPRRLSTFVRLAGGVRERPTASDTATRPAPSVSPPRGRWTAADPAAPPASPRSYLAALIGSISPSPPPRPPRLPSSSPPSSSPSSSSSSSSPSSPRPSSSQSSSSSSSSSSSPALHIRSQHSPSTPPARTHHHTSPANNVGNAPRASGVPSSRPARRQKRQPQQVSTARGSQSQQRASVPPTHRPHNNHHTRNTTNRPHNNHHTRSTTNTHTNTLPRTSTPSSHSTLTPNNTRQHTFITPNRYALLSQSDDNSASPSASQQNHTSQITSPGRRRVVGEQSNGPTHQHRNNHTSLQNTLTQFHEPLTQINCNTPFCILDILINTLTQQARDLSGLNTRHQNHPRQNTNTHTNNHTHTHTAQFSHHTEHHDHRQMWRSPPYDPVVAAKIQRDYRTGKAVVYRQLVGETTPPCDIEPLVVGRHFCGETASSPRWSDRPTSVPDITPTPATTLSQPITTAEIQRRINNTQNTTPGPDGLRYSDWKRLDPDCSILTAMFNACRLTGRTPTAWKSSRTILLHKGGDPQELKSWRPIALGNTIAKLYAGIWADRLSHWAETHNILTHSQKGFRPFDGVLEHNFVVQSAIARARKSNTSTHITFIDIKNAFGSVSHALMWETLSLLGVPTDTLSIITDIYTNSTTTFTTQRGVSAPIPQIGGVRQGCPLSGILFAFAMEPLLRSLTEAGVEHLAFADDVALICHSESQLSLALSQVHDICAWAGLSINASKCAVLSPVAPLSTPAVLNGVPLPSLEAEGQYRYLGRPTGRSFLHADMDQLMSDVRRKSNLILHSALAPWQKLDSLRSFITPILTHPLRLGLLTKTSLSRLQREIVWKVKGLLNLPSRSTLHYLFSPTSCGGIGLSDLCQEADILLVSSSLQLLHCKDARVATLALDQLRRVVAGRVQSEPTTQQLVDYLNGCRMRQGGGYATRTSRTRVAFRTIMARSALRWGPTADGVPALFLNGKEVSPRKSSAIIRDEVRKWRQAKLVGLPHQGKVMSSVAEQPVSSHYTYNGSFTRFAEWRFVHRARLGLVPLNGYSRGAQAVNTSCRRCGYANETLPHVLTHCRVHSAAQQHRHNAILARLVRALPAADRTGGNTRVNQRVPGSTSTLRPDLIVTRGNQVVIVDVTVAFENGCQAFQSAADEKVAKYAELAAEIRSRGKQVDLLAFVVGSLGTWWKGNERVLGRLHISRRYSRLMRRLMVSETLRWSRDVYVEHVTGHRQYAEPAPRADTYLL

SEQ ID NO: 116 - protein, 1517 aa, Sacculina carcini
MSANTPLVAHQSTTLDADGDVLRVFLPLPDVTACPKNDCGATYAITRRGGYTQVRASILRHLEATHADVRTSVYMCRRCRQPMGVRPSTHRCRQQTPPAEAHTAVLAPSFICRHCHQRFTNSRALVNHTNVCRRQQSTGANRRQRPSNPQQQQRRRPTHQRQTNGERHTPPSHSQSPQSETPPPSPPTPPPHVMSPRPPLLPTPPLLRTPPLLPTPLLLPTLALPRSPLRSNQISFSYTPSPLTPRIPTFTSPSTPTPTHTYTASPPTSPPTNYTTLAMVPGAGLTPVDARPRRLSTFVRLAGGVRERPTASDTATGPASSVSPPRGRWTAADPAAPPASPRSYLAALIGSISPSPPPRLPSSSSPSSSPSSSSSSSSPSSPRPSSSQPSSSSSSSSSSPALQIRSQHSPSTPPARTHHHTSPANNVGNAPRASGVPSSRPARRQKRQPQQVSAARGSQSQQRASVPPTHRPHNNHHTRNTTNRPHNNHHTRSTTNTHTNTLPRTSTPSSHSTLTPNNTRQHTFITPNRYALLSQSDDNSASPSTSQQNHTSQITSPGRRRVVGEQSNGPTHQHRNNHTSIQNTLTQFHEPLTQINCNTPFCILDILINTLTQQARDLSGLNTRHHNHPRQNTNTRTNNHTHTHTAQFSHHTEHHDHRQMWRSPPYDPVVAAKIQRDYRTGKAVVYRQLVGETTPPCDIEPLVVGRHFCGETASSPRWSDRPTSVPDITPTPATTLSQPITTAEIQRRINNTQNTTPGPDGLRYSDWKRLDPDCSILTAMFNACRLTGRTPTAWKSSRTILLHKGGDPQELKSWRPIALGNTIAKLYAGIWADRLSHWAETHNILTHSQKGFRPFDGVLEHNFVVQSAIARARKSNTSTHITFIDIKNAFGSVSHALLWETLSLLGVPTDTLSIITDIYTNSNTTFTTQRGVSAPIPQIGGVRQGCPLSGILFAFAMEPLLRSLTEAGVEHLAFADDVALICHSESQLSLALSQVHDICAWAGLSINASKCAVLSPVAPLSTPAVLNGVPLPSLEAEGQYRYLGRPTGRSFLHADMDQLMSDVRRKSNLILHSALAPWQKLDSLRSFITPILTHPLRLGLLTKTSLSRLQREIVWKVKGLLNLPSRSTLHYLFSPTSCGGIGLSDLCQEADILLVSSSLQLLHCKDARVATLALDQLRHVVAGRVQSEPTTQQLVDYLNGCRMRQGGGYATRTSRPRVAFRTIMARSALRWGPTADGVPALFLNGKEVSPRKSSAIIRDEVRKWRQAKLVGLPHQGKVMSSVAEQPVSSHYTYNGSFTRFAEWRFVHRARLGLVPLNGYSRGAQAVNTSCRRCGYANETLPHVLTHCRVHSAAQQHRHNAILARLVRALPAADRTGGNTRVNQRVPGSTSTLRPDLIVTRGNQVVIVDVTVAFENGCQAFQSAADEKVAKYAELAAEIRSRGKQVDLLAFVVGSLGTWWKGNERVLGRLHISRRYSRLMRRLMVSETLRWSRDVYVEHVTGHRQYAEPAPRADTYLL

SEQ ID NO: 117 - protein, 1524 aa, Sacculina carcini
MSANTPLVAHQSTTLDADGDVLRVFLPLPDVTACPYEDCGATYAITRRGGYTQVRASILRHLEAAHADVRTSVYMCRRCRQPMGVRPSTHRCRQQTPPAEAHTAVLAPSFTCRHCHQRFTNSRALVNHTNVCRRQQVHQQSTGANRRQRPSGQRQQQRRRPTHQRQTNGERHTPPSHSQSPQSETPPPSPPTPPPHVISPRPPLLPTPPLLRTPPLLPTPLLLPTLALPLSPLRSHQISFSYTPSPLTPRIPTFTSPTTPTPTHTYTASPPTSPPTTYTTLAMVPGAGLTPVDARPRRLSTFVRLAGGVRERPTASDTATRPASSVSPPRGRWTAADPAAPPASPRSYLAALIGSISPSPPPRPPRLPSSSSPSSSPSSSSSSSSPSSPRPSSSQPSSSSSSSSSSPALQIQSQHSPSTPPARTHHHTSPANNVGNAPRASGVPSSRPARRQKRQPQQVSAARGSQSQQRASVPPTHRPHNNHHTRNTTNRPHNNHHTRSTTNTHTNTLPRTSTPSSHSTLTPNNTRQHTFITPNRYALLSQSDDNSASPSASQQNHTSQITSPGRRRVVGEQSNGPTHQHRNIHTSLQNTLTQFHEPLTQINCNTPFCILDILINTLTQQARDLSGLNTRHQNHPRQNTNTHTNNHTHTHTAQFSHHTEHHDHRQMWRSPPYDPVVAAKIQRDYRTGKAVVYRQLVGETTPPCDIEPLVVGRHFCGETASSPRWSDRPTSVPDITPTPATTLSQPITTAEIQRRINNTQNTTPGPDGLRYSDWKRLDPDCSILTAMLNACRLTGRTPTAWKSSRTILLHKGGDPQELKSWRPIALGNTIAKLYAGIWADRLSHWAETHNILTHSQKGFRPFDGVLEHNFVVQSAIARARKSNTSTHITFIDIKNAFGSVSHALLWETLSLLGVPTDTLSIITDIYTNSTTTFTTQRGVSAPIPQIGGVRQGCPLSGILFAFAMEPLLRSLTEAGVEHLAFADDVALICHSESQLSLALSQVHDICAWAGLSINASKCAVLSPVAPLSTPAVLNGVPLPSLEAEGQYRYLGRPTGRSFLHADMDQLMSDVRRKSNLILHSALAPWQKLDSLRSFITPILTHPLRLGLLTKTSLSRLQREIVWKVKGLLNLPSRSTLHYLFSPTSCGGIGLSDLCQEADILLVSSSLQLLHCKDARVATLALDQLRRVVAGRVQSEPTTQQLVDYLNGCRMRQGGGYATRTSRTRVAFRTIMARSALRWGPTADGVPALFLNGKEVSPRKSSAIIRDEVRKWRQAKLVGLPHQGKVMSSVAEQPVSSHYTYNGSFTRFAEWRFVHRARLGLVPLNGYSRGAQAVNTSCRRCGYANETLPHVLTHCRVHSAAQQHRHNAILARLVRALPAADRTGGNTRVNQRVPGSTSTLRPDLIVTRGNQVVIVDVTVAFENGCQAFQSAADEKVAKYAELAAEIRSRGKQVDLLAFVVGSLGTWWKGNERVLGRLHISRRYSRLMRRLMVSETLRWSRDVYVEHVTGHRQYAEPAPRADTYLL

SEQ ID NO: 118 - protein, 1482 aa, Sacculina carcini
MSANTPLVAHQSTTLDADGDVLRVFLPLPDVTACPKNDCGATYAITRRGGYTQVRASILRHLEATHADVRTSVYMCRRCRQPMGVRPSTHRCRQQTPPAEAHTAVLAPSFICRHCHQRFTNSRALVNHTNVCRRQQSTGANRRQRPSNPQQQQRRRPTHQRQTNGERHTPPSHSQSPQSETPPPSPPTPPPHVMSPRPPLLPTPPLLRTPPLLPTPLLLPTLALPRSPLRSNQISFSYTPSPLTPRIPTFTSPSTPTPTHTYTASPPTSPPTNYTTLAMVPGAGLTPVDARPRRLSTFVRLAGGVRERPTASDTATGPASSVSPPRGRWTAADPAAPPASPRSYLAALIGSISPSPPPRLPSSSSPSSSPSSSSSSSSPSSPRPSSSQPSSSSSSSSSSPALQIRSQHSPSTPPARTHHHTSPANNVGNAPRASGVPSSRPARRQKRQPQQVSAARGSQSQQRASVPPTHRPHNNHHTRNTTNRPHNNHHTRSTTNTHTNTLPRTSTPSSHSTLTPNNTRQHTFITPNRYALLSQSDDNSASPSTSQQNHTSQITSPGRRRVVGEQSNGPTHQHRNNHTSIQNTLTQFHEPLTQINCNTPFCILDILINTLTQQARDLSGLNTRHHNHPRQNTNTHTNNHTHTHTAQFSHHTEHHDHRQMWRSPPYDPVVAAKIQRDYRTGKAVVYRQLVGETTPPCDIEPLVVGRHFCGETASSPRWSDRPTSVPDITPTPATTLSQPITTAEIQRRINNTQNTTPGPDGLRYSDWKRLDPDCSILTAMFNACRLTGRTPTAWKSSRTILLHKGGDPQELKSWRPIALGNTIAKLYAGIWADRLSHWAETHNILTHSQKGFRPFDGVLEHNFVVQSAIARARKSNTSTHITFIDIKNAFGSVSHALLWETLSLLGVPTDTLSIITDIYTNSNTTFTTQRGVSAPIPQIGGVRQGCPLSGILFAFAMEPLLRSLTEAGVEHLAFADDVALICHSESQLSLALSQVHDICAWAGLSINASKCAVLSPVAPLSTPAVLNGVPLPSLEAEGQYRYLGRPTGRSFLHADMDQLMSDVRRKSNLILHSALAPWQKLDSLRSFITPILTHPLRLGLLTKTSLSRLQREIVWKVKGLLNLPSRSTLHYLFSPTSCGGIGLSDLCQEADILLVSSSLQLLHCKDARVATLALDQLRRVVAGRVQSEPTTQQLVDYLNGCRMRQGGGYATRTSRTRVAFRTIMARSALRWGPTADGVPALFLNGKEVSPRKSSAIIRDEVRKWRQAKLVGLPHQGKVMSSVAEQPVSSHYTYNGSFTRFAEWRFVHRARLGLVPLNGYSRGAQAVNTSCRRCGYANETLPHVLTHCRVHSAAQQHRHNAILARLVRALPAADRTGGNTRVNQRVPGSTSTLRPDLIVTRGNQIVIVDVTVAFENGCQAFQSAADEKVAKYAELAAEIRSRGKQVDLLLPLLWARSAPGGKVTSVSWAACTSVVATADSCDG

SEQ ID NO: 119 - protein, 1526 aa, Sacculina carcini
MSANTPLVAHQSTTLDADGDVLRVFLPLPDVTACPYEDCGATYAITRRGGYTQVRASILRHLEAAHADVRTSVYMCRRCRQPMGVRPSTHRCRQQTPPAEAHTAVLAPSFTCRHCHQRFTNSRALVNHTNVCRRQQSTGANRRQRPSDQHQQQRRRPTHQRQTNGERHTPPSHSQSPQSETPPPSPPTPPPHVMSPRPPLLPTPPLLRTPPLLPTPLLLPTLALPRSPLRSNQISFSYTPSPLTPHIPTFTSPSTPTPTHTYTVYPPTSPPTTYTTLAMVPGAGLTPVDARPRRLSTFVRLAGGVRERPTASDTATRPAPSVSPPRGRWTAADPAAPPASPRSYLAALIGSISPSPPPRPPRLPSSSSPSSSPSSSSSSSSSSSSSSPSSPRPSSSQPSSSSSSSSSSPALHIRSQHSPSTPPARTHHHTSPANNVGNAPRASGVPSSRPARRQKRQPQQVSAARGSQSQQRASVPPTHGPHNNHHTRNTTNRPHNNHHTRNTTNTHTNTLPRTSTPSSHSTLTPNNTRQHTFITPNRYALLSQSDDNSASPSASQQNHTSQITSPGRRRVVGEQSNGPTHQHRNNHTSLQNTLTQFHEPLTQINCNTPFCILDILINTLTQQARDLSGLNTRHQNHPGQNTNTHTNNHAHTHTAQFSHHTEHHDHRQMWRSPPYDPVVAAKIQRDYRTGKAVVYRQLVGETTPPCDIEPLVVGRHFCGETASSPRWSDRPTSVPDITPTPATTLSQPITTAEIQRRINNTQNTTPGPDGLRYSDWKRLDPDCSILTAMFNACRLTGRTPTAWKSSRTILLHKGGDPQELKSWRPIALGNTIAKLYAGIWADRLSHWAETHNILTHSQKGFRPFDGVLEHNFVVQSAIARARKSNTSTHITFIDIKNAFGSVSHALLWETLSLLGVPTDTLSIITDIYTNSTTTFTTQRGVSVPIPQIGGVRQGCPLSGILFAFAMEPLLRSLTEAGVEHLAFADDVALICHSESQLSLALSQVHDICAWAGLSINASKCAVLSPVAPLSTPAVLNGVPLPSLEAEGQYRYLGRPTGRSFLHADMDQLMSDARRKSNLILHSALAPWQKLDSLRSFITPILTHPLRLGLLTKTSLSRLQREIVWKVKGLLNLPSRSTLHYLFSPTSCGGIGLSDLCQEADILLVSSSLQLLHCKDARVATLALDQLRRVVAGRVQSEPTTQQLVDYLNGCRMRQGGGYATRTSRTRVAFRTIMARSALRWGPTADGVPALFLNGKEVSPRKSSAIIRDEVRKWRQAKLVGLPHQGKVMSSVAEQPVSSHYTYNGSFTRFAEWRFVHRARLGLVPLNGYSRGAQTVNTSCRRCGYANETLPHVLTHCRVHSAAQQHRHNAILARLVRALPAADRTGGNTRVNQRVPGSTSTLRPDLIVTRGNQVVIVDVTVAFENGCQAFQSAADEKVAKYAELAAEIRSRGKQVDLLAFVVGSLGTWWKGNERVLGRLHISRRYSRLMRRLMVSETLRWSRDVYVEHVTGHRQYAEPAPRADTYLM

SEQ ID NO: 120 - protein, 1526 aa, Sacculina carcini
MSANTPLVAHQSTTLDADGDVLRVFLPLPDVTACPYEDCGATYAITRRGGYTQVRASILRHLEAAHADVRTSVYMCRRCRQPMGVRPSTHRCRQQTPPAEAHTAVLAPSFTCRHCHQRFTNSRALVNHTNVCRRQQSTGANRRQRPSDQHQQQRRRPTHQRQTNGERHTPPSHSQSPQSETPPPSPPTPPPHVMSPRPPLLPTPPLLRTPPLLPTPLLLPTLALPRSPLRSNQISFSYTPSPLTPRIPTFTSPSTPTPTHTYTVYPPTSPPTTYTTLAMVPGAGLTPVDARPRRLSTFVRLAGGVRERPTASDTATRPAPSVSPPRGRWTAADPAAPPASPRSYLAALIGSISPSPPPRPPRLPSSSSPSSSPSSSSSSSSSSSSSSPSSPRPSSSQPSSSSSSSSSSPALHIRSQHSPSTPPARTHHHTSPANNVGNAPRASGVPSSRPARRQKRQPQQVSAARGSQSQQRASVPPTHGPHNNHHTRNTTNRPHNNHHTRNTTNTHTNTLPRTSTPSSHSTLTPNNTRQHTFITPNRYALLSQSDDNSASPSASQQNHTSQITSPGRRRVVGEQSNGPTHQHRNNHTSLQNTLTQFHEPLTQINCNTPFCILDILINTLTQQARDLSGLNTRHQNHPGQNTNTHTNNHAHTHTAQFSHHTEHHDHRQMWRSPPYDPVVAAKIQRDYRTGKAVVYRQLVGETTPPCDIEPLVVGRHFCGETASSPRWSDRPTSVPDITPTPATTLSQPITTAEIQRRINNTQNTTPGPDGLRYSDWKRLDPDCSILTAMFNACRLTGRTPTAWKSSRTILLHKGGDPQELKSWRPIALGNTIAKLYAGIWADRLSHWAETHNILTHSQKGFRPFDGVLEHNFVVQSAIARARKSNTSTHITFIDIKNAFGSVSHALLWETLSLLGVPTDTLSIITDIYTNSTTTFTTQRGVSVPIPQIGGVRQGCPLSGILFAFAMEPLLRSLTEAGVEHLAFADDVALICHSESQLSLALSQVHDICAWAGLSINASKCAVLSPVAPLSTPAVLNGVPLPSLEAEGQYRYLGRPTGRSFLHADMDQLMSDARRKSNLILHSALAPWQKLDSLRSFITPILTHPLRLGLLTKTSLSRLQREIVWKVKGLLNLPSRSTLHYLFSPTSCGGIGLSDLCQEADILLVSSSLQLLHCKDARVATLALDQLRRVVAGRVQSEPTTQQLVDYLNGCRMRQGGGYATRTSRTRVAFRTIMARSALRWGPTADGVPALFLNGKEVSPRKSSAIIRDEVRKWRQAKLVGLPHQGKVMSSVAEQPVSSHYTYNGSFTRFAEWRFVHRARLGLVPLNGYSRGAQTVNTSCRRCGYANETLPHVLTHCRVHSAAQQHRHNAILARLVRALPAADRTGGNTRVNQRVPGSTSTLRPDLIVTRGNQVVIVDVTVAFENGCQAFQSAADEKVAKYAELAAEIRSRGKQVDLLAFVVGSLGTWWKGNERVLGRLHISRRYSRLMRRLMVSETLRWSRDVYVEHVTGHRQYAEPAPRADTYLM

SEQ ID NO: 121 - protein, 1282 aa, Sacculina carcini
MSQGADIDRHHVGSSAALSSESSGPVSGSSPAPTTYTTLAMVPGAGLTPVDARPRRLSTFVRLAGGVRERPTASDTATRPAPSVSPPRGRWTAADPAAPPASPRSYLAALIGSISPSPPPRPPRLPSSSPPSSSPSSSSSSSSPSSPRPSSSQSSSSSSSSSSSPALHIRSQHSPSTPPARTHHHTSPANNVGNAPRAYGVPSSRPARRQKRQPQQVSTARGSQSQQRASVPPTHRPHNNHHTRNTTNRPHNNHHTRSTTNTHTNTLPRTSTPSSHSTLTPNNTRQHTFITPNRYALLSQSDDNSASPSASQKKHTSQITSPGRRRVVGEQSNGPTHQHRNNHTSLQNTLTQFHEPLTQINCNTPFCILDILINTLTQQARDLSGLNTRHQNHPRQNTNTHTNNHTHTHTAQFRHHTEHHDHRQMWRSPPYDPVVAAKIQRDYRTGKAVVYRQLVGETTPPCDIEPLVVGRHFCGETASSPRWSDRPTSVPDITPTPATTLSQPITTAEIQRRINNTQNTTPGPDGLRYSDWKRLDPDCSILTAMFNACRLTGRTPTAWKSSRTILLHKGGDPQELKSWRPIALGNTIAKLYAGIWADRLSHWAETHNILTHSQKGFRPFDGVLEHNFVVQSAIARARKSNTSTHITFIDIKNAFGSVSHALMWETLSLLGVPTDTLSIITDIYTNSTTTFTTQRGVSAPIPQIGGVRQGCPLSGILFAFAMEPLLRSLTEAGVEHLAFADDVALICHSESQLSLALSQVHDICAWAGLSINASKCAVLSPVAPLSTPAVLNGVPLPSLEAEGQYRYLGRPTGRSFLHADMDQLMSDVRRKSNLILHSALAPWQKLDSLRSFITPILTHPLRLGLLTKTSLSRLQREIVWKVKGLLNLPSRSTLHYLFSPTSCGGIGLSDLCQEADILLVSSSLQLLHCKDARVATLALDQLRRVVAGRVQSEPTTQQLVDYLNGCRMRQGGGYATRTSRTRVAFRTIMARSALRWGPTADGVPALFLNGKEVSPRKSSAIIRDEVRKWRQAKLVGLPHQGKVMSSVAEQPVSSHYTYNGSFTRFAEWRFVHRARLGLVPLNGYSRGAQAVNTSCRRCGYANETLPHVLTHCRLHSAAQQHRHNAILARLVRALPVADRTGGNTRVNQRVPGSTSTLRPDLIVTRGNQVVIVDVTVAFENGCQAFQSAADEKVAKYAELAAEIRSRGKQVDLLAFVVGSLGTWWKGNERVLGRLHISRRYSRLMRRLMVSETLRWSRDVYVEHVTGHRQYAEPAPRADTYLL

SEQ ID NO: 122 - protein, 1520 aa, Sacculina carcini
MSANTPLVAHQSTTLDADGDVLRVFLPLPDVTACPYEDCGATYAITRRGGYTQVRASILRHLEAAHADVRTSVYMCRRCRQPMGVRPSTHRCRQQTPPAEAHTAVLAPSFTCRHCHQRFTNSRALVNHTNVCRRQQSTGANRRQRPSDPQQQQRRRPTHQRQTNGERHTPPSHSQSPQSETPPPRPPTPPPHVMSPRPPLLPTPPLLRTPPLLPTPLLLPTLALPLSPLRSNQISFSYTPSPLTPRIPTFTSPTTPTPTHTYTVSPPTSPPTTYTTLAMVPGAGLTPVDARPRRLSTFVRLAGGVRERPTASDTATRPAPSVSPPRGRWTAADPAAPPASPRSYLAALIGSISPSPPPRPPRLPSSSPPSSSPSSSSSSSSPSSPRPSSSQSSSSSSSSSSSPALHIRSQHSPSTPPARTHHHTSPANNVGNAPRASGVPSSRPARRQKRQPQQVSAARGSQSQQRASVPPTHRPHNNHHTRNTTNRAHNNHHTRSTTNTHTNTLPRTSTPSSHSTLTPNNTRQHTFITPNRYALLSQSDDNSASPSTSQQNHTSQITSPGRRRVVGEQSNGPTHQHRNNHTSIQNTLTQFHEPLTQINCNTPFCILDILINTLTQQARDLSGLNTRHHNHPRQNTNTHTNNHTHTHTAQFRHHTEHHDHRQMWRSPPYDPVVAAKIQRDYRTGKAVVYRQLVGETTPPCDIEPLVVGRHFCGETASSPRWSDRPTSVPDITPTPATTLSQPITTAEIQRRINNTQNTTPGPDGLRYSDWKRLDPDCSILTAMFNACRLTGRTPTAWKSSRTILLHKGGDPQELKSWRPIALGNTIAKLYAGIWADRLSHWAETHNILTHSQKGFRPFDGVLEHNFVVQSAIARARKSNTSTHITFIDIKNAFGSVSHALLWETLSLLGVPTDTLSIITDIYTNSTTTFTTQRGVSAPIPQIGGVRQGCPLSGILFAFAMEPLLRSLTEAGVEHLAFADDVALICHSESQLSLALSQVHDICAWAGLSINASKCAVLSPVAPLSTPAVLNGVPLPSLEAEGQYRYLGRPTGRSFLHADMDQLMSDVRRKSNLILHSALAPWQKLDSLRSFITPILTHPLRLGLLTKTSLSRLQREIVWKVKGLLNLPSRSTLHYLFSPTSCGGIGLSDLCQEADILLVSSSLQLLHCKDARVATLALDQLRRVVTGRVQSEPTTQQLVDYLNGCRMRQGGGYATRTSRTRVAFRTIMARSALRWGPTADGVPALFLNGKEVSPRKSSAIIRDEVRKWRQAKLVGLPHQGKVMSSVAEQPVSSHYTYNGSFTRFAEWRFVHRARLGLVPLNGYSRGAQAVNTSCRRCGYANETLPHVLTHCRVHSAAQQHRHNAILARLVRALPAADRTGGNTRVNQRVPDSTSTLRPDLIVTRGNQVVIVDVTVAFENGCQAFQSAADEKVAKYAELAAEIRSRGKQVDLLAFVVGSLGTWWKGNERVLGRLHISRRYSRLMRRLMVSETLRWSRDVYVEHVTGHRQYAEPAPRADTYLL

SEQ ID NO: 123 - protein, 1524 aa, Sacculina carcini
MSANTPLVAHQSTTLDADGDVLRVFLPLPDVTACPYEDCGATYAITRRGGYTQVRASILRHLEAAHADVRTSVYMCRRCRQPMGVRPSTHRCRQQTPPAEAHTAVLAPSFTCRHCHQRFTNSRALVNHTNVCRRQQVHQQSTGANRRQRPSGQRQQQRRRPTHQRQTNGERHTPPSHSQSPQSETPPPSPPTPPPHVISPRPPLLPTPPLLRTPPLLPTPLLLPTLALPLSPLRSHQISFSYTPSPLTPRIPTFTSPTTPTPTHTYTASPPTSPPTTYTTLAMVPGAGLTPVDARPRRLSTFVRLAGGVRERPTASDTATRPASSVSPPRGRWTAADPAAPPASPRSYLAALIGSISPSPPPRPPRLPSSSSPSSSPSSSSSSSSPSSPRPSSSQPSSSSSSSSSSPALQIQSQHSPSTPPARTHHHTSPANNVGNAPRASGVPSSRPARRQKRQPQQVSAARGSQSQQRASVPPTHGPHNNHHTRNTTNRPHNNHHTRSTTNTHTNTLPRTSTPSSHSTLTPNNTRQHTFITPNRYALLSQSDDNSASPSASQQNHTSQITSPGRRRVVGEQSNGPTHQHRNNHTSLQNTLTQFHEPLTQINCNTPFCILDILINTLTQQARDLSGLNTRHQNHPRQNTNTHTNNHTHTHTAQFSHHTEHHDHRQMWRSPPYDPVVAAKIQRDYRTGKAVVYRQLVGETTPPCDIEPLVVGRHFCGETASSPRWSDRPTSVPDITPTPATTLSQPITTAEIQRRINNTQNTTPGPDGLRYSDWKRLDPDCSILTAMLNACRLTGRTPTAWKSSRTILLHKGGDPQELKSWRPIALGNTIAKLYAGIWADRLSHWAETHNILTHSQKGFRPFDGVLEHNFVVQSAIARARKSNTSTHITFIDIKNAFGSVSHALLWETLSLLGVPTDTLSIITDIYTNSTTTFTTQRGVSAPIPQIGGVRQGCPLSGILFAFAMEPLLRSLTEAGVEHLAFADDVALICHSESQLSLALSQVHDICAWAGLSINASKCAVLSPVAPLSTPAVLNGVPLPSLEAEGQYRYLGRPTGRSFLHADMDQLMSDVRRKSNLILHSALAPWQKLDSLRSFITPILTHPLRLGLLTKTSLSRLQREIVWKVKGLLNLPSRSTLHYLFSPTSCGGIGLSDLCQEADILLVSSSLQLLHCKDARVATLALDQLRRVVAGRVQSEPTTQQLVDYLNGCRMRQGGGYATRTSRTRVAFRTIMARSALRWGPTADGVPALFLNGKEVSPRKSSAIIRDEVRKWRQAKLVGLPHQGKVMSSVAEQPVSSHYTYNGSFTRFAEWRFVHRARLGLVPLNGYSRGAQAVNTSCRRCGYANETLPHVLTHCRVHSAAQQHRHNAILARLVRALPAADRTGGNTRVNQRVPGSTSTLRPDLIVTRGNQVVIVDVTVAFENGCQAFQSAADEKVAKYAELAAEIRSRGKQVDLLAFVVGSLGTWWKGNERVLGRLHISRRYSRLMRRLMVSETLRWSRDVYVEHVTGHRQYAEPAPRADTYLL

SEQ ID NO: 124 - protein, 1446 aa, Sacculina carcini
MCRRCRQPMGVRPSTHRCRQQTPPAEAHTAVLAPSFTCRHCHQRFTNSRALVNHTNVCRRQQSTGANRRQRPSDPQQQQRRRPTHQRQTNGERHTPPSHSQSPQSETPPPSPPTPPPHVMSPRPPLLPTPPLLRTPPLLPTPLLLPTLALPLSPLRPHQISFSYTPSPLTPRIPTFTSPTTPTPTHTYTVSPPTSPPTTYTTLAMVPGAGLAPVDARPRRLSTFVRLAGGVRERPTASDTATRPAPSVSPPRGRWTAADPAAPPASPRSYLAALIGSISPSPPPRPPRLPSSSPPSSSPSSSSSSSSPSSPRPSSSQSSSSSSSSSSSPALHIRSQHSPSTPPARTHHHTSPANNVGNAPRASGVPSSRPARRQKRQPQQVSTARGSQSQQRASVPPTHRPHNNHHTRNTTNRPHNNHHTRSTTNTHTNTLPRTSTPSSHSTLTPNNTRQHTFITPNRYALLSQSDDNSASPSVSQQNHTSQITSPGRRRVVGEQSNGPTHQHQNNHTSLQNTLTQFHEPLTQINCNTPFCILDILINTLTQQARDLSGLNTRHQNHPRQNTNTHTNNHTHTHTAQFSHHTEHHDHRQMWRSPPYDPVVAAKIQRDYRTGKAVVYRQLVGETTPPCDIEPLVVGRHFCGETASSPRWSDRPTSVPDITPTPATTLSQPITTAEIQRRINNTQNTTPGPDGLRYSDWKRLDPDCSILTAMFNACRLTGRTPTAWKSSRTILLHKGGDPQELKSWRPIALGNTIAKLYAGIWADRLSHWAETHNILTHSQKGFRPFDGVLEHNFVVQSAIARARKSNTSTHITFIDIKNAFGSVSHALLWETLSLLGVPTDTLSIITDIYTNSTTTFTTQRGVSAPIPQIGGVRQGCPLSGILFAFAMEPLLRSLTEAGVEHLAFADDVALICHSESQLSLALSQVHDICAWAGLSINASKCAVLSPVAPLSTPAVLNGVPLPSLEAEGQYRYLGRPTGRSFLHADMDQLMSDVRRKSNLILHSALAPWQKLDSLRSFITPILTHPLRLGLLTKTSLSRLQREIVWKVKGLLNLPSRSTLHYLFSPTSCGGIGLSDLCQEADILLVSSSLQLLHCKDARVATLALDQLRRVVAGRVQSEPTTQQLVDYLNGCRMRQGGGYATRTSRTRVAFRTIMARSALRWGPTADGVPALFLNGKEVSPRKSSAIIRDEVRKWRQAKLVGLPHQGKVMSSVAEQPVSSHYTYNGSFTRFAEWRFVHRARLGLVPLNGYSRGAQAVNTSCRRCGYANETLPHVLTHCRVHSAAQQHRHNAILARLVRALPAADRTGGNTRVNQRVPGSTSTLRPDLIVTRGNQVVIVDVTVAFENGCQAFQSAADEKVAKYAELAAEIRSRGKQVDLLAFVVGSLGTWWKGNERVLGRLHISRRYSRLMRRLMVSETLRWSRDVYVEHVTGHRQYAEPAPRADTYLL

SEQ ID NO: 125 - protein, 1520 aa, Sacculina carcini
MSANTPLVAHQSTTLDADGDVLRVFLPLPDVTACPYEDCGATYAITRRGGYTQVRASILRHLEAAHADVRTSVYMCRRCRQPMGVRPSTHRCRQQTPPAEAHTAVLAPSFTCRHCHQRFTNSRALVNHTNVCRRQQSTGANRRQRPSDPQQQQRRRPTHQRQTNGERHTPPSHSQSPQSETPPPSPPTPPPHVMSPRPPLLPTPPLLRTPPLLPTPLLLPTLALPLSPLRSNQISFSYTPSPLTPRIPTFTSPTTPTPTHTYTVSPPTSPPTTYTTLAMVPGAGLTSVDARPRRLSTFVRLAGGVRERPTASDTATRPAPSVSPPRGRWTAADPAAPPASPRSYLAALIGSISPSPPPRPPRLPSSSPPSSSPSSSSSSSSPSSPRPSSSQSSSSSSSSSSSPALHIRSQHSPSTPPARTHHHTSPANNVGNAPRASGVPSSRPARRQKRQPQQVSTARGSQSQQRASVPPTHRPHNNHHTRNTTNRPHNNHHTRSTTNMHTNTLPRTSTPSSHSTLTPNNTRQHTFITPNRYALLSQSDDNSASPSVSQQNHTSQITSPGRRRVVGEQSNGPTHQHRNNHTSLQNTLTQFHEPLTQINCNTPFCILDILINTLTQQARDLSGLNTRHQNHPRQNTNTHTNNHTHTHTAQFSHHTEHHDHRQMWRSPPYDPVVAAKIQRDYRTGKAVVYRQLVGETTPPCDIEPLVVGRHFCGETASSPRWSDRPTSVPDITPTPATTLSQPITTAEIQRRINNTQNTTPGPDGLRYSDWKRLDPDCSILTAMFNACRLTGRTPTAWKSSRTILLHKGGDPQELKSWRPIALGNTIAKLYAGIWADRLSHWAETHNILTHSQKGFRPFDGVLEHNFVVQSAIARARKSNTSTHITFIDIKNAFGSVSHALLWETLSLLGVPTDTLSIITDIYTNSTTTFTTQRGVSAPIPQIGGVRQGCPLSGILFAFAMEPLLRSLTEAGVEHLAFADDVALICHSESQLSLALSQVHDICAWAGLSINASKCAVLSPVAPLSTPAVLNGVPLPSLEAEGQYRYLGRPTGRSFLHADMDQLMSDVRRKSNLILHSALAPWQKLDSLRSFITPILTHPLRLGLLTKTSLSRLQREIVWKVKGLLNLPSRSTLHYLFSPTSCGGIGLSDLCQEADILLVSSSLQLLHCKDARVATLALDQLRRVVAGRVQSEPTTQQLVDYLNGCRMRQGGGYATRTSRTRVAFRTIMARSALRWGPTADGVPALFLNGKEVSPRKSSAIIRDEVRKWRQAKLVGLPHQGKVMSSVAEQPVSSHYTYNGSFTRFAEWRFVHRARLGLVPLNGYSRGAQAVNTSCRRCGYANETLPHVLTHCRVHSAAQQHRHNAILARLVRALPAADRTGGNTRVNQRVPDSTSTLRPDLIVTRGNQVVIVDVTVAFENGCQAFQSAADEKVAKYAELAAEIRSRGKQVDLLAFVVGSLGTWWKGNERVLGRLHISRRYSRLMRRLMVSETLRWSRDVYVEHVTGHRQYAEPAPRADTYLL

SEQ ID NO: 126 - protein, 1517 aa, Sacculina carcini
MSANTPLVAHQSTTLDADGDVLRVFLPLPDVTACPYEDCGATYAITRRGGYTQVRASILRHLEAAHADVRTSVYMCRRCRQPMGVRPSTHRCRQQTPPAEAHTAVLAPSFTCRHCHQRFTNSRALVNHTNVCRRQQSTGANRRQRPSDQHQQQRRRPTHQRQTNGERHTPPSHSQSPQSETPPPSPPTPPPHVMSPRPPLLPTPPPLRTPPLLPTPLLLPTLALPLSPLRSHQISFSYTPSPLTPRIPTFTSPTTPTPTHTYTVSPPTSPPTTYTTLAMVPGAGLTPVDARPRRLSTFVRLAGGVRERPTASDTATRPAPSVSPPRGRWTAADPAAPPASPRSYLAALIGSISPSPPPRLPSSSSPSSSPSSSSSSSSPSSPRPSSSQPSSSSSSSSSSPALQIRSQHSPSTPPARTHHHTSPANNVGNAPRASGVPSSRPARRQKRQPQQVSAARGSQSQQRASVPPTHRPHNNHHTRNTTNRPHNNHHTRSTTNTHTNTLPRTSTPSSHSTLTPNNTRQHTFITPNRYALLSQSDDNSASPSTSQQNHTSQITSPGRRRVVGEQSNGPTHQHRNNHTSLQNTLTQFHEPLTQINCNTPFCILDILINTLTQQARDLSGLNTRHHNHPRQNTNTHTNNHTHTHTAQFSHHTEHHDHRQMWRSPPYDPVVAAKIQRDYRTGKAVVYRQLVGETTPPCDIEPLVVGRHFCGETASSPRWSDRPTSVPDITPTPATTLSQPITTAEIQRRINNTQNTTPGPDGLRYSDWKRLDPDCSILTAMFNACRLTGRTPTAWKSSRTILLHKGGDPQELKSWRPIALGNTIAKLYAGIWADRLSHWAETHNILTHSQKGFRPFDGVLEHNFVVQSAIARARKSNTSTHITFIDIKNAFGSVSHALLWETLSLLGVPTDTLSIITDIYTNSTTTFTTQRGVSAPIPQIGGVRQGCPLSGILFAFAMEPLLRSLTEAGVEHLAFADDVALICHSESQLSLALSQVHDICAWAGLSINASKCAVLSPVAPLSTPAVLNGVPLPSLEAEGQYRYLGRPTGRSFLHADMDQLMSDVRRKSNLILHSALAPWQKLDSLRSFITPILTHPLRLGLLTKTSLSRLQREIVWKVKGLLNLPSRSTLHYLFSPTSCGGIGLSDLCQEADILLVSSSLQLLHCKDARVATLALDQLRRVVAGRVQSEPTTQQLVDYLNGCRMRQGGGYATRTSRTRVAFRTIMARSALRWGPTADGVPALFLNGKEVSPRKSSAIIRDEVRKWRQAKLVGLPHQGKVMSSVAEQPVSSHYTYNGSFTRFAEWRFVHRARLGLVPLNGYSRGAQAVNTSCRRCGYANETLPHVLTHCRVHSAAQQHRHNAILARLVRALPAADRTGGNTRVNQRVPGSTSTLRPDLIVTRGNQVVIVDVTVAFENGCQAFQSAADEKVAKYAELAAEIRSRGKQVDLLAFVVGSLGTWWKGNERVLGRLHISRRYSRLMRRLMVSETLRWSRDVYVEHVTGHRQYAEPAPRADTYLL

SEQ ID NO: 127 - protein, 858 aa, Sacculina carcini
MWRSPPYDPVVAAKIQRDYRTGKAVVYRQLVGETTPPCDIEPLVVGRHFCGETASSPRWSDRPTSVPDITPTPATTLSQPITTAEIQRRINNTQNTTPGPDGLRYSDWKRLDPDCSILTAMFNACRLTGRTPTAWKSSRTILLHKGGDPQELKSWRPIALGNTIAKLYAGIWADRLSHWAETHNILTHSQKGFRPFDGVLEHNFVVQSAIARARKSNTSTHITFIDIKNAFGSVSHALLWETLSLLGVPTDTLSIITDIYTNSTTTFTTQRGVSAPIPQIGGVRQGCPLSGILFAFAMEPLLRSLTEAGVEHLAFADDVALICHSESQLSLALSQVHDICAWAGLSINASKCAVLSPVAPLSTPAVLNGVPLPSLEAEGQYRYLGRPTGRSFLHADMDQLMSDVRRKSNLILHSALAPWQKLDSLRSFITPILTHPLRLGLLTKTSLSRLQREIVWKVKGLLNLPSRSTLHYLFSPTSCGGIGLSDLCQEADILLVSSSLQLLHCKDARVATLALDQLRRVVAGRVQSEPTTQQLVDYLNGCRMRQGGGYATRTSRTRVAFRTIMARSALRWGPTADGVPALFLNGKEVSPRKSSAIIRDEVRKWRQAKLVGLPHQGKVMSSVAEQPVSSHYTYNGSFTRFAEWRFVHRARLGLVPLNGYSRGAQAVNTSCRRCGYANETLPHVLTHCRVHSAAQQHRHNAILARLVRALPAADRTGGNTRVNQRVPGSTSTLRPDLIVTRGNQVVIVDVTVAFENGCQAFQSAADEKVAKYAELAAEIRSRGKQVDLLAFVVGSLGTWWKGNERVLGRLHISRRYSRLMRRLMVSETLRWSRDVYVEHVTGHRQYAEPAPRADTYLL

SEQ ID NO: 128 - protein, 1520 aa, Sacculina carcini
MSANTPLVAHQSTTLDADGDVLRVFLPLPDVTACPYEDCGATYAITRRGGYTQVRASILRHLEAAHADVRTSVYMCRRCRQPMGVRPSTHRCRQQTPPAEAHTAVLAPSFTCRHCHQRFTNSRALVNHTNVCRRQQSTGANRRQRPSDPQQQQRRRPTHQRQTNGERHTPPSHSQSPQSETPPPSPPTPPPHVMSPRPPLLPTPPLLRTPPLLPTPLLLPTLALPLSPLRPHQISFSYTPSPLTPRIPTFTSPTTPTPTHTYTVSPPTSPPTTYTTLAMVPGAGLAPVDARPRRLSTFVRLAGGVRERPTASDTATRPAPSVSPPRGRWTAADPAAPPASPRSYLAALIGSISPSPPPRPPRLPSSSPPSSSPSSSSSSSSPSSPRPSSSQSSSSSSSSSSSPALHIRSQHSPSTPPARTHHHTSPANNVGNAPRASGVPSSRPARRQKRQPQQVSTARGSQSQQRASVPPTHRPHNNHHTRNTTNRPHNNHHTRSTTNMHTNTLPRTSTPSSHSTLTPNNTRQHTFITPNRYALLSQSDDNSASPSVSQQNHTSQITSPGRRRVVGEQSNGPTHQHRNNHTSLQNTLTQFHEPLTQINCNTPFCILDILINTLTQQARDLSGLNTRHQNHPRQNTNTHTNNHTHTHTAQFSHHTEHHDHRQMWRSPPYDPVVAAKIQRDYRTGKAVVYRQLVGETTPPCDIEPLVVGRHFCGETASSPRWSDRPTSVPDITPTPATTLSQPITTAEIQRRINNTQNTTPGPDGLRYSDWKRLDPDCSILTAMFNACRLTGRTPTAWKSSRTILLHKGGDPQELKSWRPIALGNTIAKLYAGIWADRLSHWAETHNILTHSQKGFRPFDGVLEHNFVVQSAIARARKSNTSTHITFIDIKNAFGSVSHALLWETLSLLGVPTDTLSIITDIYTNSTTTFTTQRGVSAPIPQIGGVRQGCPLSGILFAFAMEPLLRSLTEAGVEHLAFADDVALICHSESQLSLALSQVHDICAWAGLSINASKCAVLSPVAPLSTPAVLNGVPLPSLEAEGQYRYLGRPTGRSFLHADMDQLMSDVRRKSNLILHSALAPWQKLDSLRSFITPILTHPLRLGLLTKTSLSRLQREIVWKVKGLLNLPSRSTLHYLFSPTSCGGIGLSDLCQEADILLVSSSLQLLHCKDARVATLALDQLRRVVAGRVQSEPTTQQLVDYLNGCRMRQGGGYATRTSRTRVAFRTIMARSALRWGPTADGVPALFLNGKEVSPRKSSAIIRDEVRKWRQAKLVGLPHQGKVMSSVAEQPVSSHYTYNGSFTRFAEWRFVHRARLGLVPLNGYSRGAQAVNTSCRRCGYANETLPHVLTHCRVHSAAQQHRHNAILARLVRALPAADRTGGNTRVNQRVPGSTSTLRPDLIVTRGNQVVIVDVTVAFENGCQAFQSAADEKVAKYAELAAEIRSRGKQVDLLAFVVGSLGTWWKGNERVLGRLHISRRYSRLMRRLMVSETLRWSRDVYVEHVTGHRQYAEPAPRADTYLM

SEQ ID NO: 129 - protein, 1524 aa, Sacculina carcini
MSANTPLVAHQSTTLDADGDVLRVFLPLPDVTACPYEDCGATYAITRRGGYTQVRASILRHLEAAHADVRTSVYMCRRCRQPMGVRPSTHRCRQQTPPAEAHTAVLAPSFTCRHCHQRFTNSRALVNHTNVCRRQQVHQQSTGANRRQRPSGQRQQQRRRPTHQRQTNGERHTPPSHSQSPQSETPPPSPPTPPPHVISPRPPLLPTPPLLRTPPLLPTPLLLPTLALPLSPLRSHQISFSYTPSPLTPRIPTFTSPTTPTPTHTYTASPPTSPPTTYTTLAMVPGAGLTPVDARPRRLSTFVRLAGGVRERPTASDTATGPASSVSPPRGRWTAADPAAPPASPRSYLAALIGSISPSPPPRPPRLPSSSSPSSSPSSSSSSSSPSSPRPSSSQPSSSSSSSSSSPALQIQSQHSPSTPPARTHHHTSPANNVGNAPRASGVPSSRPARRQKRQPQQVSAARGSQSQQRASVPPTHGPHNNHHTRNTTNRPHNNHHTRSTTNTHTNTLPRTSTPSSHSTLTPNNTRQHTFITPNRYALLSQSDDNSASPSASQQNHTSQITSPGRRRVVGEQSNGPTHQHRNNHTSLQNTLTQFHEPLTQINCNTPFCILDILINTLTQQARDLSGLNTRHQNHPRQNTNTHTNNHTHTHTAQFSHHTEHHDHRQMWRSPPYDPVVAAKIQRDYRTGKAVVYRQLVGETTPPCDIEPLVVGRHFCGETASSPRWSDRPTSVPDITPTPATTLSQPITTAEIQRRINNTQNTTPGPDGLRYSDWKRLDPDCSILTAMFNACRLTGRTPTAWKSSRTILLHKGGDPQELKSWRPIALGNTIAKLYAGIWADRLSHWAETHNILTHSQKGFRPFDGVLEHNFVVQSAIARARKSNTSTHITFIDIKNAFGSVSHALLWETLSLLGVPTDTLSIITDIYTNSTTTFTTQRGVSVPIPQIGGVRQGCPLSGILFAFAMEPLLRSLTEAGVEHLAFADDVALICHSESQLSLALSQVHDICAWAGLSINASKCAVLSPVAPLSTPAVLNGVPLPSLEAEGQYRYLGRPTGRSFLHADMDQLMSDVRRKSNLILHSALAPWQKLDSLRSFITPILTHPLRLGLLTKTSLSRLQREIVWKVKGLLNLPSRSTLHYLFSPTSCGGIGLSDLCQEADILLVSSSLQLLHCKDARVATLALDQLRRVVAGRVQSEPTTQQLVDYLNGCRMRQGGGYATRTSRTRVAFRTIMARSALRWGPTADGVPALFLNGKEVSPRKSSAIIRDEVRKWRQAKLVGLPHQGKVMSSVAEQPVSSHFTYNGSFTRFAEWRFVHRARLGLVPLNGYSRGAQAVNTSCRRCGYANETLPHVLTHCRVHSAAQQHRHNAILARLVRALPAADRTGGNTRVNQRVPGSTSTLRPDLIVTRGNQVVIVDVTVAFENGCQAFQSAADEKVAKYAELAAEIRSRGKQVDLLAFVVGSLGTWWKGNERVLGRLHISRRYSRLMRRLMVSETLRWSRDVYVEHVTGHRQYAEPAPRADTYLM

SEQ ID NO: 130 - protein, 1520 aa, Sacculina carcini
MSANTPLVAHQSTTLDADGDVLRVFLPLPDVTACPYEDCGATYAITRRGGYTQVRASILRHLEAAHADVRTSVYMCRRCRQPMGVRPSTHRCRQQTPPAEAHTAVLAPSFTCRHCHQRFTNSRALVNHTNVCRRQQSTGANRRQRTSDPQQQQRRRPTHQRQTNGERHTPPSHSQSPQSETPPPSPPTPPPHVMSPRPPLLPTPPLLRTPPLLPTPLLLPTLALPLSPLRPHQISFSYTPSPLTPRIPTFTSPTTPTPTHTYTVSPPTSPPTTYTTLAMVPGAGLAPVDARPRRLSTFVRLAGGVRERPTASDTATRPAPSVSPPRGRWTAADPAAPPASPRSYLAALIGSISPSPPPRPPRLPSSSPPSSSPSSSSSSSSPSSPRPSSSQSSSSSSSSSSSPALHIRSQHSPSTPPARTHHHTSPANNVGNAPRASGVPSSRPARRQKRQPQQVSTARGSQSQQRASVPPTHRPHNNHHTRNTTNRPHNNHHTRSTTNMHTNTLPRTSTPSSHSTLTPNNTRQHTFITPNRYALLSQSDDNSASPSVSQQNHTSQITSPGRRRVVGEQSNGPTHQHRNNHTSLQNTLTQFHEPLTQINCNTPFCILDILINTLTQQARDLSGLNTRHQNHPRQNTNTHTNNHTHTHTAQFSHHTEHHDHRQMWRSPPYDPVVAAKIQRDYRTGKAVVYRQLVGETTPPCDIEPLVVGRHFCGETASSPRWSDRPTSVPDITPTPATTLSQPITTAEIQRRINNTQNTTPGPDGLRYSDWKRLDPDCSILTAMFNACRLTGRTPTAWKSSRTILLHKGGDPQELKSWRPIALGNTIAKLYAGIWADRLSHWAETHNILTHSQKGFRPFDGVLEHNFVVQSAIARARKSNTSTHITFIDIKNAFGSVSHALLWETLSLLGVPTDTLSIITDIYTNSTTTFTTQRGVSAPIPQIGGVRQGCPLSGILFAFAMEPLLRSLTEAGVEHLAFADDVALICHSESQLSLALSQVHDICAWAGLSINASKCAVLSPVAPLSTPAVLNGVPLPSLEAEGQYRYLGRPTGRSFLHADMDQLMSDVRRKSNLILHSALAPWQKLDSLRSFITPILTHPLRLGLLTKTSLSRLQREIVWKVKGLLNLPSRSTLHYLFSPTSCGGIGLSDLCQEADILLVSSSLQLLHCKDARVATLALDQLRRVVAGRVQSEPTTQQLVDYLNGCRMRQGGGYATRTSRTRVAFRTIMARSALRWGPTADGVPALFLNGKEVSPRKSSAIIRDEVRKWRQAKLVGLPHQGKVMSSVAEQPVSSHYTYNGSFTRFAEWRFVHRARLGLVPLNGYSRGAQAVNTSCRRCGYANETLPHVLTHCRVHSAAQQHRHNAILARLVRALPAADRTGGNTRVNQRVPGSTSTLRPDLIVTRGNQVVIVDVTVAFENGCQAFQSAADEKVAKYAELAAEIRSRGKQVDLLAFVVGSLGTWWKGNERVLGRLHISRRYSRLMRRLMVSETLRWSRDVYVEHVTGHRQYAEPAPRADTYLL

SEQ ID NO: 131 - protein, 1524 aa, Sacculina carcini
MSANTPLVAHQSTTLDADGDVLRVFLPLPDVTACPYEDCGATYAITRRGGYTQVRASILRHLEAAHADVRTSVYMCRRCRQPMGVRPSTHRCRQQTPPAEAHTAVLAPSFTCRHCHQRFTNSRALVNHTNVCRRQQVHQQSTGANRRQRPSGQRQQQRRRPTHQRQTNGERHTPPSHSQSPQSETPPPSPPTPPPHVISPRPPLLPTPPLLRTPPLLPTPLLLPTLALPLSPLRSHQISFSYTPSPLTPRIPTFTSPTTPTPTHTYTASPPTSPPTTYTTLAMVPGAGLTPVDARPRRLSTFVRLAGGVRERPTASDTATRPASSVSPPRGRWTAADPAAPPASPRSYLAALIGSISPSPPPRPPRLPSSSSPSSSPSSSSSSSSPSSPRPSSSQSSSSSSSSSSSPALQIQSQHSPSTPPARTHHHTSPANNVGNAPRASGVPSSRPARRQKRQPQQVSAARGSQSQQRASVPPTHGPHNNHHTRNTTNRPHNNHHTRSTTNTHTNTLPRTSTPSSHSTLTPNNTRQHTFITPNRYALLSQSDDNSASPSASQQNHTSQITSPGRRRVVGEQSNGPTHQHRNNHTSLQNTLTQFHEPLTQINCNTPFCILDILINTLTQQARDLSGLNTRHQNHPRQNTNTHTNNHTHTHTAQFSHHTEHHDHRQMWRSPPYDPVVAAKIQRDYRTGKAVVYRQLVGETTPPCDIEPLVVGRHFCGETASSPRWSDRPTSVPDITPTPATTLSQPITTAEIQRRINNTQNTTPGPDGLRYSDWKRLDPDCSILTAMFNACRLTGRTPTAWKSSRTILLHKGGDPQELKSWRPIALGNTIAKLYAGIWADRLSHWAETHNILTHSQKGFRPFDGVLEHNFVVQSAIARARKSNTSTHITFIDIKNAFGSVSHALLWETLSLLGVPTDTLSIITDIYTNSTTTFTTQRGVSVPIPQIGGVRQGCPLSGILFAFAMEPLLRSLTEAGVEHLAFADDVALICHSESQLSLALSQVHDICAWAGLSINANKCAVLSPVAPLSTPAVLNGVPLPSLEAEGQYRYLGRPTGRSFLHADMDQLMSDVRRKSNLILHSALAPWQKLDSLRSFITPILTHPLRLGLLTKTSLSRLQREIVWKVKGLLNLPSRSTLHYLFSPTSCGGIGLSDLCQEADILLVSSSLQLLHCKDARVATLALDQLRRVVAGRVQSEPTTQQLVDYLNGCRMRQGGGYATRTSRTRVAFRTIMARSALRWGPTADGVPALFLNGKEVSPRKSSAIIRDEVRKWRQAKLVGLPHQGKVMSSVAEQPVSSHFTYNGSFTRFAEWRFVHRARLGLVPLNGYSRGAQAVNTSCRRCGYANETLPHVLTHCRVHSAAQQHRHNAILARLVRALPAADRTGGNTRVNQRVPGSTSTLRPDLIVTRGNQVVIVDVTVAFENGCQAFQSAADEKVAKYAELAAEIRSRGKQVDLLAFVVGSLGTWWKGNERVLGRLHISRRYSRLMRRLMVSETLRWSRDVYVEHVTGHRQYAEPAPRADTYLM

SEQ ID NO: 132 - protein, 1533 aa, Sacculina carcini
MSANTPLVAHQSTTLDADGDVLRVFLPLPDVTACPYEDCGATYAITRRGGYTQVRASILRHLEAAHADVRTSVYMCRRCRQPMGVRPSTHRCRQQTPPAEAHTAVLAPSFTCRHCHQRFTNSRALVNHTNVCRRQQSTGANRRQRPSDPQQQQRRRPTHQRQTNGERHTPPSHSQSPQSETPPPSPPTPPPHVMSPRPPLLPTPPLLRTPPLLPTPLLLPTLTLPLSPLRSNQISFSYTPSPLTPRIPTFTSPTTPTPTHTYTVSPPTSPPTTYTTLAMVPGAGLTPVDARPRRLSTFVRLAGGVRERPTASDTATRPAPSVSPPRGRWTAADPAAPPASPRSYLAALIGSISPSPPPRPPRLPSSSPPSSSPSSSSSSSSPSSPRPSSSQSSSSSSSSSSSPALHIRSQHSPSTPPARTHHHTSPANNVGNAPRASGVPSSRPARRQKRQPQQVSAARGSQSQQRASVPPTHRPHNNHHTRNTTNRPHNNHHTRNTTNRPHNNHHTRSTTNTHTNTLPRTSTPSSHSTLTPNNTRQHTFITPNRYALLSQSDDNSASPSASQQNHTSQITSPGRRRVVGEQSNGPTHQHRNNHTSLQNTLTQFHEPLTQINCNTPFCILDILINTLTQQARDLSGLNTRHQNHRRQNTNTHTNNHTNTHTAQFSHHTEHHDHRQMWRSPPYDPVVAAKIQRDYRTGKAVVYRQLVGETTPPCDIEPVVVGRHFCGETASSPRWSDRPTSVPDITPTPATTLSQPITTAEIQRRINNTQNTTPGPDGLRYSDWKRLDPDCSILTAMFNACRLTGRTPTAWKSSRTILLHKGGDPQELKSWRPIALGNTIAKLYAGIWADRLSHWAETHNILTHSQKGFRPFDGVLEHNFVVQSAIARARKSNTSTHITFIDIKNAFGSVSHALLWETLSLLGVPTDTLSIITDIYTNSTTTFTTQRGVSAPIPQIGGVRQGCPLSGILFAFAMEPLLRSLTEAGVEHLAFADDVALICHSESQLSLALSQVHDICAWAGLSINASKCAVLSPVAPLSTPAVLNGVPLPSLEAEGQYRYLGRPTGRSFLHADMDQLMSDVRRKSNLILHSALAPWQKLDSLRSFITPILTHPLRLGLLTKTSLSRLQREIVWKVKGLLNLPSRSTLHYLFSPTSCGGIGLSDLCQEADILLVSSSLQLLHCKDARVATLALDQLRRVVAGRVQSEPTTQQLVDYLNGCRMRQGGGYATRTSRTRVAFRTIMARSALRWGPTADGVPALFLNGKEVSPRKSSAIIRDEVRKWRQAKLVGLPHQGKVMSSVAEQPVSSHYTYNGSFTRFAEWRFVHRARLGLVPLNGYSRGAQAVNTSCRRCGYANETLPHVLTHCRVHSAAQQHRHNAILARLVRALPAADRTGGNTRVNQRVPGSTSTLRPDLIVTRGNQVVIVDVTVAFENGCQAFQSAADEKVAKYAELAAEIRSRGKQVDLLAFVVGSLGTWWKGNERVLGRLHISRRYSRLMRRLMVSETLRWSRDVYVEHVTGHRQYAEPAPRADTYLL

SEQ ID NO: 133 - protein, 1520 aa, Sacculina carcini
MSANTPLVAHQSTTLDADGDVLRVFLPLPDVTACPYEDCGATYAITRRGGYTQVRASILRHLEAAHADVRTSVYMCRRCRQPMGVRPSTHRCRQQTPPAEAHTAVLAPSFTCRHCHQRFTNSRALVNHTNVCRRQQSTGANRRQRPSDQQQQQRRRPTHQRQTNGERHTPPSHSQSPQSETPPPSPPTPPPHVMSPRPPLLPTPPLLRTPPLLPTPLLLPTLALPLSPLRSHQISFSYTPSPLTPRIPTFTSPTTPTPTHTYTVSPPTSPPTTYTTLAMVPGAGLTPVDARPRRLSTFVRLAGGVRERPTASDTATRPAPSVSPPRGRWTAADPAAPPASPRSYLAALIGSISPSPPPRPPRLPSSSPPSSSPSSSSSSSSPSSPRPSSSQSSSSSSSSSSSPALHIRSQHSPSTPPARTHHHTSPANNVGNAPRASGVPSSRPARRQKRQPQQVSAARGSQSQQRASVPPTHRPHNNHHTRNTTNRPHNNHHTRSTTNMHTNTLPRTSTPSSHSTLTPNNTRQHTFITPNRYALLSQSDDNSASPSVSQQNHTSQITSPGRRRVVGEQSNGPTHQHRNNHTSLQNTLTQFHEPLTQINCNTPFCILDILINTLTQQARDLSGLNTRHQNHPRQNTNTHTNNHTHTHTAQFSHHTEHHDHRQMWRSPPYDPVVAAKIQRDYRTGKAVVYRQLVGETTPPCDIEPLVVGRHFCGETASSPRWSDRPTSVPNITPTPATTLSQPITTAEIQRRINNTQNTTPGPDGLRYSDWKRLDPDCSILTAMFNACRLTGRTPTAWKSSRTILLHKGGDPQELKSWRPIALGNTIAKLYAGIWADRLSHWAETHNILTHSQKGFRPFDGVLEHNFVVQSAIARARKSNTSTHITFIDIKNAFGSVSHALLWETLSLLGVPTDTLSIITDIYTNSTTTFTTQRGVSAPIPQIGGVRQGCPLSGILFAFAMEPLLRSLTEAGVEHLAFADDVALICHSESQLSLALSQVHDICAWAGLSINASKCAVLSPVAPLSTPAVLNGVPLPSLEAEGQYRYLGRPTGRSFLHADMDQLMSDVRRKSNLILHSALAPWQKLDSLRSFITPILTHPLRLGLLTKTSLSRLQREIVWKVKGLLNLPSRSTLHYLFSPTSCGGIGLSDLCQEADILLVSSSLQLLHCKDARVATLALDQLRRVVAGRVQSEPTTQQLVDYLNGCRMRQGGGYATRTSRTRVAFRTIMARSALRWGPTADGVPALFLNGKEVSPRKSSAIIRDEVRKWRQAKLVGLPHQGKVMSSVAEQPVSSHYTYNGSFTRFAEWRFVHRARLGLVPLNGYSRGAQAVNTSCRRCGYANETLPHVLTHCRVHSAAQQHRHNAILARLVRALPAADRTGGNTRVNQRVPGSTSTLRPDLIVTRGNQVVIVDVTVAFENGCQAFQSAADEKVAKYAELAAEIRSRGKQVDLLAFVVGSLGTWWKGNERVLGRLHISRRYSRLMRRLMVSETLRWSRDVYVEHVTGHRQYAEPAPRADTYLL

SEQ ID NO: 134 - protein, 1021 aa, Sacculina carcini
MHTNTLPRTSTPSSHSTLTPNNTRQHTFITPNRYALLSQSDDNSASPSVSQQNHTSQITSPGRRRVVGEQSNGPTHQHRNNHTSLQNTLTQFHEPLTQINCNTPFCILDILINTLTQQARDLSGLNTRHQNHPRQNTNTHTNNHTHTHTAQFSHHTEHHDHRQMWRSPPYDPVVAAKIQRDYRTGKAVVYRQLVGETTPPCDIEPLVVGRHFCGETASSPRWSDRPTSVPDITPTPATTLSQPITTAEIQRRINNTQNTTPGPDGLRYSDWKRLDPDCSILTAMFNACRLTGRTPTAWKSSRTILLHKGGDPQELKSWRPIALGNTIAKLYAGIWADRLSHWAETHNILTHSQKGFRPFDGVLEHNFVVQSAIARARKSNTSTHITFIDIKNAFGSVSHALLWETLSLLGVPTDTLSIITDIYTNSTTTFTTQRGVSAPIPQIGGVRQGCPLSGILFAFAMEPLLRSLTEAGVEHLAFADDVALICHSESQLSLALSQVHDICAWAGLSINASKCAVLSPVAPLSTPAVLNGVPLPSLEAEGQYRYLGRPTGRSFLHADMDQLMSDVRRKSNLILHSALAPWQKLDSLRSFITPILTHPLRLGLLTKTSLSRLQREIVWKVKGLLNLPSRSTLHYLFSPTSCGGIGLSDLCQEADILLVSSSLQLLHCKDARVATLALDQLRRVVAGRVQSEPTTQQLVDYLNGCRMRQGGGYATRTSRTRVAFRTIMARSALRWGPTADGVPALFLNGKEVSPRKSSAIIRDEVRKWRQAKLVGLPHQGKVMSSVAEQPVSSHYTYNGSFTRFAEWRFVHRARLGLVPLNGYSRGAQAVNTSCRRCGYANETLPHVLTHCRVHSAAQQHRHNAILARLVRALPVADRTGGNTRVNQRVPGSTSTLRPDLIVTRGNQVVIVDVTVAFENGCQAFQSAADEKVAKYAELAAEIRSRGKQVDLLAFVVGSLGTWWKGNERVLGRLHISRRYSRLMRRLMVSETLRWSRDVYVEHVTGHRQYAEPAPRADTYLL

SEQ ID NO: 135 - protein, 858 aa, Sacculina carcini
MWRSPPYDPVVAAKIQRDYRTGKAVVYRQLVGETTPPCDIEPLVVGRHFCGETASSPRWSDRPTSVPDITPTPATTLSQPITTAEIQRRINNTQNTTPGPDGLRYSDWKRLDPDCSILTAMFNACRLTGRTPTAWKSSRTILLHKGGDPQELKSWRPIALGNTIAKLYAGIWADRLSHWAETHNILTHSQKGFRPFDGVLEHNFVVQSAIARARKSNTSTHITFIDIKNAFGSVSHALLWETLSLLGVPTDTLSIITDIYTNSTTTFTTQRGVSAPIPQIGGVRQGCPLSGILFAFAMEPLLRSLTEAGVEHLAFADDVALICHSESQLSLALSQVHDICAWAGLSINASKCAVLSPVAPLSTPAVLNGVPLPSLEAEGQYRYLGRPTGRSFLHADMDQLMSDVRRKSNLILHSALAPWQKLDSLRSFITPILTHPLRLGLLTKTSLSRLQREIVWKVKGLLNLPSRSTLHYLFSPTSCGGIGLSDLCQEADILLVSSSLQLLHCKDARVATLALDQLRRVVAGRVQSEPTTQQLVDYLNGCRMRQGGGYATRTSRTRVAFRTIMARSALRWGPTADGVPALFLNGKEVSPRKSSAIIRDEVRKWRQAKLVGLPHQGKVMSSVAEQPVSSHYTYNGSFTRFAEWRFVHRARLGLVPLNGYSRGAQAVNTSCRRCGYANETLPHVLTHCRVHSAAQQHRHNAILARLVRALPAADRTGGNTRVNQRVPGSTSTLRPDLIVTRGNQVVIVDVTVAFENGCQALQSAADEKVAKYAELAAEIRSRGKQVDLLAFVVGSLGTWWKGNERVLGRLHISRRYSRLMRRLMVSETLRWSRDVYVEHVTGHRQYAEPAPRADTYLL

SEQ ID NO: 136 - protein, 1535 aa, Sacculina carcini
MSANTPLVAHQSTTLDADGDVLRVFLPLPDVTACPYEDCGATYAITRRGGYTQVRASILRHLEAAHADVRTSVYMCRRCRQPMGVRPSTHRCRHQTPPAEAHTAVLAPSFTCRHCHQRFTNSRALVNHTNVCRRQQVHQQSTGANRRQRPSGQRQQQRRRPTHQRQTNGERHTPPSHSQSPQSETPPPSPPTPPPHVMSPRPPLLPTPPLLRTPPLLPTPLLLPTLALPLSPLRSHQISFSYTPSPLTPRIPTFTSPTTPTPTHTYTASPPTSPPTTYTALAMVPGAGLTPVDARPRRLSTFVRLAGGVRERPTASDTATRPASSVSPPRGRWTAADPAAPPASPRSYLAALIGSISPSPPPRPPRLPSSSSPSSLPSSSSSSSSPSSPRPSSSQPSSSSSSSSSSPALQIRSQHSPSTPPARTHHHTSPANNVAPRASGVPSSRPARRQKRQPQQVSAARGSQSQQRASVPPTHRPHNNHHTRNTTNRPHNNHHTRNTTNRPHNNHHTRSTTNTHTNTLPRTSTPSSHSTLTPNNTRQHTFITPNRYALLSQSDDNSASPSASQQNHTSQITSPGRRRVVGEQSNGPTHQHRNNHTSLQNTLTQFHEPLTQINCNTPFCILDILINTLTQQARDLSGLNTRHQNHRRQNTNTHTNNHTHTHTAQFSHHTEHHDHRQMWHSPPYDPVVAAKIQRDYRTGKAVVYRQLVGETTPPCDIEPLVVGRHFCGETASSPRWSDRPTSVPDITPTPATTLSQPITTAEIQRRINNTQNTTPGPDGLRYSDWKRLDPDCSILTAMFNACRLTGRTPTAWKSSRTILLHKGGDPQELKSWRPIALGNTIAKLYAGIWADRLSHWAETHNILTHSQKGFRPFDGVLEHNFVVQSAIARARKSNTSTHITFIDIKNAFGSVSHALLWETLSLLGVPTDTLSIITDIYTNSTTTFTTQRGVSAPIPQIGGVRQGCPLSGILFAFAMEPLLRSLTEAGVEHLAFADDVALICHSESQLSLALSQVHDICAWAGLSINASKCAVLSPVAPLSTPAVLNGVPLPSLEAEGQYRYLGRPTGRSFLHADMDQLMSDVRRKSNLILHSALAPWQKLDSLRSFITPILTHPLRLGLLTKTSLSRLQREIVWKVKGLLNLPSRSTLHYLFSPTSCGGIGLSDLCQEADILLVSSSLQLLHCKDARVATLALDQLRRVVAGRVQSEPTTQQLVDYLNGCRMRQGGGYATRTSRTRVAFRTIMARSALRWGPTADGVPALFLNGKEVSPRKSSAIIRDEVRKWRQAKLVGLPHQGKVMSSVAEQPVSSHYTYNGSFTRFAEWRFVHRARLGLVPLNGYSRGAQAVNTSCRRCGYANETLPHVLTHCRVHSAAQQHRHNAILARLVRALPAADRTGGNTRVNQRVPGSTSTLRPDLIVTRGNQVVIVDVTVAFENGCQAFQSAADEKVAKYAELAAEIRSRGKQVDLLAFVVGSLGTWWKGNERVLGRLHISRRYSRLMRRLMVSETLRWSRDVYVEHVTGHRQYAEPAPRADTYLL

SEQ ID NO: 137 - protein, 1520 aa, Sacculina carcini
MSANTPLVAHQSTTLDADGDVLRVFLPLPDVTACPYEDCGATYAITRRGGYTQVRASILRHLEAAHADVRTSVYMCRRCRQPMGVRPSTHRCRQQTPPAEAHTAVLAPSFTCRHCHQRFTNSRALVNHTNVCRRQQSTGANRRQRPSDPQQQQRRRPTHQRQTNGERHTPPSHSQSPQSETPPPSPPTPPPHVMSPRPPLLPTPPLLRTPPLLPTPLLLPTLALPLSPLRPHQISFSYTPSPLTPRIPTFTSPTTPTPTHTYTVSPPTSPPTTYTTLAMVPGAGLAPVDARPRRLSTFVRLAGGVRERPTASDTATRPAPSVSPPRGRWTAADPAAPPASPRSYLAALIGSISPSPPPRPPRLPSSSPPSSSPSSSSSSSSPSSPRPSSSQSSSSSSSSSSSPALHIRSQHSPSTPPARTHHHTSPANNVGNAPRASGVPSSRPARRQKRQPQQVSTARGSQSQQRASVPPTHRPHNNHHTRNTTNRPHNNHHTRSTTNMHTNTLPRTSTPSSHSTLTPNNTRQHTFITPNRYALLSQSDDNSASPSVSQQNHTSQITSPGRRRVVGEQSNGPTHQHRNNHTSLQNTLTQFHEPLTQINCNTPFCILDILINTLTQQARDLSGLNTRHQNHPRQNTNTHTNNHTHTHTAQFSHHTEHHDHRQMWRSPPYDPVVAAKIQRDYRTGKAVVYRQLVGETTPPCDIEPLVVGRHFCGETASSPRWSDRPTSVPDITPTPATTLSQPITTAEIQRRINNTQNTTPGPDGLRYSDWKRLDPDCSILTAMFNACRLTGRTPTAWKSSRTILLHKGGDPQELKSWRPIALGNTIAKLYAGIWADRLSHWAETHNILTHSQKGFRPFDGVLEHNFVVQSAIARARKSNTSTHITFIDIKNAFGSVSHALLWETLSLLGVPTDTLSIITDIYTNSTTTFTTQRGVSAPIPQIGGVRQGCPLSGILFAFAMEPLLRSLTEAGVEHLAFADDVALICHSESQLSLALSQVHDICAWAGLSINASKCAVLSPVAPLSTPAVLNGVPLPSLEAEGQYRYLGRPTGRSFLHADMDQLMSDVRRKSNLILHSALAPWQKLDSLRSFITPILTHPLRLGLLTKTSLSRLQREIVWKVKGLLNLPSRSTLHYLFSPTSCGGIGLSDLCQEADILLVSSSLQLLHCKDARVATLALDQLRRVVAGRVQSEPTTQQLVDYLNGCRMRQGGGYATRTSRTRVAFRTIMARSALRWGPTADGVPALFLNGKEVSPRKSSAIIRDEVRKWRQAKLVGLPHQGKVMSSVAEQPVSSHYTYNGSFTRFAEWRFVHRARLGLVPLNGYSRGAQAVNTSCRRCGYANETLPHVLTHCRVHSAAQQHRHNAILARLVRALPAADRTGGNTRVNQRVPGSTSTLRPDLIVTRGNQVVIVDVTVAFENGCQAFQSAADEKVAKYAELAAEIRSRGKQVDLLAFVVGSLGTWWKGNERVLGRLHISRRYSRLMRRLMVSETLRWSRDVYVEHVTGHRQYAEPAPRADTYLL

SEQ ID NO: 138 - protein, 1520 aa, Sacculina carcini
MSANTPLVAHQSTTLDADGDVLRVFLPLPDVTACPYEDCGATYAITRRGGYTQVRASILRHLEAAHADVRTSVYMCRRCRQPMGVRPSTHRCRQQTPPAEAHTAVLAPSFTCRHCHQRFTNSRALVNHTNVCRRQQSTGANRRQRPSDPQQQQRRRPTHQRQTNGERHTPPSHSQSPQSETPPPSPPTPPPHVMSPRPPLLPTPPLLRTPPLLPTPLLLPTLALPLSPLRPHQISFSYTPSPLTPRIPTFTSPTTPTPTHTYTVSPPTSPPTTYTTLAMVPGAGLAPVDARPRRLSTFVRLAGGVRERPTASDTATRPAPSVSPPRGRWTAADPAAPPASPRSYLAALIGSISPSPPPRPPRLPSSSPPSSSPSSSSSSSSPSSPRPSSSQSSSSSSSSSSSPALHIRSQHSPSTPPARTHHHTSPANNVGNAPRASGVPSSRPARRQKRQPQQVSTARGSQSQQRASVPPTHRPHNNHHTRNTTNRPHNNHHTRSTTNMHTNTLPRTSTPSSHSTLTPNNTRQHTFITPNRYALLSQSDDNSASPSVSQQNHTSQITSPGRRRVVGEQSNGPTHQHQNNHTSLQNTLTQFHEPLTQINCNTPFCILDILINTLTQQARDLSGLNTRHQNHPRQNTNTHTNNHTHTHTAQFSHHTEHHDHRQMWRSPPYDPVVAAKIQRDYRTGKAVVYRQLVGETTPPCDIEPLVVGRHFCGETASSPRWSDRPTSVPDITPTPATTLSQPITTAEIQRRINNTQNTTPGPDGLRYSDWKRLDPDCSILTAMFNACRLTGRTPTAWKSSRTILLHKGGDPQELKSWRPIALGNTIAKLYAGIWADRLSHWAETHNILTHSQKGFRPFDGVLEHNFVVQSAIARARKSNTSTHITFIDIKNAFGSVSHALLWETLSLLGVPTDTLSIITDIYTNSTTTFTTQRGVSAPIPQIGGVRQGCPLSGILFAFAMEPLLRSLTEAGVEHLALADDVALICHSESQLSLALSQVHDICAWAGLSINASKCAVLSPVAPLSTPAVLNGVPLPSLEAEGQYRYLGRPTGRSFLHADMDQLMSDVRRKSNLILHSALAPWQKLDSLRSFITPILTHPLRLGLLTKTSLSRLQREIVWKVKGLLNLPSRSTLHYLFSPTSCGGIGLSDLCQEADILLVSSSLQLLHCKDARVATLALDQLRRVVAGRVQSEPTTQQLVDYLNGCRMRQGGGYATRTSRTRVAFRTIMARSALRWGPTADGVPALFLNGKEVSPRKSSAIIRDEVRKWRQAKLVGLPHQGKVMSSVAEQPVSSHYTYNGSFTRFAEWRFVHRARLGLVPLNGYSRGAQAVNTSCRRCGYANETLPHVLTHCRVHSAAQQHRHNAILARLVRALPAADRTGGNTRVNQRVPGSTSTLRPDLIVTRGNQVVIVDVTVAFENGCQAFQSAADEKVAKYAELAAEIRSRGKQVDLLAFVVGSLGTWWKGNERVLGRLHISRRYSRLMRRLMVSETLRWSRDVYVEHVTGHRQYAEPAPRADTYLL

SEQ ID NO: 139 - protein, 1520 aa, Sacculina carcini
MSANTPLVAHQSTALDADGDVLRVFLPLPDVTACPYEDCGATYAITRRGGYTQVRASILRHLEAAHADVRTSVYMCRRCRQPMGVRPSTHRCRQQTPPAEAHTAVLAPSFTCRHCHQRFTNSRALVNHTNVCRRQQSTGANRRQRPSDQHQQQRRRPTHQRQTNGERHTPPSHSQSPHSETPPPSPPTPPPHVMSPRPPLLPTPPLLRTPPLLPTPLLLPTLALPLSPLRSHQISFSYTPSPLTPRIPTFTSPTTPTPTHTYTASPPTSPPTTYTALAMVPGAGLTPVDARPRRLSTFVRLAGGVRERPTASDTATRPAPSVSPPRGRWTAADPAAPPASPRSYLAALIGSISPSPPPRPPRLPSSSPPSSSPSSSSSSSSPSSPRPSSSQSSSSSSSSSSSPALHIRSQHSPSTPPARTHHHTSPANNVGNAPRASGVPSSRPARRQKRQPQQVSTARGSQSQQRASVPPTHRPHNNHHTRNTTNRPHNNHHTRSTTNMHTNTLPRTSTPSSHSTLTPNNTRQHTFITPNRYALLSQSDDNSASPSVSQQNHTSQITSPGRRRVVGEQSNGPTHQHRNNHTSLQNTLTQFHEPLTQINCNTPFCILDILINTLTQQARDLSGLNTRHQNHPRQNTNTHTNNHTHTHTAQFSHHTEHHDHRQMWHSPPYDPVVAAKIQRDYRTGKAVVYRQLVGETTPPCDIEPLVVGRHFCGETASSPRWSDRPTSVPDITPTPATTLSQPITTAEIQRRINNTQNTTPGPDGLRYSDWKRLDPDCSILTAMFNACRLTGRTPTAWKSSRTILLHKGGDPQELKSWRPIALGNTIAKLYAGIWADRLSHWAETHNILTHSQKGFRPFDGVLEHNFVVQSAIARARKSNTSTHITFIDIKNAFGSVSHALLWETLSLLGVPTDTLSIITDIYTNSTTTFTTQRGVSAPIPQIGGVRQGCPLSGILFAFAMEPLLRSLTEAGVEHLAFADDVALICHSESQLSLALSQVHDICAWAGLSINASKCAVLSPVAPLSTPAVLNGVPLPSLEAEGQYRYLGRPTGRSFLHADMDQLMSDVRRKSNLILHSALAPWQKLDSLRSFITPILTHPLRLGLLTKTSLSRLQREIVWKVKGLLNLPSRSTLHYLLSPTSCGGIGLSDLCQEADILLVSSSLQLLHCKDARVATLALDQLRRVVAGRVQSEPTTQQLVDYLNGCRMRQGGGYATRTSRTRVAFRTIMARSALRWGPTADGVPALFLNGKEVSPRKSSAIIRDEVRTWRQAKLVGLPHQGKVMSSVAEQPVSSHYTYNGSFTRFAEWRFVHRARLGLVPLNGYSRGAQAVNTSCRRCGYANETLPHVLTHCRVHSAAQQHRHNAILARLVRALPAADRTGGNTRVNQRVPGSTSTLRPDLIVTRGNQVVIVDVTVAFENGCQAFQSAADEKVAKYAELAAEIRSRGKQVDLLAFVVGSLGTWWKGNERVLGRLHISRRYSRLMRRLMVSETLRWSRDVYVEHVTGHRQYAEPAPRADTYLL

SEQ ID NO: 140 - protein, 1520 aa, Sacculina carcini
MSANTPLVAHQSTTLDADGDVLRVFLPLPDVTACPYEDCGATYAITRRGGYTQVRASILRHLEAAHADVRTSVYMCRRCRQPMGVRPSTHRCRQQTPPAEAHTAVLAPSFTCRHCHQRFTNSRALVNHTNVCRRQQSTGANRRQRPSDPQQQQRRRPTHQRQTNGERHTPPSHSQSPQSETPPPSPPTPPPHVMSPRPPLLPTPPLLRTPPLLPTPLLLPTLALPLSPLRPHQISFSYTPSPLTPRIPTFTSPTTPTPTHTYTVSPPTSPPTTYTTLAMVPGAGLAPVDARPRRLSTFVRLAGGVRERPTASDTATRPALSVSPPRGRWTAADPAAPPASPRSYLAALIGSISPSPPPRPPRLPSSSPPSSSPSSSSSSSSPSSPRPSSSQSSSSSSSSSSSPALHIRSQHSPSTPPARTHHHTSPANNVGNAPRASGVPSSRPARRQKRQPQQVSTARGSQSQQRASVPPTHRPHNNHHTRNTTNRPHNNHHTRSTTNMHTNTLPRTSTPSSHSTLTPNNTRQHTFITPNRYALLSQSDDNSASPSVSQQNHTSQITSPGRRRVVGEQSNGPTHQHRNNHTSLQNTLTQFHEPLTQINCNTPFCILDILINTLTQQARDLSGLNTRHQNHPRQNTNTHTNNHTHTHTAQFSHHTEHHDHRQMWRSPPYDPVVAAKIQRDYRTGKAVVYRQLVGETTPPCDIEPLVVGRHFCGETASSPRWSDRPTSVPDITPTPATTLSQPITTAEIQRRINNTQNTTPGPDGLRYSDWKRLDPDCSILTAMFNACRLTGRTPTAWKSSRTILLHKGGDPQELKSWRPIALGNTIAKLYAGIWADRLSHWAETHNILTHSQKGFRPFDGVLEHNFVVQSAIARARKSNTSTHITFIDIKNAFGSVSHALLWETLSLLGVPTDTLSIITDIYTNSTTTFTTQRGVSAPIPQIGGVRQGCPLSGILFAFAMEPLLRSLTEAGVEHLALADDVALICHSESQLSLALSQVHDICAWAGLSINASKCAVLSPVAPLSTPAVLNGVPLPSLEAEGQYRYLGRPTGRSFLHADMDQLMSDVRRKSNLILHSALAPWQKLDSLRSFITPILTHPLRLGLLTKTSLSRLQREIVWKVKGLLNLPSRSTLHYLFSPTSCGGIGLSDLCQEADILLVSSSLQLLHCKDARVATLALDQLRRVVAGRVQSEPTTQQLVDYLNGCRMRQGGGYATRTSRTRVAFRTIMARSALRWGPTADGVPALFLNGKEVSPRKSSAIIRDEVRKWRQAKLVGLPHQGKVMSSVAEQPVSSHYTYNGSFTRFAEWRFVHRARLGLVPLNGYSRGAQAVNTSCRRCGYANETLPHVLTHCRVHSAAQQHRHNAILARLVRALPAADRTGGNTRVNQRVPGSTSTLRPDLIVTRGNQVVIVDVTVAFENGCQAFQSAADEKVAKYAELAAEIRSRGKQVDLLAFVVGSLGTWWKGNERVLGRLHISRRYSRLMRRLMVSETLRWSRDVYVEHVTGHRQYAEPAPRADTYLL

SEQ ID NO: 141 - protein, 1285 aa, Emmelina monodactyla
MLEANAINPTPTAGNNRTRQRWSEEINRFIWRTYLIATALETQPRGYLDTLHREFTEKFPHFSTTRQRLGDQRRAIINNKLLPQTTLDDIRNEVSILLKTPQDHNTELQTLTQATSISQSTQRMRWTTEHNEAIMRSYYRITRLETNLTTYRSALHQEFVNTFPHLTHVTQQRVADQRRLIIQNKYISLDRLAIIRCEVADELEPKTLETTSQLETTEPLHDANSDESFITTDFDLQSHTQPLPNTNDVTQYTQEIHDISQESENNKHEETDKTFQEALQYFQGTSPTGRVYIPKQKTSKKFSSILHYINDNLLPKYVNVDTDFNSLQTILYCAAWSAAKLNGSKLSLPTSQSQSTTCKQRRKPKWQIRIESKIDDLRVKIGRLTQFLRGNRSNKLRTHVQKILQQYKVHTVHENPNTQITQFLDTLKQKLTVASSRLKRYKTCTIRKNQNINFTNNEKKFYQNLKSTTSNQTTNNTPSPPTSEQLHSFWSRLWGNAVEHNEDATWLTSKDIYESNITHMEYNAIPIETFKNVIDNLHNWKTPGSDFLHNYWLKKFTHIHPFLYNHINQFIKDPSRMPSYLTNGTTYMLPKDPQNSENPEKYRPITCLQSIYKVITSCLSHIIYSHVDKNNIISDQQKGCRKNSQGCKEQLIIDSIILKQVQQKKRDLFSVYIDYRKAYDSIPHSWLVKVLEIYKIHPVIVNFLKNVMSSWNTKLKLNNGNEVIETDKINISRGIFQGDTLSPLWFCLALNPLSNLINRTEIGYPLEYKTNDSNFNQKYILSHLLYMDDIKLYATSQDDLNKLMEITEQFSNDVCMEFGINKCKINSVRGGNSYRHDYITYSGETIESLDEQETYKYLGYIQSKHLHHKEIKDKLKKSFKHRLNCILKTYLYARNIIKAINTFAIPILTYSFGIIQWNKSDLKTLQRLINTTMTKTRKHHPRSCLQRLTLPRREGGRGLIDIVNLHNKQVSNLRSYLLNSISPIHTAIVQNDLKYTPLNLNDNTLQRNEIQTDKQTKFSDWARKSLHGRHFNDLNQPHVDKRASNEWLNRGQLFPETEGFMAAIQDQVIETRNYRKHIMKIPNTVDTCRRCNSGSETIQHITGSCKAIVQTDYKHRHDQVANIIHQKLALKYKLITPPSTPYYKYNPETVLDNPTHKLYFDRAILTDRTVHYNRPDITLIDKLNKTAIIIDIAVPNTHNLQTTISEKLNKYIELKDEITRMWKLQKVTIVPIVISTTGVIPKTLNQSLKTLELPELTYIYLQKAVILNTCRIVRKFLQNDALVES

SEQ ID NO: 142 - protein, 1356 aa, Emmelina monodactyla
MEKNDFKNKYNLRRRLRRIAPKIEENRIYSQSSSPTSSTHSFFQSPSSSPNSYELRPQSRSSTSSFTSASVMLEANAINPTPTAGNNRTRQRWSEEINRFIWRTYLITTALETQPRRYLDTLHKEFTEKFPHFSTTRQRLGDQRRAIINNKLLPQTTLDDIRNEVSILLKTPQVHNTELQTLTQATSISQSTQRMRWTTEHNEAIMRSYYRITRLETNLTTYRSALHQEFVNTFPHLTHVTQQRVADQRRLIIQNKYISLDRLAIIRCEVADELEPKTLETTSQLETTEPLHDANNDESFITTDFDLQSHTQPLLNTNDVTQYTQEIHDISQESENNKDEETDKTFQEALQYFQGTSPTGRVYIPKQKTSKKFSSILHYINDNLLPKYVNVDTDFNSLQTILYCAAWSAAKLNGSKLSLPTSQSQSTTCKQRRKPKWQIRIESKIDDLRVKIGRLSQFLRGNRSNKLRTHVQKILQQYKIHTVHENPNTLITQFLDTLKQKLTVASSRLKRYKTCTIRKNQNINFTNNEKKFYQNLKSTTTNQTTNNTPSPPTSEQLHSFWSRLWGNAVEHNEDATWLTSKDIYESNITHMEYNAIPIETFKNVIDNLHNWKTPGSDFLHNYWLKKFTHIHPFLYNHINKFIKDPSRMPSYLTNGTTYMLPKDPQNSENPEKYRPITCLQSIYKVITSCLSHIIYSHVDKNNIISDQQKGCRKNSQGCKEQLIIDSIILKQVQQKKRDLFSVYIDYRKAYDSIPHSWLVKVLEIYKIHPVIVIFLKNVMSSWNTKLKLNNGNEVIETDKINISRGIFQGDTLSPLWFCLALNPLSNLINRTEIGYPLEYKTNDSNFNQKYILSHLLYMDDIKLYATSQDDLNKLMEITEQFSNDVCMEFGIDKCKINSVRGGNSYRHDYITYSGETIESLDEQESYKYLGYIQSKHLHQKEVKDKLKKLFKHRLNCILNTHLYARNIIKAINTFAIPILTYSFGIIQWNKSDLKTLQRLINTTMTKTRKHHPRSCLQRLTLPRREGGRGLIDIVNLHNKQVSNLRSYLLNSRSPIHTAIVQNDLKYTPLNLNDNTLQRNEIQTDKQTKFSDWARKSLHGRHFNDLNQPHVDKRASNEWLNRGQLFPETEGFMAAIQDQVIETRNYRKHIMKIPNTVDTCRRCNGGSETIQHITGPCKAIVQTDYKHRHDQVANIIHQKLALKYKLITPPSTPYYKYNPETVLDNPTHKLYFDRAILTDRTVHYNRPDITLIDKLNKTAIIIDIAVPNTHNLQTTISEKLNKYIELKDEITRMWKLQKVTIVPIVISTTGVIPKSLNQSLKTLELPELTYINLQKAVILNTCRIVRKFLQNDALVES

SEQ ID NO: 143 - protein, 1359 aa, Emmelina monodactyla
MEKKNVFKKKYNLRRRLPKIAPNIDENRIYSQSSSPTTSTHSLFQSPSSSPNSYELRPQSRSSTSSFTSASVMLEANANNPTPTAGNNRTRQRWSEEINRFIWRTYLIATALETQPRGYLDTLHKEFTEKFPHFNTTRQRLGDQRRAIINNKLLPQSTLDDIRTEVSILLKTSQVTIYNTQTLTQQQASSTSQTTQRMRWTTEHNEAIMRSYYRITRLETNLTTYRSALHQEFVNTFPHLTQVTQQRVADQRRLIIQNKYISLDRLAIIRCEVAYELESKTPEATSQLETTESLYDANNDESSITTELNLQPDTHSLLNTNDVTQYTQEVHDISQESQNNEAEETNKMFREALQYFQETSPTGRVYIPKQKTSKKFSAIVNYINENLLPIYVKSDTDFNSLQTVLYCAAWSAARLNGSKLSLPTTQSQSTTSKQSRKPKWQIRIEFKIDDLRVKIGRLTQFLRGNRSNRLKAHVQKILQQYKIHTVHENPNTQITQFLDTLKQKLSVASSRLKRYKMCTIRKKQNVNFTNNEKKFYQNLKSTTTNQTTNNTPSPPTSEQLHLFWSALWGNAVQHNDSATWLTSNDIYESNITHMEFIAIPIETFKNVIDNLHNWKTPGSDFIHNYWLKKFTYIHPFLYNHINHFIKNPSSMPSYLTNGTTYMLPKDPENSDNPEKYRPITCLQSIYKIITSCISHIIYSHVDKNNIMSDQQKGCRKNSQGCKEQLIIDSIISKQVQQKKKDLFSVYVDYRKAYDSIPHSWLVKVLEIYKIHPVLVNFLKNVMNSWNTKLKLNNGNEIIETDKINISRGIFQGDTLSPLWFCLALNPLSNLINKTNIGYPLEYKNYDSNTNQKYILSHLLYMDDIKLYATSQDDLNKLMETTEQFSKDVCMEFGIDKCKINSVRRGNPYKHDYITYSGEAIESLDDEETYKYLGYIQSKHLHHKEIKDKLKKTFKHRLNCILKTHLYARNIIKAINTFAIPILTYSFGIIQWNKSDLKILQRLINTTMTKTRKHHPRSCLQRLTLPRREGGRGLIDIVNLHNKQVSNLRSYLLKSISPIHIAIVQNDRKYTPLNLNDSTLQRNEIQTDKQTKFSDWARKPLHGRHYNDLNQSHVDKRASNEWLNRGQLFPETEGFMAAIQDQVIETRNYKKHIMKIPNTVDTCRRCNGGSETIQHITGSCKAIVQTDYKHRHDQVANIIHQKLALKHKLITPPSTPYYKYNPETVLDNLTHKLYFDRAILTDRTVHYNRPDITLIDKLNKTAIIIDIAVPNTHNLQSTISEKLNKYIELKDEITRMWKLQKVTIVPIVISTTGVIPKSLNQSLKTLELPELTYINMQKAVILNTCRIVRKFLQNDALVES

SEQ ID NO: 144 - protein, 1356 aa, Emmelina monodactyla
MEKNDFKNKYNLRRRLRRIAPKIEENRIYSQSSSPTSSNHSLFQSPSSSPNSYELRPQSRSSTSSFTSASVMLEASAINPTPTAGNNRTRQRWSEEINRFIWRTYLIATALETQPRGYLDTLHKEFTEKFPHFRTTRQRLGDQRRAIINNKLLPQTTLDDIRNEVSILLKTPQVHNTELQTLTQATSISQSTQRMRWTTEHNEAIMRSYYRITRLETNLTTYRSALHQEFVNTFPHLTHVTQQRVADQRRLIIQNKYISLDRLAIIRCEVADELEPKTLETTSQLETTEPLHDANSDESFITTDFDLQSHTQPLLNTNDVTQYTQEIHDISQETENNKDEETDKTFQEALQYFQGTSPTGRVYIPKQKTSKKFSSILHYINDNLLPKYVNVDTDFNSLQTILYCAAWSAAKLNGSKLSLPTSQSQSTTCKQRRKPKWQIRIESKIDDLRVKIGRLTQFLRGNRSNKLRTHVQKILQQYKIHTVHENPNTQITQFLDTLKQKLTVASSRLKRYKTCTIRKNQNINFTNNEKKFYQNLKSKNSNQTTNNTPSPPTSEQLHSFWSRLWGNAVEHNEDATWLTSKDIYESNITHMEYNAIPIETFKNVIDNLHNWKTPGSDFLHNYWLKKFTHIHPFLYNHINQFIKDPSRMPSYLTNGTTYMLPKDPQNSENPEKYRPITCLQSIYKVITSCLSHIIYSHVDKNNIISDQQKGCRKNSQGCKEQLIIDSIILKQVQQKKRDLFSVYIDYRKAYDSIPHSWLVKVLEIYKIHPVIVNFLKNVMSSWNTKLKLNNGNEVIETDKINISRGIFQGDTLSPLWFCLALNPLSNLINRTEIGYPLEYKTNDSNFNQKYILSHLLYMDDIKLYATSQDDLNKLMEITEQFSNDVCMEFGIDKCKINSVRGGNSYRHDYITYSGETIESLDEQETYKYLGYIQSKHLHYKEIKDKLKKSFKHRLNCILKTYLYARNIIKAINTFAIPILTYSFGIIQWNKSDLKTLQRLINTTMTKTRKHHPRSCLQRLTLPRREGGRGLIDIVNLHNKQVSNLRSYLLNSISPIHTAIVQNDLKYTPLNLNDNTLQRNEIQTDKQTKFSDWARKSLHGRHFNDLNQPHVDKRASNEWLNRGQLFPETEGFMAAIQDQVIETRNYRKHIIKIPNTVDTCRRCNSGSETIQHITGSCKAIVQTDYKHRHDQVANIIHQKLALKYKLITPPSTPYYKYNPETVLDNPTHKLYFDRAILTDRTVHYNRPDITLIDKLNKTAIIIDIAVPNTHNLQTTISEKLNKYIELKDEITRMWKLQKVTIVPIVISTTGVIPKTLNQSLKTLELPELTYINLQKAVILNTCRIVRKFLQNDALVES

SEQ ID NO: 145 - protein, 1349 aa, Junonia vestina
MMNTRRKPRPQVPGNRPSSQTDSDGSRDDAGFWGAYNLRARKISRQTTQARTTDTDSVSETECLYPTENVVQEAQADEPAPITGGKRRKWNIEMNKFIVRTYLTITKLDTNIQGYLDPLYHQFSVKFPNMTVSKQRVGDQLRAIMRNKMLPDEVLEQIKSEVRENLNTQQTSHNINSTQQQSGSGSHRMRWTTEHNEFIMRSYFKITQLGNNLTSYRAPLHQTFIAAFPHLTHITEQRIADQRRLIVANKYITDDRLNELKEEVANELQELEPQNETTERTQLTLGSCYNDTPNENSLLNDIDLNTITQSHINHDNSNTHINDTYERREELEALFNQALEYYKNTNPTERNYIPKQKISRKLAAAVNYLNNVILPVHVNSNTDYSSLQTVLYCAAWTAAKANGAKIDITLPVRIHCSQKNNKPKWQVRLERRVSNLRASIGRLTNYINGNRSNNLNEHVKNILNNYKIHTTHEQENTQLVHFLDTLKQKLSLTSSRLKRYKTCTLRKSQNNQFVANEKIFYRNLRSSTNNQRLVPNNTSIPDSEHLHTFWSNIWENPKQYNLDAEWINLEANNYRNIKQMDFDFISIQQLQSVINKLHNWKAPGTDNIHNYWYKKFTHLHPFILNHINKFIQDPQSMPKYITTGITYMLPKDQTDLTNPAKYRPITCLQTIYKIITGCISHLIYNHIDENNILAEQQKGCRKFSQGCKEQLLIDSVILNQVQQLKKNLFTMYIDYQKAYDSIPHSWLLKSLEIYQINPKLIVFLTFAMSNWNTKLRLNTSQKSIDTDTINIRRGIFQGDSLSPLWFCLALNPLSTQLNESGIGYTLQYNNRSDPTVNIHHLSHLLYMDDIKLYAQNEEDLTKLAEITEKVSTDMGMEFGIDKCKINSIKSGQIYRHVFETQAGQTIDSLTEVETYKYLGYHQSKLLKYKEIKITLKQQFKHRLNSILKTHLNSKNTIKAINTFAIPVLTYSFGVIPWTKSDLKYLQRLINTSMTMNRKHHPRSCFQRMTLPRKDGGRGLIDITNLHNSLISNLRLYFHNKNTPLHVAIVQNDLKFTPLNLQDKNRQNNEIILNKQSKIDEWARKSLHGRHFRDLNLPYVDKDASNEWLSRGMLFPETEGFILAIQDQVIETRNYRKHIMKIPNTIDICRKCNTPLENIQHITGSCKAIVQNDYKYRHDQVTNIIHQELALKYNLIQVPRMPYYKYNPETILENTTYKLYFDRAILTDKTVHYNRPDITVVNKIEKTAFLIDIAVPNTHNLQTTISEKLSKYIDLKDEIKRMWNLQTVTIVPIVISTTGVIPKSLHQSIKTIDLQKHIYITLQKAIILNTCRIVRKFLQSDQNTIEYLNT

SEQ ID NO: 146 - protein, 1256 aa, Junonia evarete
MNKFIVRTYLTITKLDTNIQGYLDPLHHQFSVKFPNMTVSKQRVGDQLRAIMRNKMLPDEVLEQIKSEVRENLNTQQTSHNINSTQQQSGSGSHRMRWTTEHNEFIMRSYFKITQLGNNLTSYRAPLHQTFIAAFPHLTHITEQRIADQRRLIVANKYITDDRLNELKEEVANELQELEPQNETTERTQLTLGSCYNDTPNENSLLNDIDLNTITQSHINHDNSNTHINDTYERREELEALFNQALEYYKNTNPTERNYIPKQKISRKLAAAVNYLNNVILPVHVNSNTDYSSLQTVLYCAAWTAAKANGAKIDITLPVRIHCSQKNNKPKWQVRLERRVSNLRASIGRLTNYINGNRSNNLNEHVKNILNNYKIHTTHEQENTQLVHFLDTLKQKLSLTSSRLKRYKTCTLRKSQNNQFVANEKIFYRNLRSSTNNQRLVPNNTSIPDSEHLHTFWSNIWENPKQYNLDAEWINLEANNYRNIKQMDFDFISIQQLQSVINKLHNWKAPGTDNIHNYWYKKFTHLHPFILNHINKFIQDPQSMPKYITTGITYMLPKDQTDLTNPAKYRPITCLQTIYKIITGCISHLIYNHIDENNILAEQQKGCRKFSQGCKEQLLIDSVILNQVQQLKKNLFTMYIDYQKAYDSIPHSWLLKSLEIYQINPKLIVFLTFAMSNWNTKLRLNTSQKSIDTDTINIRRGIFQGDSLSPLWFCLALNPLSTQLNESGIGYTLQYNNRSDPTVNIHHLSHLLYMDDIKLYAQNEEDLTKLAEITEKVSTDMGMEFGIDKCKINSIKSGQIYRHVFETQAGQTIDSLTEVETYKYLGYHQSKLLKYKEIKITLKQQFKHRLNSILKTHLNSKNTIKAINTFAIPVLTYSFGVIPWTKSDLKYLQRLINTSMTMNRKHHPRSCFQRMTLPRKDGGRGLIDITNLHNSLISNLRLYFHNKNTPLHVAIVQNDLKFTPLNLQDKNRQNNEIILNKQSKIDEWARKSLHGRHFRDLNLPYVDKDASNEWLSRGMLFPETEGFILAIQDQVIETRNYRKHIMKIPNTIDICRKCNTPLENIQHITGSCKAIVQNDYKYRHDQVTNIIHQELALKYNLIQVPRMPYYKYNPETILENTTYKLYFDRAILTDKTVHYNRPDITVVNKIEKTAFLIDIAVPNTHNIQTTISEKLSKYIDLKDEIKRMWNLQTVTIVPIVISTTGVIPKSLHQSIKTIDLQKHIYITLQKAIILNTCRIVRKFLQSDQNTIEYLNT

SEQ ID NO: 147 - protein, 1351 aa, Junonia neildi
MMNTRRKPRPQVPGNRPSSQTDSDGSRDDAGFWGAYNLRARKISRQTTQARTTDTDSVSETECLYPTENVVQEAQADEPAPITGGKRRKWNIEMNKFIVRTYLTITKLDTNIQGYLDPLYHQFSVKFPNMTVSKQRVGDQLRAIMRNKMLPDEVLEQIKSEVRENLNTQQTSHNINNTQQQSGSGSQRMRWTTEHNEFIMRSYFKITQLGNNLTSYRTPLHQTFIAAFPHLQHITEQRIADQRRLIVANKYITDDRLNELKEEVANELQELEPQNATETTERTQLTLGSCYNDTPNENSLLNDIDLNNITQTHINHDNSNTHINDTYEKHEEIEALFNQALEYYKNTNPTERNYIPKQKISRKLAATVNYLNNVILPVHVNSNTDYSSLQTVLYCAAWTAAKANGAKIDITLPVRIHCSQKNNKPKWQVRLERRVSNLRASIGRLTNYINGNRSNNLNEHVKNILNNYKIHTTHEQENTQLVHFLDTLKQKLSLTSSRIKRYKTCTLRKSQNNQFVANEKIFYRNLRSSTNNQRLVPNNTSIPDSEQLHTFWSNIWENPKQYNLDAEWINLEANNYRNIKQMDFDFISIQRLQSVINKLHNWKAPGTDNIHNYWYKKFTHLHPFILNHINKFIQDPQSMPKYITTGITYMLPKDQTDLTNPGKYRPITCLQTIYKIITGCISHLIYNHIDENNILAEQQKGCRKFSQGCKEQLLIDSVILNQVQQLKKNLFTMYIDYQKAYDSIPHSWLLKSLEIYQINPKLIVFLTSAMSNWTTKLRLNTSQKSIDTDTINIRRGIFQGDSLSPLWFCLALNPLSTQLNESGIGYTLQYNNRSDATVNIYHLSHLLYMDDIKLYAQSEEDLTKLAEITEKVSTDMGMEFGIDKCKINSIKSGQIYRHVFETQAGQTIDSLTEVETYKYLGYHQSKLLKYKEIKITLKQQFKHRLNSILKTHLNSKNTIKAINTFAIPVLTYSFGVIPWTKSDLKYLQRLINTSMTMNRKHHPRSCFQRMTLPRKDGGRGLIDITNLHNSLISNLRLYFHNKNTPLHVAIVQNDLKFTPLNLQDKNRQNNEIILNKQSKIDEWARKSLHGRHFRDLNLPYVDKDASNEWLSRGMLFPETEGFILAIQDQVIETRNYRKHIMKIPNTIDICRKCNTPLENIQHITGSCKAIVQNDYKYRHDQVTNIIHQELALKYNLIQVPRMPYYKYNPETILENTTYKLYFDRAILTDKTVHYNRPDITVVNKIEKTAFLIDIAVPNTHNLQTTISEKLSKYIDLKDEIKRMWNLQTVTIVPIVISTTGVIPKSLHQSIKTIDLQKHIYITLQRAIILNTCRIVRKFLQSDQNTIEYLNT

SEQ ID NO: 148 - protein, 1349 aa, Junonia neildi
MMSTRRKPRPQVPGNRPSSQTGSDGSRDDTGFWGVYNLRARKISRQTTLARSTDTDSLSETDSLYSLENVVQEAPANKPTPITGGKRRKWTNEMNESIVRSYLTITKLDTNIQGYLDPLYKQFTQNFPHMTVSKQRVGDQLRAIQRNKMISDEVLDQIKDEVRECLNTQQTFHDTDSIQQQHRLGSQRMRWTTEYNEYIMRSYFKITQLGKNLTSYRTALHQSFIIRFPHLSHITEQRIADQRRLIVANKYISEDRLNQISNEVANELQELEPQSETTERTQSIASAHNNEAHVENDFVNNIDLNIFTQHTQINLDNHNAHTDEIHEKQEEIDSTFTQTLEYYKDSNPTERMFIPKQKCSKKLAVIIDYLNNKVLPIHVNANTDYNTLQTILYCAAWTAAKVNGAKIAMNIPVAVNRPQINNKPKWQIRLERRVLKLRENIGRLTQYINGNRSNNLSKHVKNILINYKIHTSHEIPNTQLNHFLDTLRQKLSLTSSRLKRYKACTLRKTQNNQFMSNEKKFYRNLKSSTDSQRPNHNNNITPQLGQLHSFWSNIWENPKQHNIDADWVKQEENNSKNIKPMEFHLIGIDQFQHIINNLHNWKAPGSDNIHNYWYKKFTFLHPFICNYINKFIQNPQLMPKYITTGITYMLPKDQNDLTNPAKYRPITCLQTIYKIITGCISQFIYKHIDENNILAEQQKGCRKFSQGCKEQLLIDSVILKQVQKSKKDLFTMYIDYQKAYDSIPHSWLLKILAIYQIDSKLISFLKTAMNNWTTRLRLNTTNTSIDSDIINIRRGIFQGDSLSPLWFCLAINPLSTQLNASGIGYILKYNGSTSSSQNIYYVNHLLYMDDIKLYSQSQEDLNKLAEITENISIDMGMEFGIDKCKINSVKSGQIYRHTYETLTGSTIESLNEMETYKYLGYCQSKLLEYKNIKTSLKLQFRHRLNSILKTFLNSKNIIKAINTFAIPVLTYSFGVINWTKSDLKNLQRLINTTLTKNRKHHPRSCVQRMVLPRKDGGRGIIDIINLHNSQISNLRFYFHNKNTTLHTAIAQNDFKFTPLNLQDKSKQNNEVQLNNQSKINEWARKSLHGRHYRDLNLPYVDKTASNEWLGRGVLFPETEGFILAIQDQVIETRNYRKHIMKIHSTIDVCRKCNSPLETIQHVTGACKAIVQTEYKHRHDQVTNIIHQELALKYNLLQSPRTPYYKYIPETILENTTYKLYFDRAILTDKTVHYNRPDITVVNKTERTALLIDIAVPNTHNLQSTISEKLTKYIDLKDEIKRMWNLHTVTIVPIVISTTGVIPKSLHESIKSLNLQKHIYVTLQKAIILNTCRIVRKFLQSDQNIIEQIS

SEQ ID NO: 149 - protein, 1337 aa, Junonia coenia
MMSTRRKPRPQVPGNRPSSQTGSDGSRDDTGFWGVYNLRARKISRQTTLARSTDTDSLSETDSLYSLENVVQEAPANKPTPITGGKRRKWTNEMNESIVRSYLTITKLDTNIQGYLDPLYKQFTQNFPHMTVSKQRVGDQLRAILRNKMISDEVLDQIKDEVRECLNTQQTFHDTDSIQQQHRLGSQRMRWTTEHNEYIMRSYFKITQLGKNLTSYRTALHQSFIIRFPHLSHITEQRIADQRRLIVANKYISEDRLNQISNEVANEIQELEPQSETTERTQSIASAHNNEAHVENDFVNNIDLNIFTQHTQINLDNHNAHTDEIHEKQEEIDSTFTQTLEYYKDSNPTERMFIPKQKCSKKLAVIIDYLNNKVLPIHVNANTDYNTLQTILYCAAWTAAKVNGAKIAMNIPVAVNRPQINNKPKWQIRLERRVLKLRENIGRLTQYINGNRSNNLSKHVKNILINYKIHTSHEIPNTQLNHFLDTLRQKLSLTSSRLKRYKACTLRKTQNNQFMSNEKKFYRNLKSSTDSQRPNHNNNITPQLGQLHSFWSNIWENPKQHNIDADWVKQEENNSKNIKPMEFHLIGIDQFQHIINNLHNWKAPGSDNIHNYWYKKFTFLHPFVCNYINKFIQNPQLMPKYITTGITYMLPKDQNDLTNPAKYRPITCLQTIYKIITGCISQFIYKHIEENNILAEQQKGCRKFSQGCKEQLLIDSVILKQVQKSKKDLFTMYIDYQKAYDSIPHSWLLKILAIYQIDSKLISFLKTAMNNWTTRLRLNTTNTSIDSDIINIRRGIFQGDSLSPLWFCLAINPLSTQLNASGIGYTLKYNGSTGSSQNIYYINHLLYMDDIKLYSQSQEDLNKLAEITENISIDMGMEFGIDKCKINSVKSGQIYRHTYETLTGNTIESLNEMETYKYLGYCQSKLLEYKNIKTSLKLQFRHRLNSILKTFLNSKNIIKAINTFAIPVLTYSFGVINWTKSDLKNLQRLINTTLTKNRKHHPRSCVQRMVLPRKDGGRGIIDIINLHNSQISNLRFYFHNKNTTLHTAIAQNDFKFTPLNLQDKSKQNNEIQLNNQSKINEWARKSLHGRHYRDLNLPYVDKTASNEWLGRGVLFPETEGFILAIQDQVIETRNYRKHIMKIHSTIDVCRKCNSPLETIQHVTGACKAIVQTDYKHRHDQVTNIIHQELALKYNLLQSPRTPYYKYIPETILENTTYKLYFDRAILTDKTVHYNRPDITVVNKTERTALLIDIAVPNTHNLQSTISEKLTKYIDLKDEIKRMWNLHTVTIVPIVISTTGVIPKSLHESIKSLNLQKHIYVTLQKAIILNTCRIVRKF

SEQ ID NO: 150 - protein, 1349 aa, Junonia litoralis
MMSTRRKPRPQVPGNRPSSQTGSDGSRDDTGFWGVYNLRARKISRQTTQARSTDTDSLSETDSLYSLENVVQEAPANKPTPITGGKRRKWTNEMNESIVRSYLTITKLDTNIQGYLDPLYKQFTQNFPHMTVSKQRVGDQLRAIQRNKMISDEVLDQIKDEVRECLNTQQTFHDTDSIQQQHRLGSQRMRWTTEYNEYIMRSYFKITQLGKNLTSYRTALHQSFIIRFPHLSHITEQRIADQRRLIVANKYISEDRLNQISNEVANELQELEPQSETTERTQSIASAHNNETHVENDFVNNIDLNIFTQHTQINLDYHNAHTDEIHEKQEEIDSTFTQILEYYKDSNPTERMYIPKQKCSKKLAVVINYLNNKVLPIHVNANTDYNTLQTILYCAAWTAAKVNGAKIAMNIPVAVKRPQINNKPKWQIRLERRVLKLRENIGRLTQYINGNRSNNLSRHVKNILINYKIHTSHEIPNTQLNHFLDTLRQKLSLTSSRLKRYKACTLRKTQNNQFMSNEKKFYRNLKSSTDSQRPNHNNNITPQLGQLHSFWSNIWENPKQHNIDADWVKQEENNSKNIKPMEFHLIGIDQFQHIINNLHNWKAPGSDNIHNYWYKKFTFLHPFICNYINKFIQNPQLMPKYITTGITYMLPKDQNDLTNPAKYRPITCLQTIYKIITGCISQFIYKHIDENNILAEQQKGCRKFSQGCKEQLLIDSVILKQVQKSKKDLFTMYIDYQKAYDSIPHSWLLKILAIYQIDSKLISFLKTAMNNWTTRLRLNTTNTSIDSDIINIRRGIFQGDSLSPLWFCLAINPLSTQLNASGIGYILKYNGSTSSSQNIYYVNHLLYMDDIKLYSQSQEDLNKLAEITENISIDMGMEFGIDKCKINSVKSGQIYRHTYETLTGSTIESLNEMETYKYLGYCQSKLLEYKNIKTSLKLQFRHRLNSILKTFLNSKNIIKAINTFAIPVLTYSFGVINWTKSDLKNLQRLINTTLTKNRKHHPRSCVQRMVLPRKDGGRGIIDIINLHNSQISNLRFYFHNKNTTLHTAIAQNDFKFTPLNLQDKSKQNNEVQLNNQSKINEWARKSLHGRHYRDLNLPYVDKTASNEWLGRGVLFPETEGFILAIQDQVIETRNYRKHIMKIHSTIDVCRKCNSPLETIQHVTGACKAIVQTEYKHRHDQVTNIIHQELALKYNLLQSPRTPYYKYIPETILENTTYKLYFDRAILTDKTVHYNRPDITVVNKTERTALLIDIAVPNTHNLQSTISEKLTKYIDLKDEIKRMWNLHTVTIVPIVISTTGVIPKSLHESIKSLNLQKHIYVTLQKAIILNTCRIVRKFLQSDQNIIEQIS

SEQ ID NO: 151 - protein, 1349 aa, Junonia zonalis; identical to SEQ ID NO: 145

SEQ ID NO: 152 - protein, 1349 aa, Junonia vestina
MMSTRRKPRPQVPGNRPSSQTGSDGSRDGTGFWGVYNLRARKISRQTTQARSTDTDSLSETDSLYSLENVVQEAPANEPTPITGGKRRKWTNEMNESIVRSYLTITKLDTNIQGYLDPLYKQFTQNFPHMTVSKQRVGDQLRAIQRNKMISDEVLDQIKDEVRECLNTQQTFHDTDSIQQQHRLGSQRMRWTTEHNEYIMRSYFKITQLGKNLTSYRTALHQSFIIRFPHLSHITEQRIADQRRLIVANKYISEDRLNQISNEVANELQELEPQSETTERTQYIASAHNNETHVENDFVNNIDLNIFTQHTQINLDYHNAHTDEIHEKQEEIDSTFTQILEYYKDSNPTERMFIPKQKCSKKLAVVINYLNNKVLPIHVNGNTDYNTLQTILYCAAWTAAKVNGAKIAMNIPVAVKHPQINNKPKWQIRLERRVLKLRENIGRLTQYINGNRSNNLSRHVKNILINYKIHTSHEIPNTQLNHFLDTLRQKLSLTSSRLKRYKACTLRKTQNNQFMSNEKKFYRNLKSSTDSQRPNHNNNITPQLGQLHSFWSNIWENPKQHNIDADWVKQEENNSKNIKPMEFHLIGIDQFQHIINNLHNWKAPGSDNIHNYWYKKFTFLHPFICNYINKFIQNPQLMPKYITTGITYMLPKDQNDLTNPAKYRPITCLQTIYKIITGCISQFIYKHIDENNILAEQQKGCRKFSQGCKEQLLIDSVILKQVQKSKKDLFTMYIDYQKAYDSIPHSWLLKILAIYQIDSKLISFLKTAMNNWTTRLRLNTTNTSIDSDIINIRRGIFQGDSLSPLWFCLAINPLSTQLNASGIGYILKYNGSTSSSQNIYYVNHLLYMDDIKLYSQSQEDLNKLAEITENISIDMGMEFGIDKCKINSVKSGQIYRHTYETLTGSTIESLNEMETYKYLGYCQSKLLEYKNIKTSLKLQFRHRLNSILKTFLNSKNIIKAINTFAIPVLTYSFGVINWTKSDLKNLQRLINTTLTKNRKHHPRSCVQRMVLPRKDGGRGIIDIINLHNSQISNLRFYFHNKNTTLHTAIAQNDFKFTPLNLQDKSKQNNEVQLNNQSKINEWARKSLHGRHYRDLNLPYVDKTASNEWLGRGVLFPETEGFILAIQDQVIETRNYRKHIMKIHSTIDVCRKCNSPLETIQHVTGACKAIVQTEYKHRHDQVTNIIHQELALKYNLLQSPRTPYYKYIPETILENTTYKLYFDRAILTDKTVHYNRPDITVVNKTERTALLIDIAVPNTHNLQSTISEKLTKYIDLKDEIKRMWNLHTVTIVPIVISTTGVIPKSLHESIKSLNLQKHIYVTLQKAIILNTCRIVRKFLQSDQNIIEQIS

SEQ ID NO: 153 - protein, 1349 aa, Junonia grisea
MMNTRRKPRPQVPGNRPSSQTDSDGSRDDAGFWGAYNLRARKISRQTTQARTTDTDSVSETECLYPTENVVQEAQADEPAPITGGKRRKWNIEMNKFIVRTYLTITKLDTNIQGYLDPLYHQFSVKFPNMTVSKQRVGDQLRAIMRNKMLPDEVLEQIKSEVRENLNTQQTSHNINSTQQQSGSGSQRMRWTTEHNEFIMRSYFKITQLGNNLTSYRAPLHQTFIAAFPHLTHITEQRIADQRRLIVANKYITDDRLNELKEEVANELQELEPQNETTERTQLTLGSCYNDTPNENSLLNDIDLNNITQTHINHDNSNTHINDTYERHEEIDALFNQALEYYKNTNPTERNYIPKQKNSRKLAAAVNYLNNVILPVHVNSNTDYSSLQTVLYCAAWTAAKANGAKIDITLPVRIHCSQKNNKPKWQVRLERRISNLRASIGRLTSYINGNRSNNLNEHVKNILNNYKIHTTHEQENTQLVHFLDTLKQKLSLTSSRLKRYKTCTLRKSQNNQFVANEKIFYRNLRSSTNNQRLVPNNTSIPDSEHLHTFWSNIWENPKQYNLDAEWINLEANNYRNIKQMDFDFISIQQLQSVINKLHNWKAPGTDNIHNYWYKKFTHLHPFILNHINKFIQDPQSMPKYITTGITYMLPKDQTDLTNPAKYRPITCLQTIYKIITGCISHLIYNHIDENNILAEQQKGCRKFSQGCKEQLLIDSVILNQVQQLKKNLFTMYIDYQKAYDSIPHSWLLKSLEIYQINPKLIVFLTSAMSNWTTKLRLNTSQKSIDTDTINIRRGIFQGDSLSPLWFCLALNPLSTQLNESGIGYTLQYNNRSDPTVNIYHLSHLLYMDDIKLYAQNEEDLTKLAEITEKVSTDMGMEFGIDKCKINSIKSGQIYRHVFETQAGQTIDSLTEVETYKYLGYHQSKLLKYKEIKITLKQQFKHRLNSILKTHLNSKNTIKAINTFAIPVLTYSFGVIPWTKSDLKYLQRLINTSMTMNRKHHPRSCFQRMTLPRKDGGRGLIDITNLHNSLISNLRLYFHNKNTPLHVAIVQNDLKFTPLNLQDKNRQNNEIILNKQSKIDEWARKSLHGRHFRDLNLPYVDKDASNEWLSRGMLFPETEGFILAIQDQVIETRNYRKHIMKIPNTIDICRKCNTPLENIQHITGSCKAIVQNDYKYRHDQVTNIIHQELALKYNLIQVPRMPYYKYNPETILENTTYKLYFDRAILTDKTVHYNRPDITVVNKIEKTAFLIDIAVPNTHNLQTTISEKLSKYIDLKDEIKRMWNLQTVTIVPIVISTTGVIPKSLHQSIKTIDLQKHIYITLQRAIILNTCRIVRKFLQSDQNTIEHLNT

SEQ ID NO: 154 - protein, 707 aa, Junonia evarete
MDFDFISIQHLQSVINKLHNWKAPGTDNIHNYWYKKFTHLHPFILNHINKFIQDPQSMPKYITTGITYMLPKDQTDLTNPAKYRPITCLQTIYKIITGCISHLIYNHIDENNILAEQQKGCRKFSQGCKEQLLIDSVILNQVQQLKKNLFTMYIDYQKAYDSIPHSWLLKSLEIYQINPKLIVFLTFAMNNWNTKLRLNTSQKSIDSDTINIRRGIFQGDSLSPLWFCLALNPLSTQLNESGIGYTLQYNNRSDPTVNIHHLSHLLYMDDIKLYAQNEEDLTKLAEITEKVSTDMGMEFGIDKCKINSIKSGQIYRHVFETQAGQTIDSLTEVETYKYLGYHQSKLLKYKEIKITLKQQFKHRLNSILKTHLNSKNTIKAINTFAIPVLTYSFGVIPWTKSDLKYLQRLINTSMTMNRKHHPRSCFQRMTLPRKDGGRGLIDITNLHNSLISNLRLYFHNKNTPLHVAIVQNDLKFTPLNLQDKNRQNNEIILNKQSKIDEWARKSLHGRHFRDLNLPYVDKDASNEWLSRGMLFPETEGFILAIQDQVIETRNYRKHIMKIPNTIDICRKCNTPLENIQHITGSCKAIVQNDYKYRHDQVTNIIHQELALKYNLIQVPRMPYYKYNPETILENTTYKLYFDRAILTDKTVHYNRPDITVVNKIEKTAFLIDIAVPNTHNLQTTISEKLSKYIDLKDEIKRMWNLQT

SEQ ID NO: 155 - protein, 1349 aa, Junonia stemosa
MMNTRRKPRPQVPGNRPSSQTDSDGSRDDAGFWGAYNLRARKISRQTTQARTTDTDSVSETECLYPTENVVQEAQADEPAPITGGKRRKWNIEMNKFIVRTYLTITKLDTNIQGYLDPLYHQFSVKFPNMTVSKQRVGDQLRAIMRNKMLPDEVLEQIKSEVRENLNTQQTSHNINSTQQQSGSGSQRMRWTTEHNEFIMRSYFKITQLGNNLTSYRTPLHQTFIAAFPHLQHITEQRIADQRRLIVANKYITDDRLNELKEEVANELQELEPQNETTERTQLTLGSCYNDTPNENSLLNDIDLNNITQTHINHDNSNTHINDTYERHEEIDALFNQALEYYKNTNPTERNYIPKQKNSRKLAAAVNYLNNVILPVHVNSNTDYSSLQTVLYCAAWTAAKANGAKIDITLPVRIHCSQKNNKPKWQVRLERRISNLRASIGRLTSYINGNRSNNLNEHVKNILNNYKIHTTHEQENTQLVHFLDTLKQKLSLTSSRLKRYKTCTLRKSQNNQFVANEKIFYRNLRSSTNNQRLVANNTSIPDSEHLHTFWSNIWENPKQYNLDAEWINLEANNYRNIKQMDFDFISIQQLQSVINKLHNWKAPGTDNIHNYWYKKFTHLHPFILNHINKFIQDPQSMPKYITTGITYMLPKDQTDLTNPAKYRPITCLQTIYKIITGCISQLIYNHIDENNILAEQQKGCRKFSQGCKEQLLIDSVILNQVQQLKKNLFTMYIDYQKAYDSIPHSWLLKSLEIYQINPKLIVFLTSAMSNWTTKLRLNTSQKSIDTDTINIRRGIFQGDSLSPLWFCLALNPLSTQLNESGIGYTLQYNNRSDPTVNIYHLSHLLYMDDIKLYAQNEEDLTKLAEITEKVSTDMGMEFGIDKCKINSIKSGQIYRHVFETQAGQTIDSLTEVETYKYLGYHQSKLLKYKEIKITLKQQFKHRLNSILKTHLNSKNTIKAINTFAIPVLTYSFGVIPWTKSDLKYLQRLINTSMTMNRKHHPRSCFQRMTLPRKDGGRGLIDITNLHNSLISNLRLYFYNKNTPLHVAIAQNDLKFTPLNLQDKNRQNNEIILNKQSKIDEWARKSLHGRHFRDLNLPYVDKDASNEWLSRGMLFPETEGFILAIQDQVIETRNYRKHIMKIPNTIDICRKCNTPLENIQHITGSCKAIVQNDYKYRHDQVTNIIHQELALKYNLIQVPRMPYYKYNPETILENTTYKLYFDRAILTDKTVHYNRPDITVVNKIEKTAFLIDIAVPNTHNLQTTISEKLSKYIDLKDEIKRMWNLQTVTIVPIVISTTGVIPKSLHQSIKTIDLQKHIYITLQRAIILNTCRIVRKFLQSDQNTIEHLNT

SEQ ID NO: 156 - protein, 1349 aa, Junonia vestina
MMNTRRKPRPQVPGNRPSSQTDSDGSRDDAGFWGAYNLRARKISRQTTQARTTDTDSVSETECLYPTENVVQEAQADEPAPITGGKRRKWNIEMNKFIVRTYLTITKLDTNIQGYLDPLYHQFSVKFPNMTVSKQRVGDQLRAIMRNKMLPDEVLEQIKSEVRENLSSQQTSHNINSTQQQSGSGSHRMRWTTEHNEFIMRSYFKITQLGNNLTSYRAPLHQTFIAAFPHLTHITEQRIADQRRLIVANKYITDDRLNELKEEVANELQELEPQNETTERTQLTLGSCYNDTPNENSLLNDIDLNTITQSHINHDNSNTHINDTYERREELEALFNQALEYYKNTNPTERNYIPKQKISRKLAAAVNYLNNVILPVHVNSNTDYSSLQTVLYCAAWTAAKANGAKIDITLPVRIHCSQKNNKPKWQVRLERRVSNLRASIGRLTSYINGNRSNNLNEHVKNILNNYKIHTTHEQENTQLVHFLDTLKQKLSLTSSRLKRYKTCTLRKSQNNQFVANEKIFYRNLRSSTNNQRLVPNNTSIPDSEHLHTFWSNIWENPKQYNLDAEWINLEANNYRNIKQMDFDFISIQQLQSVINKLHNWKAPGTDNIHNYWYKKFTHLHPFILNHINKFIQDPQSMPKYITTGITYMLPKDQTDLTNPAKYRPITCLQTIYKIITGCISHLIYNHIDENNILAEQQKGCRKFSQGCKEQLLIDSVILNQVQQLKKNLFTMYIDYQKAYDSIPHSWLLKSLEIYQINPKLIVFLTFAMSNWNTKLRLNTSQKSIDTDTINIRRGIFQGDSLSPLWFCLALNPLSTQLNESGIGYTLQYNNRSDPTVNIHHLSHLLYMDDIKLYAQNEEDLTKLAEITEKVSTDMGMEFGIDKCKINSIKSGQIYRHVFETQAGQTIDSLTEVETYKYLGYHQSKLLKYKEIKITLKQQFKHRLNSILKTHLNSKNTIKAINTFAIPVLTYSFGVIPWTKSDLKYLQRLINTSMTMNRKHHPRSCFQRMTLPRKDGGRGLIDITNLHNSLISNLRLYFHNKNTPLHVAIVQNDLKFTPLNLQDKNRQNNEIILNKQSKIDEWARKSLHGRHFRDLNLPYVDKDASNEWLSRGMLFPETEGFILAIQDQVIETRNYRKHIMKIPNTIDICRKCNTPLENIQHITGSCKAIVQNDYKYRHDQVTNIIHQELALKYNLIQVPRMPYYKYNPETILENTTYKLYFDRAILTDKTVHYNRPDITVVNKIEKTAFLIDIAVPNTHNLQTTISEKLSKYIDLKDEIKRMWNLQTVTIVPIVISTTGVIPKSLHQSIKTIDLQKHIYITLQRAIILNTCRIVRKFLQSDQNTIEYLNT

SEQ ID NO: 157 - protein, 1347 aa, Emmelina monodactyla
MNIQPKPRPLVPGRPSSQAGSDGSRNGAGSWGAYNLRARKIPRQTNPATSMDTDIPSDTDSLYSTGTDVQEAPADQPTLVTGGKRRKWTDEMNIFIVRKYLTITKMDTCRQGYLDPLYRLFSQQFPNMSVSKQRVGDQYRAIIRNNMISEQILNQIKADTTQELLTHNVNTQDTSAGSQQTPLTGTQRMRWTTELNEFIMHSYYKITQLENNKTAYRTLLHQAFITQFPHLSHITEQRIADQRRLIVQNKYLTEDRLNFLRTEAANQIEPQITTNLQNNITIQTSNTPEDSDFLSQINILDDFSTETQCINHENIIATKQFEDLEIIFTQSLEFYKNSIPTKRNYIPKQKTSKKLALIVDYLNTKILPKYVDQNTDYETLQLVLYCAAWSAAKANGAKIEIPPRTSIIPRRISKPRWQMRLERKVQDLRANIARLTEYDKGTRSNRLNRLVMNIIHNYRLHTIHEESNTQISHFLDTLKQKLNVICSRLKRYNTCTLRKKQNIRFTANEKHFYRSLNMSSSNNQNNIQNYNTNQTPLDSTYSFWSSIWENQKTHNTDAEWIKYEEQKNASTEHMNFEFIPIEVFQNVITRLHNWKSPGTDNLHNYWFKKFTYLHPFIHNHINNFIQNPQSMPKYITEGITYMLPKDPNDLTDPAKYRPITCLQTIYKIITGCLTDLIYTHIDKNHILAEQQKGCRKFSQGCKEQLIIDSVILKQTQQQKQDLFSMYIDFKKAFDSVPHSWLINVLQIYKINPTIISFLQDTMENWTTQLRINSPTGTVDTEKINIRRGIFQGDSLSPLWFCLALNPLSTQLNALNAGYTLTYTDDTDLTSKKHLVNHLLYMDDIKLYAQTQEELQDLAKITEDVSLDMGMEFGIDKCKINSIKAGQIYIHSIETQTGENINSLSEIESYKYLGYCQNKLIRYKEIKQQLKKLFKHRLNSILNTQLYSANTVKAINTYAIPVLTYSFGIINWSKTDLKNLQRLINTSMTKARKHHPRSCVQRMTLPRREGGRGLIDIKNLNNKLISTLRSYFHKKSTTLHIAIAQNDIKYTPLNLNDKTTQNNETQVEKQTKINEWAQKSLHGRHYRDLNLPHVDKTASNEWLRRGVLFPETEGFILAIQDQVIETRNYQKHIMKLPNITDVCRKCHSPLENIQHIIGSCKAIVQTEYKYRHDQVANIIHQELALKYKLISPPRTPYYKYNPETVLENSTHKIYFDRAILTDKTVHFNRPDITIINKIEKTAVIVDIAVPNTHNLLKTISEKLSKYIDLKDEIKRMWNLQSVSIVPIVISGTGIVPKSLLQSLSTLELPYNLLVTIQKSVILNTCRIVRKFLQCEQTLGNHQSDVRLA

SEQ ID NO: 158 - protein, 1349 aa, Junonia coenia
MMNTRRKPRPQVPGNRPSSQTDSDGSRDDAGFWGAYNLRARKISRQTTQARTTDTDSVSETECLYPTENVVQEAQADEPAPITGGKRRKWNIEMNKFIVRTYLTITKLDTNIQGYLDPLYHQFSVKFPNMTVSKQRVGDQLRAIMRNKMLPDEVLEQIKSEVRENLNTQQTSHNINSTQQQSGSGSQRMRWTTEHNEFIMRSYFKITQLGNNLTSYRTPLHQTFIAAFPHLQHITEQRIADQRRLIVANKYITDDRLNELKEEVANELQELEPQNETTERTQLTLGSCYNDTPNENSLLNDIDLNNITQTHINHDNSNTHINDTYERHEEIDALFNQALEYYKNTNPTERNYIPKQKNSRKLAAAVNYLNNVILPVHVNSNTDYSSLQTVLYCAAWTAAKANGAKIDITLPVRIHCSQKNNKPKWQVRLERRISNLRASIGRLTSYINGNRSNNLNEHVKNILNNYKIHTTHEQENTQLVHFLDTLKQKLSLTSSRLKRYKTCTLRKSQNNQFVANEKIFYRNLRSSTNNQRLVANNTSIPDSEHLHTFWSNIWENPKQYNLDAEWINLEANNYRNIKQMDFDFISIQQLQSVINKLHNWKAPGTDNIHNYWYKKFTHLHPFILNHINKFIQDPQSMPKYITTGITYMLPKDQTDLTNPAKYRPITCLQTIYKIITGCISHLIYNHIDENNILAEQQKGCRKFSQGCKEQLLIDSVILNQVQQLKKNLFTMYIDYQKAYDSIPHSWLLKSLEIYQINPKLIVFLTSAMSNWTTKLRLNTSQKSIDTDTINIRRGIFQGDSLSPLWFCLALNPLSTQLNESGIGYTLQYNNRSDATVNIYHLSHLLYMDDIKLYAQNEEDLTKLAEITEKVSTDMGMEFGIDKCKINSIKSGQIYRHVFETQAGQTIDSLTEVETYKYLGYHQSKLLKYKEIKITLKQQFKHRLNSILKTHLNSKNTIKAINTFAIPVLTYSFGVIPWTKSDLKYLQRLINTSMTMNRKHHPRSCFQRMTLPRKDGGRGLIDITNLHNSLISNLRLYFYNKNTPLHVAIAQNDLKFTPLNLQDKNRQNNEIILNKQSKIDEWARKSLHGRHFRDLNLPYVDKDASNEWLSRGMLFPETEGFILAIQDQVIETRNYRKHIMKIPNTIDICRKCNTPLENIQHITGSCKAIVQNDYKYRHDQVTNIIHQELALKYNLIQVPRMPYYKYNPETILENTTYKLYFDRAILTDKTVHYNRPDITVVNKIEKTAFLIDIAVPNTHNLQTTISEKLSKYIDLKDEIKRMWNLQTVTIVPIVISTTGVIPKSLHQSIKTIDLQKHIYITLQRAIILNTCRIVRKFLQSDQNTIEHLNT

SEQ ID NO: 159 - protein, 1149 aa, Junonia grisea
MTVSKQRVGDQLRAILRNKMISDEVLDRIKDEVRECLNTQQTFHDTDSIQQQHRLGSQRMRWTTEHNEYIMRSYFKITQLGKNLTSYRTALHQSFIIRFPHLSHITEQRIADQRRLIVANKYISEDRLNQISNEVANEIQELEPQSETTERTQSIASAHNNEAHVENDFVNNIDLNIFTQHTQINLDNHNAHTDEIHEKQEEIDSTFTQTLEYYKDSNPTERMFIPKQKCSKKLAVIIDYLNNKVLPIHVNANTDYNTLQTILYCAAWTAAKVNGAKIAMNIPVAVNRPQINNKPKWQIRLERRVLKLRENIGRLTQYINGNRSNNLSKHVKNILINYKIHTSHEIPNTQLNHFLDTLRQKLSLTSSRLKRYKACTLRKTQNNQFMSNEKKFYRNLKSSTDSQRPNHNNNITPQLGQLHSFWSNIWENPKQHNIDADWVKQEENNSKNIKPMEFHLIGIDQFQHIINNLHNWKAPGSDNIHNYWYKKFTFLHPFVCNYINKFIQNPQLMPKYITTGITYMLPKDQNDLTNPAKYRPITCLQTIYKIITGCISQFIYKHIEENNILAEQQKGCRKFSQGCKEQLLIDSVILKQVQKSKKDLFTMYIDYQKAYDSIPHSWLLKILAIYQIDSKLISFLKTAMNNWTTRLRLNTTNTSIDSDIINIRRGIFQGDSLSPLWFCLAINPLSTQLNASGIGYTLKYNGSTGSSQNIYYINHLLYMDDIKLYSQSQEDLNKLAEITENISIDMGMEFGIDKCKINSVKSGQIYRHTYETLTGNTIESLNEMETYKYLGYCQSKLLEYKNIKTSLKLQFRHRLNSILKTFLNSKNIIKAINTFAIPVLTYSFGVINWTKSDLKNLQRLINTTLTKNRKHHPRSCVQRMVLPRKDGGRGIIDIINLHNSQISNLRFYFHNKNTTLHTAIAQNDFKFTPLNLQDKSKQNNEIQLNNQSKINEWARKSLHGRHYRDLNLPYVDKTASNEWLGRGVLFPETEGFILAIQDQVIETRNYRKHIMKIHSTIDVCRKCNSPLETIQHVTGACKAIVQTDYKHRHDQVTNIIHQELALKYNLLQSPRTPYYKYIPETILENTTYKLYFDRAILTDKTVHYNRPDITVVNKTERTALLIDIAVPNTHNLQSTISEKLTKYIHIKDE

SEQ ID NO: 160 - protein, 1349 aa, Junonia pacoma
MMSTRRKPRPQVPGNRPSSQTGSDGSRDDTGFWGVYNLRARKISRQTTLARSTDTDSLSETDSLYSLENVVQEAPANKPTPITGGKRRKWTNEMNESIVRSYLTITKLDTNIQGYLDPLYKQFTQNFPHMTVSKQRVGDQLRAILRNKMISDEVLDQIKDEVRECLNTQQTFHDTDSIQQQHRLGSQRMRWTTEHNEYIMRSYFKITQLGKNLTSYRTALHQSFIIRFPHLSHITEQRIADQRRLIVANKYISEDRLNQISNEVANEIQELEPQSETTERTQSIASAHNNEAHVENDFVNNIDLNIFTQHTQINLDNHNAHTDEIHEKQEEIDSTFTQTLEYYKDSNPTERMFIPKQKCSKKLAVIINYLNNKVLPIHVNANTDYNTLQTILYCAAWTAAKVNGAKIAMNIPVAVNRPQINNKPKWQIRLERRVLKLRENIGRLTQYINGNRSNNLSKHVKNILINYKIHTSHEIPNTQLNHFLDTLRQKLSLTSSRLKRYKACTLRKTQNNQFMSNEKKFYRNLKSSTDSQRPNHNNNITPQLGQLHSFWSNIWENPKQHNIDADWVKQEENNSKNIKPMEFHLIGIDQFQHIINNLHNWKAPGSDNIHNYWYKKFTFLHPFVCNYINKFIQNPQLMPKYITTGITYMLPKDQNDLTNPAKYRPITCLQTIYKIITGCISQFIYKHIEENNILAEQQKGCRKFSQGCKEQLLIDSVILKQVQKSKKDLFTMYIDYQKAYDSIPHSWLLKILAIYQIDSKLISFLKTAMNNWTTRLRLNTTNTSIDSDIINIRRGIFQGDSLSPLWFCLAINPLSTQLNASGIGYILKYNGSTSSSQNIYYVNHLLYMDDIKLYSQSQEDLNKLAEITENISIDMGMEFGIDKCKINSVKSGQIYRHTYETLTGNTIESLNEMETYKYLGYCQSKLLEYKNIKTSLKLQFRHRLNSILKTFLNSKNIIKAINTFAIPVLTYSFGVINWTKSDLKNLQRLINTTLTKNRKHHPRSCVQRMVLPRKDGGRGIIDIINLHNSQISNLRFYFHNKNTTLHTAIAQNDFKFTPLNLQDKSKQNNEVQLNNQSKINEWARKSLHGRHYRDLNLPYVDKTASNEWLGRGVLFPETEGFILAIQDQVIETRNYRKHIMKIHSTIDVCRKCNSPLETIQHVTGACKAIVQTDYKHRHDQVTNIIHQELALKYNLLQSPRTPYYKYIPETILENTTYKLYFDRAILTDKTVHYNRPDITVVNKTERTALLIDIAVPNTHNLQSTISEKLTKYIDLKDEIKRMWNLHTVTIVPIVISTTGVIPKSLHESIKSLNLQKHIYVTLQKAIILNTCRIVRKFLQSDQNIIEQIS

SEQ ID NO: 161 - protein, 1349 aa, Junonia vestina
MMSTRRKPRPQVPGNRPSSQTGSDGSRDDTGFWGVYNLRARKISRQTTQARSTDTDSLSETDSLYSLENVVQEAPANKPTPITGGKRRKWTNEMNESIVRSYLTITKLDTNIQGYLDPLYKQFTQNFPHMTVSKQRVGDQLRAIQRNKMISDEVLDQIKDEVRECLNTQQTFHDTDSIQQQHRLGSQRMRWTTEHNEYIMRSYFKITQLGKNLTSYRTALHQSFIIRFPHLSHITEQRIADQRRLIVANKYISEDRLNQISNEVANELQELEPQSETTERTQSIASAHNNETHVENDFVNNIDLNIFTQHTQINLDYHNAHTDEIHEKQEEIDSTFTQILEYYKDSNPTERMYIPKQKCSKKLAVVINYLNNKVLPIHVNANTDYNTLQTILYCAAWTAAKVNGAKIAMNIPVAVKRPQINNKPKWQIRLERRVLKLRENIGRLTQYINGNRSNNLSRHVKNILINYKIHTSHEIPNTQLNHFLDTLRQKLSLTSSRLKRYKACTLRKTQNNQFMSNEKKFYRNLKSSTDSQRPNHNNNITPQLGQLHSFWSNIWENPKQHNIDADWVKQEENNSKNIKPMEFHLIGIDQFQHIINNLHNWKAPGSDNIHNYWYKKFTFLHPFICNYINKFIQNPQLMPKYITTGITYMLPKDQNDLTNPAKYRPITCLQTIYKIITGCISQFIYKHIDENNILAEQQKGCRKFSQGCKEQLLIDSVILKQVQKSKKDLFTMYIDYQKAYDSIPHSWLLKILAIYQIDSKLISFLKTAMNNWTTRLRLNTTNTSIDSDIINIRRGIFQGDSLSPLWFCLAINPLSTQLNASGIGYILKYNGSTGSSQIIYYVNHLLYMDDIKLYSQSQEDLNKLAEITENISIDMGMEFGIDKCKINSVKSGQIYRHTYETLTGSTIESLNEMETYKYLGYCQSKLLEYKNIKTSLKLQFRHRLNSILKTFLNSKNIIKAINTFAIPVLTYSFGVINWTKSDLKNLQRLINTTLTKNRKHHPRSCVQRMVLPRKDGGRGIIDIINLHNSQISNLRFYFHNKNTTLHTAIAQNDFKFTPLNLQDKSKQNNEVQLNNQSKINEWARKSLHGRHYRDLNLPYVDKTASNEWLGRGVLFPETEGFILAIQDQVIETRNYRKHIMKIHSTIDVCRKCNSPLETIQHVTGACKAIVQTEYKHRHDQVTNIIHQELALKYNLLQSPRTPYYKYIPETILENTTYKLYFDRAILTDKTVHYNRPDITVVNKTERTALLIDIAVPNTHNLQSTISEKLTKYIDLKDEIKRMWNLHTVTIVPIVISTTGVIPKSLHESIKSLNLQKHIYVTLQKAIILNTCRIVRKFLQSDQNIIEQIS

SEQ ID NO: 162 - protein, 1480 aa, Lycaena phlaeas
MRLRSNRILPQAGTSVNDAGESRPRLLASGSSTYSGGGTVSLSAQSQTVADHHQKHGNTELNRRTPTRFLQTTTADDDRPTDIITDSPIEPYSPSTTSYIPSLQSSPSIHSSPTTASSCPSPMDFDVPQEDITILVSSSKTGKQITRNKRSKKSRSPTAYCLSNCTDFDESQYSDQSTQACNNDIDVTHNVHSFTPNSVVQSAVAMNIAPTLGKKRQKWTKEINEYIVHTYYKITKLDTCKSGYLDTLYNHFTTKFPDFNVTRQRLGDQFRAIIRNKMIPQEILDRIKSEVSSALNSDTSTQPPTQTSIIKHNRQRMQWLPEHNETIMRSYYKITELETNLTAYRKALHKNFIETYPNLNHVSEQRVADQRRVIVKNKYLSDDRLEALRNEVQKEISDGTRTPQNINDITTNNNSQGDEPLTNNINLGTSTENNIIYVGLDNQSINNEQSSILIGDTLSLEIQNTFNLALEYYINTTPLQRHYIPKQKTSKKLALIVQFINNNILPANINIDSDFTFLQTVLYCAAWTAAKVNGAKINIPNTSELYIRKEIYKPRWQIRLENRVNDLRTKISRLTHYSKGHRSNKLERHVQIILHNYKIHSTFEDPNSKIAQFIDTLKQKLTVASSRLKRYKACTLRKKQNNQFKSNEKQFYRNVLSASNNNQTQDNDNAHPTETQLYSFWSKIWENPVTHNNEATWIVQEAERYSSISAMEFEVVPAEVFQSVISKLHNWKSPGSDYLHNYWYKKFTFLHPFLHNHINRFIKDPKNLPEYFTNGVTYMLCKNKSESINPEKYRPITCLQSIYKIMTSCLCHLIYTHIDKNKIFAEQQKGCRKFSQGCKEQLTIDSIILKQVNKKKKDLFTMYIDYKKAFDSVPHSWLVKVLEIYKIHPQITTFLENIMSKWTTKLKLTSSSNVIETKLINIQRGIFQGDTLSPLWFCLALNPLSNLLNNSNTGYLFDNLCQRTNEEPDQQMYTLNHLMYMDDIKLYTSTQHDLKKLAEITENFSQDINMEFGIDKCKINSMRAGVIFQHNYDCSSGERIESLNEQETYKYLGYMQSKHLHHKEIKSALKLKFKHRLNSILKSHLHAGNTTKAINTYAIPILTYSFGIINWTKSDLISLQRLINTTMTHHRKHHPRSCSQRLTMARKDGGRGIIDIVNLHNKQIKSLRLYFHNSNSTLHRAIVANDSKFTPLNLHDVSIQNNESQTDRQTKLYEWSQKSLHGRHYHDLNLPYVDKNASNDWLRRGQLFPETEGFMLAIQDQVIETRNYRKHVLKIPGTQDLCRRCSASSETIQHITGACKAIVQTDYKHRHDQVANIIHQQLALKYNLIPPPAIPYYKYTPNNVLDNSNYKLYFDRAILTDKTVHHNRPDITLVDKQNKTAFIIDIAVPNTHNLQSTIAEKLSKYVDLKDEITRLWNLRQVTIVPIVVSTTGVIPTSLQQSIRILNLQKLTSSIIQKAIILNTCRIVRRFLHNNTNTDIT

SEQ ID NO: 163 - protein, 1478 aa, Lycaena phlaeas
MRLRSNRILPQAGTSVNDAGESRPRLLASGSSTYSGGGTVSLSAQSQTVADHHQKHGNTELNRRTPTRFLQTTTADDDKPTDIITDSPIEPYSPSTTSYIPSLQSSPSIHSSPTTASSCPSPMDFDVPQEDITILVSSSKTGKQITRNKRSKKSRSPTAYCLSNCTDFDESQYSDQSTQACNNDIDVTHNVHSFTPNSVVQSAVAMNIAPTLGKKRQKWTKEINEYIVRTYYKITKLDTCKSGYLDTLYNHFTTKFPDFNVTRQRLGDQFRAIIRNKMIPQEILDRIKSEVSSALNSDTSTQPPTQTSIIKHNRQRMQWLPEHNETIMRSYYKITELETNLTAYRKALHKNFIETYPNLNHVSEQRVADQRIVKNKYLSDDRLEALRNEVQKEISDGTRTPQNINDITTNNNSQGDEPLTNNINLGTSTENNIIYVGLDNQSINNEQSSILIGDTLSLEIQNTFSLALEYYINTTPLQRHYIPKQKTSKKLALIVQFINNNILPANINIDSDFTFLQTVLYCAAWTAAKVNGAKINIPNTSELYIRKEIYKPRWQIRLENRVNDLRTKISRLTHYSKGHRSNKLERHVQIILHNYKIHSTFEDPNSKIPQFIDTLKQKLTVASSRLKRYKACTLRKKQNNQFKSNEKQFYRNVLSASNNNQTQDNDNAHPTETQLYSFWSKIWENPVTHNNEATWIVQEAERYSSISAMEFEFVPAEVFQSVISKLNNWKSPGSDYLHNYWYKKFTFLHPFLHNHINRFIKDPKNLPEYFTNGVTYMLCKNKSESINPEKYRPITCLQSIYKIMTSCLCHLIYTHIDKNKIFAEQQKGCRKFSQGCKEQLTIDSIILKQVNKKKKDLFTMYIDYKKAFDSVPHSWLVKVLEIYKIHPQITTFLENIMSKWTTKLKLTSSSNVIETKLINIQRGIFQGDTLSPLWFCLALNPLSNLLNNSNTGYLFDNLCQRTNEEPDQQMYTLNHLMYMDDIKLYTSTQHDLKKLAEITENFSQDINMEFGIDKCKINSMRAGVIFQHNYDCSSGERIESLNEQETYKYLGYMQSKHLHHKEIKSALKLKFKHRLNSILKSHLYAGNTTKAINTYAIPILTYSFGIINWTKSDLISLQRLINTTMTHHRKHHPRSCSQRLTMARKGGGRGIIDIVNLHNKQIKSLRLYFHNSNSTLHRAIVANDSKFTPLNLHDVSIQNNESQTDRQTKLYEWSQKSLHGRHYHDLNLPYVDKNASNDWLRRGQLFPETEGFMLAIQDQVIETRNYRKHVLKIPGTQDLCRRCSASSETIQHITGACKAIVQTDYKHRHDQVANIIHQQLALKYNLIPPPAIPYYKYTPNNVLDNSNYKLYFDRAILTDKTVHHNRPDITLVDKQNKTAFIIDIAVPNTHNLQSTIAEKLSKYVDLKDEITRLWNLRQVTIVPIVVSTTGVIPTSLQQSIRILNLQKSTSSIIQKAIILNTCRIVRRFLHNNTNTDIT

SEQ ID NO: 164 - protein, 1480 aa, Lycaena phlaeas
MRLRSNRILPQAGTSVNDAGESRPRLLASGSSTYSGGGTVSLSAQSQTVADHHQKHGNTELNRRTPTRFLQTTTADDDRPTDIITDSPIEPYSPSTTSYIPSLQSSPSIHSSPTTASSCPSPMDFDVPQEDITILVSSSKTGKQITRNKRSKKSRSPTAYCLSNCTDFDESQYSDQSTQACNNDIDVTHNVHSFTPNSVVQSAVAMNIAPTLGKKRQKWTKEINEYIVRTYYKITKLDTCKSGYLDTLYNHFTTKFPDFNVTRQRLGDQFRAIIRNKMIPQEILDRIKSEVSSALNSDTSTQPPTQTSIIKHNRQRMQWLPEHNETIMRSYYKITELETNLTAYRKALHKNFIETYPNLNHVSEQRVADQRRVIVKNKYLSDDRLEALRNEVQKEISDGTRTPQNINDITTNNNSQGDEPLTNNINLGTSTENNIIYVGLDNQSINNEQSSILIGDTLSLEIQNTFSLALEYYINTTPLQRHYIPKQKTSKKLALIVQFINNNILPANINIDSDFTFLQTVLYCAAWTAAKVNGAKINIPNTSELYIRKEIYKPRWQIRLENRVNDLRTKISRLTHYSKGHRSNKLERHVQIILHNYKIHSTFEDPNSKIPQFIDTLKQKLTVASSRLKRYKACTLRKKQNNQFKSNEKQFYRNVLSASNNNQTQDNDNAHPTETQLYSFWSKIWENPVTHNNEATWIVQEAERYSSISAMEFEFVPAEVFQSVISKLHNWKSPGSDYLHNYWYKKFTFLHPFLHNHINRFIKDPKNLPEYFTNGVTYMLCKNKSESINPEKYRPITCLQSIYKIMTSCLCHLIYTHIDKNKIFAEQQKGCRKFSQGCKEQLTIDSIILKQVNKKKKDLFTMYIDYKKAFDSVPHSWLVKVLEIYKIHPQITTFLENIMSKWTTKLKLTSSSNVIETKLINIQRGIFQGDTLSPLWFCLALNPLSNLLNNSNTGYLFDNLCQRTNAEPDQQMYTLNHLMYMDDIKLYTSTQHDLKKLAEITENFSQDINMEFGIDKCKINSMRAGVIFQHNYDCSSGERIESLNEQETYKYLGYMQSKHLHHKEIKSALKLKFKHRLNSILKSHLYAGNTTKAINTYAIPILTYSFGIINWTKSDLISLQRLINTTMTHHRKHHPRSCSQRLTMARKDGGRGIIDIVNLHNKQIKSLRLYFHNSNSTLHRAIVANDSKFTPLNLHDVSIQNNESQTDRQTKLYEWSQKSLHGRHYHDLNLPYVDKNASNDWLRRGQLFPETEGFMLAIQDQVIETRNYRKHVLKIPGTQDLCRRCSASSETIQHITGACKAIVQTDYKHRHDQVANIIHQQLALKYNLIPPPAIPYYKYTPNNVLDNSNYKLYFDRAILTDKTVHHNRPDITLVDKQNKTAFIIDIAVPNTHNLQSTIAEKLSKYVDLKDEITRLWNLRQVTIVPIVVSTTGVIPTSLQQSIRILNLQKLTSSIIQKAIILNTCRIVRRFLHNNTNTDIT

SEQ ID NO: 165 - protein, 1373 aa, Drepana arcuata
MITRSKKTRPQVPGGPSSCASSDESRPGSGTRGAYNLRATCSRQTTMACTTDSELQCEITTTPSSTFSQDPFSRSSPTLSSNSIPLEDVAQETINVANTVPTTGAMNTRKKWTTEMNKFILRNYLHLTMMETDVKGYLPFLHAKFIENFPDMTTVSRQRVGDQRRAIVRKQLLPQQTIDEITREVQATIQHSYSNTHHLNTDNINIQNTQTMPLSQSGQRMRWTDEHNEDIIRSYYKITKLETDRTSYRKNLFQDFISIFPNLAHLSEQRVADQRRAIIENKYFTEERLNAIRQEVRSEIEPIDSFDEIGRRDQDYLNHIDVDVTTSQIQDETVINIPQFNTELSSKIDASFDHALVYYTDTLPTQRHYIPKQKSSRRLASIVHYINTQILPKLVNSDTDFNTFQTIIYCAAWTAAKINGAKINIPPVTETTNTVSRKIKPKWQIRLEQKIEKLRANIGRLLHYINGNRTASLTKHVEDILKNYKIHTSHEEQNTELSQFLDTLKQKLAVASSRLKRYKTCSLRKSQNNQFIKNEKQFYRKIRTTTSSHQENTTTPTPETEVLHRYWSQLWGSSIEHNDNADWIQEETTRASNIESMEFTHIPTDTFHDVIRKLHNWKTPGSDFIHNYWYKHFTNIHPFLYNYINDFILNPHTIPEYITAGITFMLSKDQSDGSNPAKYRPITCLQTIYKIITSCLAELIYKHVDNNSILAQEQRGCKKYSQGCKEQLTIDSVILKQVQKKKKDLFTMYIDYKKAYDSVPHSWLLKVLEIYKIHPFIRAFLHSTMTNWTTRLKVNSPSENVVSDVIQIKRGIFQGDALSPLWFCLSLNPLSNLLNKTNIGYPFLSQNPTTDTSNTTLDYYSLNHLLYMDDIKLYAVKQEDISTLAQITEFFSRDICMEFGIDKCRLNSVKAGQIHSHHYELQSGEQIKSLNEDETYKYLGYAQSKHINHKAIKSSLKVQFKHRLNSIAKSYLYSKNTTKAINTYAVPILTYSFGIIHWSKTELKTLQRLINLTLTKNRKHHPRSCVQRLTIPRKQGGRGLIDIVNLHNKQISNLRSYFHNKSPTSTLYKAIVLNDLKFTPLNLQNIGPQKNEKLTDIQTKLDEWARKSLHGRHYNDLNQQYVDKIASNEWLKRGELFPETEGFMLAIQDQVIETRNYQKHIMKIANTTDICRRCQAPNETIQHITGSCKAIAQTDYKHRHDQVANIIHQKMAIKHKLISLPSVPYYKYAPQTVLENSTHKLYFDRAILTDKTVHYNRPDITLIDKVNKTAQLIDIAVPNTHNLQTTIAEKLSKYIDLKDEIARLWHLQKVTIIPIVISTTGVIPKQLHQSIATIQLPKLTYLNLQKAVILNTCRITRKFLQIDRPLTSTNNFS

SEQ ID NO: 166 - protein, 1373 aa, Drepana arcuata
MITRSKKTRPQVPGGPISCASSDESRPGSGTRGAYNLRATCSRQTTMACTTDSELQCEITSTPSSTFSQDPFSRSSPTLSSNSIPLEDVAQETINVANTVPTTGAMNTRKKWTTEMNKFILRNYLHLTMMETDVKGYLPFLHAKFIENFPDMTTVSRQRVGDQRRAIVRKQLLPQQTIDEITREVQATIQHSYSNTHHLNTDDINIQNTQTMPLSQSGQRMRWTDEHNEAIIRSYYKITKLETDRTSYRKNLYQDFISIFPNLAHLSEQRVADQRRAIIENKYFTEERLNAIRQEVRSEIEPIDSLDEIGSRDQDYLNHIDVDVTTSQIQDETVINIPQFNTEISSRIDASFDHALIYYTDTLPTQRHYIPKQKSSRRFASIVHYINTQILPKLVNSDTDFNTFQTIIYCAAWTAAKINGAKINIPPVTETTNTVSRKIKPKWQIRLEQKIEKLRANIGRLLHYINGNRTASLTKHVEDILKNYKIHTSHEEQNTELSQFLDTLKQKLAVASSRLKRYKTCTLRKSQNNQFIKNEKQFYRKIRTTTSSHQENTTTPTPETEVLHRYWSQLWGSSIEHNDNADWIQEETTRASNIESMEFTHIPTDTFHDVIRKLHNWKTPGSDFIHNYWYKHFTNIHPFLYNYINDFILNPHTIPEYITAGITFMLSKDQSDGSNPTKYRPITCLQTIYKIITSCLAELIYKHVDNNSILAQEQRGCKKYSQGCKEQLTIDSVILKQVQKKKKDLFTMYIDYKKAYDSVPHSWLLKVLEIYKIHPFIRAFLHSIMTNWTTRLKINSPSENVVSDVIQIKRGIFQGDALSPLWFCLSLNPLSNLLNKTNIGYPFLSQNPTTDTSNTTLDYYSLNHLLYMDDIKLYAVKQEDISTLAQITEFFSRDICMEFGIDKCRLNSVKAGQIHSHHYELQSGEQIKSLNEDETYKYLGYAQSKQINHKAIKSSLKVQFKHRLNSIAKSYLYSKNTTKAINTYAVPILTYSFGIIHWSKTELKTLQRLINLTLTKNRKHHPRSCVQRLTIPRKQGGRGLIDIVNLHNKQISNLRSYFHNKSPTSTLYKAIVLNDLKFTPLNLQNIGPQKNEKLTDIQTKLDEWARKSLHGRHYNDLNQQYVDKIASNEWLKRGELFPETEGFMLAIQDQVIETRNYQKHIMKIANTADICRRCQAPNETIQHITGSCKAIAQTDYKHRHDQVANIIHQKMAIKHKLISLPSVPYYKYAPQTVLENSTHKLYFDRAILTDKTVHYNRPDITLIDKVNKTAQLIDIAVPNTHNLQTTIAEKLSKYIDLKDEIARLWHLQKVTITPIVISTTGVIPKQLHQSIATIQLPKLTYLNLQKAVILNTCRITRKFLQIDRPLTSTNNFS

SEQ ID NO: 167 - protein, 777 aa, Drepana arcuata
MEFTHIPTDTFHDVIRKLHNWKTPGSDFIHNYWYKHFTNIHPFLYNYINDFILNPHTIPEYITAGITFMLSKDQSDGSNPAKYRPITCLQTIYKIITSCLAELIYKHVDNNSILAQEQRGCKKYSQGCKEQLTIDSVILKQVQKKKKDLFTMYIDYKKAYDSVPHSWLLKVLEIYKIHPFIRAFLHSTMTNWTTRLKVNSPSENVVSDVIQIKRGIFQGDALSPLWFCLSLNPLSNLLNKTNIGYPFLSQNPTTDTSNTTLDYYSLNHLLYMDDIKLYAVKQEDISTLAQITEFFSRDICMEFGIDKCRLNSVKAGQIHSHHYELQSGEQIKSLNEDETYKYLGYAQSKHINHKAIKSSLKVQFKHRLNSIAKSYLYSKNTTKAINTYAVPILTYSFGIIHWSKTELKTLQRLINLTLTKNRKHHPRSCVQRLTIPRKQGGRGLIDIVNLHNKQISNLRSYFHNKSPTSTLYKAIVLNDLKFTPLNLQNIGPQKNEKLTDIQTKLDEWARKSLHGRHYNDLNQQYVDKIASNEWLKRGELFPETEGFMLAIQDQVIETRNYQKHIMKIANTTDICRRCQAPNETIQHITGSCKAIAQTDYKHRHDQVANIIHQKMAIKHKLISLPSVPYYKYTPQTVLENSTHKLYFDRAILTDKTVHYNRPDITLIDKVNKTAQLIDIAVPNTHNLQTTIAEKLSKYIDLKDEIARLWHLQKVTIIPIVISTTGVIPKQLHQSIATIQLPKLTYLNLQKAVILNTCRITRKFLQIDRPLTSTNNNS

SEQ ID NO: 168 - protein, 1373 aa, Drepana arcuata
MITRSKKTRPQVPGGPSSCASSDESRPGSGTRGAYNLRATCSRQTTMACKTDSELQCEITSTPSSTFSQDPFSRSSPTLSSNSIPLEDVAQETINVANTVPTTGAMNTRKKWTTEMNKFILRNYLHLTMMETDVKGYLPFLHAKFIENFPDMTTVSRQRVGDQRRAIVRKQLLPQQTIEEITREVQATIQHSYSYTHHLNTDNINIQNTQTMPLSQSGQRMRWTDEHNEAIIRSYYKITKLETDRTSYRKNLYQDFISIFPNLAHLSEQRVADQRRAIIENKYFTEERLNAIRQEVRSEIEPIDSFDEIGRRDQDYLNHIDVDVTTSQIQDETVINIPQFNTELSSKIDASFDHALVYYTDTLPTQRHYIPKQKNSRRLASIVHYINTQILPKLVNSDTDFNTFQTIIYCAAWTAAKINGAKINIPPVTETTNTVSRKIKPKWQIRLEQKIEKLRANIGRLLHYINGNRTASLTKHVEDILKNYKIHTSHEEQNTELSQFLDTLKQKLAVASSRLKRYKTCTLRKSQNNQFIKNEKQFYRKIRTTTSSHQENTTTPTPETEVLHRYWSQLWGGSIEHNDNADWIQEETTRASNIESMEFTHIPTDTFHDVIRKLHNWKTPGSDFIHNYWYKHFTNIHPFLYNYINDFILNPHTIPEYITAGITFMLSKDQSDGSNPAKYRPITCLQTIYKIITSCLAELIYKHVDNNSILAQEQRGCKKYSQGCKEQLTIDSVILKQVQKKKKDLFTMYIDYKKAYDSVPHSWLIKVLEIYKIHPFIRAFLHSTMTNWTTRLKVNSPSENVVSDVIQIKRGIFQGDSLSPLWFCLSLNPLSNLLNKTNIGYPFLSQNPTTDTSNTTLDYYSLNHLLYMDDIKLYAVKQEDISTLAQITEFFSRDICMEFGIDKCRLNSVKAGQIHSHHYELQSGEQIKSLNEDETYKYLGYAQSKQINHKAIKSSLKVQFKHRLNSIAKSYLYSKNTTKAINTYAVPILTYSFGIIHWSKTELKTLQRLINLTLTKNRKHHPRSCVQRLTIPRKQGGRGLIDIVNLHNKQISNLRSYFHNKSPTSTLYKAIVLNDLKFTPLNLQNIGPQKNEKLTDIQTKLDEWARKSLHGRHYNDLNQQYVDKIASNEWLKRGELFPETEGFMLAIQDQVIETRNYQKHIMKIANTTDICRRCQAPNETIQHITGSCKAIAQTDYKHRHDQVANIIHQKMAIKHKLISLPSVPYYKYAPQTVLENSTHKLYFDRAILTDKTVHYNRPDITLIDKVNKTAQLIDIAVPNTHNLQTTIAEKLSKYIDLKDEIARLWHLQKVTIIPIVISTTGVIPKQLHQSIATIQLPKLTYLNLQKAVILNTCRITRKFLQIDRPLTSTNNFS

SEQ ID NO: 169 - protein, 1373 aa, Drepana arcuata
MITRSKKTRPQVPGGPSSCASSDESRPGSGTRGAYNLRATCSRQTTMACTTDSELQCEITSTPSSTFSQDPFSRSSPTLSSNSIPLEDVAQETINVANTVPTTGAMNTRKKWTTEMNKFILRNYLHLTIMETDVKGYLPFLHAKFIENFPDMTTVSRQRVGDQRRAIVRKQLLPQQTIDEITREVQATIQHSYSNTHHLNTDNINIQNTQTMPLSQSGQRMRWTDEHNEAIIRSYYKITKLETDRTSYRKNLYQDFISIFPNLAHLSEQRVADQRRAIIENKYFTEERLNAIRQEVRSEIEPIDSFDEIGRRDQDYLNHIDVDVTTSQIQDETVINIPQFNTELSSKIDASFDHALIYYTDTLPTQRHYIPKQKSSRRLASIVHYINTQILPKLVNSDTDFNTFQTIIYCAAWTAAKINGAKINIPPVTETTNTVSRKIKPKWQIRLEQKIEKLRANIGRLLHYINGNRTASLTKHVEDILKNYKIHTSHEEQNTELSQFLDTLKQKLAVASSRLKRYKTCTLRKSQNNQFIKNEKQFYRKIRTTTSSHQENTTTPTPETEVLHRYWSQLWGSSIEHNDNADWIQEETTRASNIESMEFTHIPTDTFHDVIRKLHNWKTPGSDFIHNYWYKHFTNIHPFLYNYINDFILNPHTIPEYITAGITFMLSKDQSDGSNPAKYRPITCLQTIYKIITSCLAELIYKHVDNNSILAQEQRGCKKYSQGCKEQLTIDSVILKQVQKKKKDLFTMYIDYKKAYDSVPHSWLLKVLEIYKIHPYIRAFLHSTMTNWTTRLKVNSPSENVVSDVIQIKRGIFQGDALSPLWFCLSLNPLSNLLNKTNIGYPFLSQNPTTDTSNTTLDYYSLNHLLYMDDIKLYAVKQEDISTLAQITEFFSRDICMEFGIDKCRLNSVKAGQIHSHHYELQSGEQIKSLNEDETYKYLGYAQSKHINHKAIKSSLKVQFKHRLNSIAKSYLYSKNTTKAINTYAVPILTYSFGIIHWSKTELKTLQRLINLTLTKNRKHHPRSCVQRLTIPRKQGGRGLIDIVNLHNKQISNLRSYFHNKSPTSTLYKAIVLNDLKFTPLNLQNIGPQKNEKLTDIQTKLDEWARKSLHGRHYNDLNQQYVDKIASNEWLKRGELFPETEGFMLAIQDQVIETRNYQKHIMKIANTTDICRRCQAPNETIQHITGSCKAIAQTDYKHRHDQVANIIHQKMAIKHKLISLPSVPYYKYTPQTVLENSTHKLYFDRAILTDKTVHYNRPDITLIDKVNKTAQLIDIAVPNTHNLQTTIAEKLSKYIDLKDEIARLWHLQKVTIIPIVISTTGVIPKQLHQSIATIQLPKLTYLNLQKAVILNTCRITRKFLQIDRPLTSTNNFS

SEQ ID NO: 170 - protein, 777 aa, Drepana arcuata
MEFTHIPTDTFHDVIRKLHNWKTPGSDFIHNYWYKHFTNIHPFLYNYINDFILNPHTIPEYITAGITFMLSKDQSDASNPAKYRPITCLQTIYKIITSCLAELIYKHVDNNSILAQEQRGCKKYSQGCKEQLTIDSVILKQVQKKKKDLFTMYIDYKKAYDSVPHSWLLKVLEIYKIHPFVRAFLHSTMTNWTTRLKVNSPSENVVSDVIQIKRGIFQGDALSPLWFCLSLNPLSNLLNKTNIGYPFLSQNPTTDTSNTTLDYYSLNHLLYMDDIKLYAVKQEDISTLAQITEFFSRDICMEFGIDKCRLNSVKAGQIHSHHYELQSGEQIKSLNEDETYKYLGYAQSKHINHKAIKSSLKVQFKHRLNSIAKSYLYSKNTTKAINTYAVPILTYSFGIIHWSKTELKTLQRLINLTLTKNRKHHPRSCVQRLTIPRKQGGRGLIDIVNLHNKQISNLRSYFHNKSPTSTLYKAIVLNDLKFTPLNLQNIGPQKNEKLTDIQTKLDEWARKSLHGRHYNDLNQQYVDKIASNEWLKRGELFPETEGFMLAIQDQVIETRNYQKHIMKIANTTDICRRCQAPNETIQHITGSCKAIAQTDYKHRHDQVANIIHQKMAIKHKLISLPSVPYYKYTPQTVLENSTHKLYFDRAILTDKTVHYNRPDITLIDKVNKTAQLIDIAVPNTHNLQTTIAEKLSKYIDLKDEIARLWHLQKVTIIPIVISTTGVIPKQLHQSIATIQLPKLTYLNLQKAVILNTCRITRKFLQIDRPLTSTNNFS

SEQ ID NO: 171 - protein, 1373 aa, Drepana arcuata
MITRSKKTRPQVPGGPISCASSDESRPGSGTRGAYNLRATCSRQTTMACTTDSELQCEITSTPSSTFSQDPFSRSSPTLSSNSIPLEDVAQETINVANTVPTTGAMNTRKKWTTEMNKFILRNYLHLTMMETDVKGYLPFLHAKFIENFPDMTTVSRQRVGDQRRAIVRKQLLPQQTIDEITREVQATIQHSYSNTHHLNTDNINIQNTQTMPLSQSGQRMRWTDEHNEAIIRSYYKITKLETDRTSYRKNLYQDFISIFPNLAHLSEQRVADQRRAIIENKYFTEERLNAIRQEVRSEIEPIDSFDEIGRRDQDYLNHIDVDVTTSQIQDETVINIPQFNTELSSKIDASFDHALIYYTDTLPTQRHYIPKQKSSRRLASIVHYINTQILPKLVNSDTDFNTFQTIIYCAAWTAAKINGAKINIPPVTETTNTVSRKIKPKWQIRLEQKIEKLRANIGRLLHYINGNRTASLTKHVEDILKNYKIHTSHEEQNTELSQFLDTLKQKLAVASSRLKRYKTCTLRKSQNNQFIINEKQFYRKIRTTTSSHQENTTTPTPETEVLHRYWSQLWGSSIEHNDNADWIQEETTRASNIESMEFTHIPTDTFHDVIRKLHNWKTPGSDFIHNYWYKHFTNIHPFLYNYINDFILNPHTIPEYITAGITFMLSKDQSDGSNPAKYRPITCLQTIYKIITSCLAELIYKHVDNNSILAQEQRGCKKYSQGCKEQLTIDSVILKQVQKKKKDLFTMYIDYKKAYDSVPHSWLLKVLEIYKIHPFIRAFLHSTMTNWTTRLKVNSPSENVVSDVIQIKRGIFQGDALSPLWFCLSLNPLSNLLNKTNIGYPFLSQNPTTDTSNTTLDYYSLNHLLYMDDIKLYAVKQEDISTLAQITEFFSRDICMEFGIDKCRLNSVKAGQIHSHHYELQSGEQIKSLNEDETYKYLGYAQSKHVNHKAIKSSLKVQFKHRLNSIAKSYLYSKNTIKAINTYAVPILTYSFGIIHWSKTELKTLQRLINLTLTKNRKHHPRSCVQRLTIPRKQGGRGLIDIVNLHNKQISNLRSYFHNKSPTSTLYKAIVLNDLKFTPLNLQNIGPQKNEKLTDIQTKLDEWARKSLHGRHYNDLNQQYVDKIASNEWLKRGELFPETEGFMLAIQDQVIETRNYQKHIMKIANTTDICRRCQAPNETIQHITGSCKAIAQTDYKHRHDQVANIIHQKMAIKHKLISLPSVPYYKYTPQTVLENSTHKLYFDRAILTDKTVHYNRPDITLIDKVNKTAQLIDIAVPNTHNLQTTIAEKLSKYIDLKDEIARLWHLQKVTIIPIVISTTGVIPKQLHQSIATIQLPKLTYLNLQKAVILNTCRITRKFLQIDRPLTSTNNFS

SEQ ID NO: 172 - protein, 1360 aa, Emmelina monodactyla
MQKNNSSNKYNLRRRLPKNASNTEGCQRTPSRSSSPVSSTQSLFESPISSPDSYVLRPQSRSSTISFISADAVSEANANNPALTAVSTRTRQKWSEEMNRFIWRTYLIATELESKPRGYLDTLHNEFTLKFPHIKTSRQRLGDQRRAIVNNKLLPQNALDEIRSEIETLLQKPPNTAYTEIPTLTKTTQNQTTQRMRWTDEYNETIMRCYYKITQLETNLTAYRHILHQEFINTYPHLAHITPQRISDQRRVIVQNKYISDERLAIIRQEVAEEIELRTIHNRTPRNTNTPAESVIVDEGELNNISYDLYSHTETQTTVQQSHETHNIGIEDIENSNGNEIENTFDDALHNFKEITPTNRVFIPKQKTSRKLSILVHYINTRILPKHINIDTEFSTLQTILYCAAWTAAKLNGSKVNLPTSLPSQHINNQKRKPKWQIRLEKKVEDLRCKIGRVTQYLRGNRGQRLSAQVHLILQQYKIHTIHESPNSCIMDFLDTLKQKLSVTCSRLKRYKTCTLRKSQNNSFTNNERKFYQNLKSSTTNQIGSAQLTPSSEELQTFWSAIWENPKSHNESAIWLQPDKLDTSNIMPMEFNDIPVETFNSVINNLHNWKTPGSDSLHNYWFKKFTFIHPFLYNHINNFIKNPNSMPNYVTDGITFMLPKDKEDTSNPAKYRPITCLQSVYKIITSCISHIIYTHAMKYEVLAEQQKGCRKNSQGCKEQLIVDSVILKQVQQQKKDLFSIYIDYKKAFDSVPHSWLLKVLEIYKIHPTIIHFLQNTMLNWNTKLKLNSSNGTIETDTIKIQRGIYQGDTLSPIWFCLALNPLSQLINDAGFGYPFQYQINNENAEENRETLVSHLLYMDDIKLYATSQEDLNKLVTITEQFSSDVCMEFGIDKCKINSVQAGKPYRHSYQTTDGEIIEPLNDNEPYKYLGYVQSKYIHHKEIKASLKQKFKHRINSILKIHLNARNTIKAINAYAIPILTYSFGIIFWNKSEIKSLQRLINTSMTKNRKHHPRSCVQRLTLPRKEGGRGIIDIANLHSKQITNLRAYFRHSDSSTHKAIVQNDKRYTPLNLYDTNTQKNEVQLDKETKLNDWARKSLHGRHYHDLSQPHVDKIASNEWLSRGQLFPETEGFMLAIQDQIIETRNYQKHIIKIPNTIDVCRRCNSGSETIQHITGACKSIVQTDYKHRHDQVANIIHQKLALKYKLISPPTTPYYKYNPDTVLDNSTHKLYYDRAILTDRTVHYNRPDITLIDKQNRSALIIDIAIPNTHNLQATIAEKLSKYTDLKDEITRMWNLQKVTIVPIVISTTGVIPKSLHQSLKTIELPELTYINLQKAVILNTCRIVRKFLQNDTTTESPISS

SEQ ID NO: 173 - protein, 1361 aa, Emmelina monodactyla
MKKNNSSNKYNLRRRLPKNASNTEGCQRTPSRSSSPVSSTQSLFESPISSPDSYVLRPQSRSSTISFISADAVSEANANNPALTAVSTRTRQKWSEEMNRFIWRTYLIATELESKPRGYLDTLHNEFTLKFPHIKTSRQRLGDQRRAIVNNKLLPQNSLDEIRSEIETLVQKPPNTAYTEIPTLTQTTQNQTTQRMRWTNEYNETIMRCYYKITQLETNLTAYRHILHQEFINTYPHLAHITPQRISDQRRVIVQNKYISDERLAIIRQEVAEEIELRTIHNTTPRNTNTPAESVIVDEGELNNISYDLHSHTETQTTVQQSQETHNIGITEIENSNGNEIESTFNDAMHNFKEISPTKRVYIPKQKTSRKLTILVHYINTHILSKHINNDTEFSTLQTILYCAAWTAAKLNGSKVNLPTSLPSQHVNNHKRKPKWQIRLEKKVEDLRCKIGRLTQYLRGNRGHRLSAQVHLILQQNKIHTIHEPPNTCIMDFLDTLKQKLSVTCSRLKRYKTCTLRKSQNNSFTNNERKFYQNLKSSTTNQIGSAQLTPTSEELQTFWSAIWENPKTHNESAIWLQPDKLDTSNIMPMEFNNISVETFNSVINNLHNWKTPGSDSLHNYWFKKFTFIHPFLYNHINNFIKNPNSMPNYVTDGITLMLPKDKEDTSNPAKYRPITCLQSVYKIITSCISHIIYTHAIKYKVLAEQQKGCRKNSQGCKEQLIVDSVILKQVQQHKKDLFSIYIDYKKAFDSVPHSWLLKVLEIYKIHPTIIHFLQNTMLNWNTKLKLNSCNTTIETDTIKILRGIYQGDTLSPLWFCLALNPLSKLINNAGVGYPLQYQIDNENAEENRETLISHLLYMDDIKLYATSQEDLNKLVTITEQFSSDVCMEFGIDKCKINSVQAGKPFRHSYQTSDGEIIEPLNENEPYKYLGYVQSKYIHHKEIKASLKQKFKHRLNSILKTHLNAKNTIKAINAYAIPILTYSFGIIFWNKSEIKSLQRLINTSMTKNRKHHPRSCVQRLILPRKEGGRGIIDIANLHSKQITNLRAYFKYSDSPTHKAIVQNDKRYTPLNLYDTNTQRNEIQLDKQTKLNDWARKSLHGRHYHDLSQPHVDKIASNEWLSRGELFPETEGFMLAIQDQIIETRNYQKHIIKIPNIIDVCRRCNSGPETIQHITGACKSIVQTDYKHRHDQVANIIHQKLALKYKFISPPTTPYYKYNPDTVLDNSITHKLYYDRAILTDRTIHYNRPDITLIDKQNRSALIIDIAIPNTHNLQATIAEKLSKYTDLKDEITRMWNLQKVTIVPIVISTTGVIPKSLHQSLKTIELPELTYINLQKAVILNTCRIVRKFLQNDTTTESPISS

SEQ ID NO: 174 - protein, 1351 aa, Emmelina monodactyla
MENSILNKKYNLRRRLPRIVPNIEESQKTYSQSSSPTSSNHSLFQSPSSSPHSFEFRAQSRSSTYSFTSASAMLEANANNPTPTADNNRTRQRWSEEINRFIWRTYLIATALETQPRGYLDTLHKQFIEKFPNFKTTRQRLGDQRRAIINNKLLSQDILDEIRAEVNIVLMTPRNRTQDTQTQSQSHSTLFSQTTQRMRWTTEHNEVLMRSYYKITQLETNLTSYRAALHQDFINKFPHLSHVTQQRIADQRRLIIQNKYITNDRLAVIRSEVAAELEPRTATTPQLETTEPQHVNNENMLTTTEFHSSNTQSSQRIGDIEQYTQEIDTTIQESGNDKTEEIDNAFREALSFFKYTSPTGRTYIPKQRTSKKFALTINYINENLLPKYVNSDTDFNSLQTILYCAAWSAAKQNGSKLSLPTTQSQLIYKQRRKPKWQLRIESKIDDLRVKIGRLTQFLRGNRSHRLMAHIQQILQRYKTHTIHEDPNTHITHFLDTLKQKLAVACSRLKRYKTCTLRKNQNTTFTNNEKKFYQNLKSTTSNETTNSTPSPPSSDQLHSFWTALWGNAVDHNDDAAWLTSDDINNAHITDMEYDAISTETFKTVIDKLHNWKTPGPDFIHNYWIKKFTYIHPFLYNYINSFIKDPASMPTFLTSGTTYMLPKDPENSNNPASYRPITCLQSIYKIITSCISHIIYSHVDQNKIMADQQKGCRKSSQGCKEQLIIDSIILKQAQQKKTDLFSIYIDYKKAYDSIPHSWLIKVLKLYKINPVIIHFLKTIMTTWNTKLKLNVGNEAIETDQIQISRGIFQGDTLSPLWFCLALNPLSNLINKTNIGYPLEYKTNSSRVKEEYRLSHLLYMDDIKLYATSEDNLNKLVEITEQFSQDVCMEFGIDKCKINSVIKGNTHRHCYTTNSGEIIEPLDEQETYKYLGYIQSKLIHHKDIKNNLKKKFKHRLNCILKTHLYARNIFKAINTFAIPILTYSFGIIQWSKSDLKTLQRLINTTLTKNRKHHPRSCLQRLTLPRREGGRGLIDILNLHNKQISNLRSYFLNSLALIHKAIIQNDQKYTPLNLFDNTPQRNEIQTDKQTKFNDWSRKSLHGRHYHDLSQTHVDKRASNDWLNRGQLFPETEGFMVAIQDQIIETRNYRKHIMKIPNTVDTCRRCNGGSETIQHITGSCKAIVQTDYKHRHDQVANIIHQKLALKYKLITPPSTPYYKYTAATVLENTTHKLYFDRAILTDRTVHYNRPDITLLDKLNKTAIIIDIAVPNTHNLQTTISEKLNKYIELKDEITRMWKLEKVIIVPIVISTTGVIPKSLRLSLKALDLPELTYVNLQKAVILNTCRIVRKFLQNES

SEQ ID NO: 175 - protein, 1351 aa, Emmelina monodactyla
MENSILNKKYNLRRRLPRIVPNIEESQKTYSQSSSPTSSNHSLFQSPSSSPHSFEFRAQSRSSTYSFTSASAMLEANANNPTPTAGNNRTRQRWSEEINRFIWRTYLIATALETQPRGYLDTLHKQFIEKFPNFKTTRQRLGDQRRAIINNKLLSQDILDEIRAEVNIVLMTPRNRTQDTQTQSQSHSTLFSQTTQRMRWTTEHNEVLMRSYYKITQLETNLTSYRAALHQDFINKFPHLSHVTQQRIADQRRLIIQNKYITNDRLAVIRSEVAAELEPRTATTPQLETTEPQHVNNENMLTTTEFHSSNTQSSQRIGDIEQYTQEIDTTIQESGNDKTEEIDNAFREALRFFKYTSPTGRTYIPKQRTSKKFALTINYINENLLPKYVNSDTDFNSLQTILYCAAWSAAKQNGSKLSLPTTQSQLIYKQRRKPKWQLRIESKIDDLRVKIGRLTQFLRGNRSHRLMAHIQQILQRYKTHTIHEDPNTHITHFLDTLKQKLAVACSRLKRYKTCTLRKNQNTTFTNNEKKFYQNLKSTTSNETTNSTPSPPSSDQLHSFWTALWGNAVDHNDDAAWLTSDDINNAHITDMEYDAISTETFKTVIDKLHNWKTPGPDFIHNYWIKKFTYIHPFLYNYINSFIKDPASMPTFLTSGTTYMLPKDPENSNNPASYRPITCLQSIYKIITSCISHIIYSHVDQNKIMADQQKGCRKSSQGCKEQLIIDSIILKQAQQKKTDLFSIYIDYKKAYDSIPHSWLIKVLKLYKINPVIIHFLKTIMTTWNTKLKLNVGNEAIETDQIQISRGIFQGDTLSPLWFCLALNPLSNLINKTNIGYPLEYKTNSSRVKEEYRLSHLLYMDDIKLYATSEDNLNKLVEITEQFSQDVCMEFGIDKCKINSVIKGNTHRHCYTTNSGEIIEPLDEQETYKYLGYIQSKLIHHKDIKNNLKKKFKHRLNCILKTHLYARNIFKAINTFAIPILTYSFGIIQWSKSDLKTLQRLINTTLTKNRKHHPRSCLQRLTLPRREGGRGLIDILNLHNKQISNLRSYFLNSLALIHKAIIQNDQKYTPLNLFDNTPQRNEIQTDKQTKFNDWSRKSLHGRHYHDLSQTHVDKRASNDWLSRGQLFPETEGFMVAIQDQMIETRNYRKHIMKIPNTVDTCRRCNGGSETIQHITGSCKAIVQTDYKHRHDQVANIIHQKLALKYKLITPPSTPYYKYTAATVLENTTHKLYFDRAILTDRTVHYNRPDITLLDKLNKTAIIIDIAVPNTHNLQTTISEKLNKYIELKDEITRMWKLEKVIIVPIVISTTGVIPKSLRLSLKALDLPELTYVNLQKAVILNTCRIVRKFLQNES

SEQ ID NO: 176 - protein, 1181 aa, Emmelina monodactyla
MTSRNRTQDNQTQSQSHSTLFSQTTQRMRWTTEHNEVLMRSYYKITQLETNLTTYRAALHQDFINKFPHLSHVTQQRIADQRRLIIQNKYITNDRLAVIRSEVAAELEPRTATTPQLETTEPQHVNNENMLTTTEFHSLDTQSLQRIGDIEQYTQEIDTTIQESGNDKTEEIDNTFREALRFFKDTSPTGRTYIPKQRTSKKFALTINYINEDLLPKYVNSDTDFNSLQTILYCAAWSAAKQNGSKLSLPTTQSQQTYKQRRKPKWQLRIESKIDDLRVKIGRLTQFLRGNRSHRLTAHIQQILQRYKTHTIHEDPNTHITHFLDTLKQKLSVACSRLKRYKTCTLRKNLNSTFTNNEKKFYQNLKSTTSNETTNSTSTPPSSDQLHSFWAALWGNAVDHNDDAAWLTSDDINNAHITDMEYDAISIETFKTVIDKLHNWKTPGPDYIHNYWIKKFTYIHPFLYNYINSFIKDPASMPKFLTSGTTYMLPKDPENSNNPASYRPITCLQSIYKIITSCISHIIYSHVDQNKIMADQQKGCRKSSQGCKEQLIIDSIILKQVQQKKTDLFSIYIDYKKAYDSIPHSWLIKVLKLYKINPVIINFLKTIMTTWNTKLKLNVGNEAIETDQIQISRGIFQGDTLSPLWFCLALNPLSNLINKTNIGYPLEYKTNSSRPKEEYRLSHLLYMDDIKLYATSEDNLNKLVEITEQFSQDVCMEFGIDKCKINSVIKGNTHRHCYTTNSGEIIEPLDEQETYKYLGYIQSKLLHHKDIKNNLKKKFKHRLNCILKTHLYARNIFKAINTFAIPILTYSFGIIQWSKLDLKTLQRLINTTLTKNRKHHPRSCLQRLTLPRREGGRGLIDILNLHNKQISNLRSYFFSSLALIHKAIIQNDRKYTPLNLFDSTPQRNEIQTDKQTKFNDWSRKSLHGRHYHDLSQTHVDKRASNDWLNRGQLFPETEGFMVAIQDQIIETRNFRKYIMKIPNTVDTCRRCNGGSETIQHITGSCKAIVQTDYKHRHDQVANIIHQKLALKYKLITPPSTPYYKYTAATVLENTTHKLYFDRAILTDRTVHYNRPDITLLDKLNKTAIIIDIAVPNTHNLQTTISEKLNKYIELKDEITRMWKLEKVIIVPIVISTTGVIPKSLSLSLKALDLPELTYVNLQKAVILNTCRIVRKFLQNES

SEQ ID NO: 177 - protein, 1359 aa, Emmelina monodactyla
MQNINSNKYNLRRRLPKNTSNIEECRNSPPCPSSPISSSQSLFDSPSSSSNSYEERPLSRSSTISIVSASAASEANAKNPTPTAGSTRTRQKWSEEMNRFIWRTYLIATALETKPRSYLDILHSEFSKKFTHFNTSRQRLGDQRRAIINNKLLSQNVLDEIRIEVTTLLQSPQSQLQTNTPSLIPTTHTQLNQRMRWTNEYNETIMRSYYKITQLETNLTAYRTILHQEFINTFPHLSHVTQQRISDQRRLIVQHKYISDERLAAIRAEVAEGIELRTTQSGAACQQLTENIPLETINTVEDELNNISFEFNLETETQYNSQLIIQSQVEHQTSPLVEYNNSETESAFMESLQYFKNTTPTNRVYIPRQKTSRKLTALVQHINTHILPKFVNIDTDFDTLQTVLYCAAWTVAKLNGSKLRLPNTNPNQRINNRKPKWQIRLEKKVDDLRCKIGRLTQYLRGNRGDRLTTHVHLILQQYKIHTLHEPPNTQLMQFLDTLKQKLSVTSSRLKRYKTCTLRKTQNTQFYYNEKKFYRNLKSSTSNENHTREPQATPSSERLHAFWSSIWENSKTHNDDASWLQPNRLDTSNISPMEFNAISIDTFNTVIKHLHNWKTPGTDFLHNYWYKKFTHIHPFLYNHMNDFIKNPLSMPKYITNGTTYLLPKDEKNTNDPAKYRPITCLQSFYKIITSCISHVIYSHSSKNNILSDEQKGCRKYSQGCKEQLIIDSVILKQVQQKKKDLFSMYIDYKKAFDSVPHSWLIKVLELYKVHPTIVTFLQTIMTNWNTKLKLNSTEGTIETDTIRILRGIYQGDTLSPLWFCMALNPLSQLIKNTNIGYPLKYHTENIHKELRISHLLYMDDIKLYATSKDDLNTLVSVTEEFSNDVCMEFGIDKCKINSVLAGLPHKHFYTTSNNETIEPLDDEETYKYLGYDQSKQLHIKEIKLSLRQKFKHRLNSIFKTHLYSKNTVKAINSFAIPVLTYSFGIISWSKSDLKSLQRLINTCLTKNRKHHPRSCVQRLTLPRSEGGRGIIDITNLHNKQIANLRTYFIHSKFPLHTATVQNDKRYTPLNLHDLNTQKNESQIDKQTKLNDWARKSLHGRHHHDLSQPHVDKNASNEWLSRGQLFPETEGFMLAIQDQVIETRNYKKHIMRIPNTVDICRRCNAGSETIQHITGACKFIVQTDYKHRHDQVANIIHQKLAINYNLITTPPTPYYKYTPETVLDNATHKLYYDRAILTDRTVHYNRPDITLVDKKNRTALLIDIAIPNTHNIQSTISEKLSKYTDLKDEIAKMWNLQKVTIVPIVISTTGVIPKSLHQSLQSIELPEFTYISLQKAVILNTCRIVRKFLKIDNPTESQSRL

SEQ ID NO: 178 - protein, 1391 aa, Emmelina monodactyla
MTSKLPFPKLTVPKTKKTIMITRSKRPRPQVPGCSSDCADSDGSRTGPGTRGAYNPRARNATRQTTQATNSDTDDTLSESSYTPDSVVQEAAATKSVPASGGKRRKWTHEINEFLVRTYLTITKLDTCPQGYLDQLHQQFVSKYPYIDVSKQRLGDQYRAIIRNKMISQNTLEQIRNEVSVKLNSEFSETSQNMSLQSQQNQTNNFNTATQRHTRMRWTTEHNEAIMRAYYKITQSETNLTAYRSALHQEFIATFPHLSHITEQRIADQRRLIVQNKYINDNRLEMLRNETANDHRNNQNIETTHTESQQSNTNSVHYFQSLDMSEISSDLNLNTESATNPTVTQLTQEQNNIKSEYTWEEIENTFTSSYEYFKHITPTKRSYIPKQKTSRKLSSIVHYINTRVFPVHISTDTDFNTLQTILYCAAWTAAKVNGSKIKIPSEATSEPNQTHKKQKPRWLLRLEERVSDLRSKIAHLSHYINGHRSPYLERQVQKILKNYKIHTTHENPNTEISHFLDTLKQKLTVTCSRLKRYTTCTLRKTQNGQFIHNEKKFYRNLKSATSNQISNHSQSLLSSEQLQTFWSQIWENPISHNTESIWIQKEETNYCATPAMEFDFIPVEIFQTVIQQLHNWKSPGTDYIHNYWLKKFTFLHPFLHNYINKFIQEPQTMPDYMTTGITYMLPKDKYDLNNPAKYRPITCLQSFYKIITSCLSHLIYKHTAKNNILAEQQKGCRKYSQGCKEQITIDAIILKQVQQHKTSLFSMYIDYKKAYDSIPHTWLMKVLEIYKIHPVIISFLRNTMSNWSTSLKLSSSNDTIETGNIKIQRGIFQGDTLSPLWFCLALNPLSNLLNKTNVGYTFKNSCNLNENEQIPFLNHLLYMDDIKLYASTEQDLYKLAETTECFSQDIGMEFGIDKCKINSIISGKPFQHHYDTSAGQRIEPLDEHETYKYLGCQQSKNIHHKEIKLKLKKQFKQRLNAILKSHLYSSNIFKAINSYAIPVLTYSFGLINWSKSDLKQLQRIVNTTMTHHRKHHPRSCIQRLTLPRGDGGRGLIDIHNLHNKQISNLRAYFHHGTSLIHRTIVLNDNKYTPLNLHDLATQNNETQITRQTKLTEWSRKSLHGRHYHDLNLPHVDKHASNEWLRRGQLFPETEGFMLAIQDQVIETRNYRKHIMKLPNTQDTCRRCNSGAETIQHVTGACRAIVQTDYKHRHDQVANIIHQKLAHKYNLISSPPTPYYKYTPQTVLDNSSYKLYYDRAILTDRTIHNNRPDITLLNKHTRTALLIDIAIPNTHNLQTTISEKLRKYVDLKDEITRMWNLRKVTIVPIVLSTTGVIPQSLQESLKTIDLPELTYINLQKAVILNTCRIVRKFLQNDSTISDQIPLQTTRADVDLA

SEQ ID NO: 179 - protein, 1391 aa, Emmelina monodactyla
MTSKLPFPKLTVPKTKKTIMITRSKRPRPQVPGCSSDCADSDGSRSGPGTRGAYNPRARNATRQTTQATNSDTDDTLSESSYTPDSVVQEAAATKSVPASGGKRRKWTHEINEFLVRTYLTITKLDTCPQGYLDQLHQQFVSKYPYIDVSKQRLGDQYRAIIRNKMISQNTLEQIRNEVSVKLNSEFSETSQNMSLQSQQNQTNNFNTATQRHTRMRWTTEHNEAIMRAYYKITQSETNLTAYRSALHQEFIATFPHLSHITEQRIADQRRLIVQNKYINDNRLEMLRNETANDHRNNQNIETTHTESQQSNTNSVHYFQSLDMSEISSDLNLNTESATNPTVTQLTQEQNNIQSEYTWEEIENTFTSSYEYFKHITPTKRSYIPKQKTSRKLSSIVHYINTRVFPVHISTDTDFNTLQTILYCAAWTAAKVNGSKIKIPSEATSEPNQTHKKQKPRWLLRLEERVSDLRSKIAHLSHYINGHRSPYLERQVQKILKNYKIHTTHENPNTEISHFLDTLKQKLTVTCSRLKRYTTCTLRKTQNGQFIHNEKKFYRNLKSATSNQISNHSQSLLSSEQLQTFWSQIWENPISHNTESIWIQQEETNYCATPAMEFDFIPVEIFQTVIQQLHNWKSPGTDYIHNYWLKKFTFLHPFLHNYINKFIQEPQTMPDYMTTGITYMLPKDKDDLNNPAKYRPITCLQSFYKIITSCLSHLIYKHTAKNNILAEQQKGCRKYSQGCKEQITIDAIILKQVQQHKTSLFSMYIDYKKAYDSIPHTWLMKVLEIYKIHPVIISFLRNTMSNWSTSLKLSSSNDTIETGNIKIQRGIFQGDTLSPLWFCLALNPLSNLLNKTNVGYTFKNSCNLNENEQIPFLNHLLYMDDIKLYASTEQDLYKLAETTECFSQDIGMEFGIDKCKINSIISGKPFQHHYDTSAGQRIEPLDEHETYKYLGCQQSKNIHHKEIKLKLKKQFKQRLNAILKSHLYSSNIFKAINSYAIPVLTYSFGLINWSKSDLKQLQRIVNTTMTHHRKHHPRSCIQRLTLPRGDGGRGLIDIHNLHNKQISNLRAYFHHGTSLIHRTIVLNDNKYTPLNLHDLATQNNETQITRQTKLTEWSRKSLHGRHYHDLNLPHVDKHASNEWLRRGQLFPETEGFMLAIQDQVIETRNYRKHIMKLPNTQDTCRRCNSGAETIQHVTGACRAIVQTDYKHRHDQVANIIHQKLAHKYNLISSPPTPYYKYTPQTVLDNSSYKLYYDRAILTDRTIHNNRPDITLLNKHTRTALLIDIAIPNTHNLQTTISEKLRKYVDLKDEITRMWNLRKVTIVPIVLSTTGVIPQSLQESLKTIDLPELTYINLQKAVILNTCRIVRKFLQNDSTISDQIPLQTTRADVDLA

SEQ ID NO: 180 - protein, 880 aa, Emmelina monodactyla
MAHFLDTLKQKLTVTCSRLKRYTTCTLRKTQNGQFIHNEKQFYRNLKSATSNQISNHSQLLQSPEQLQTFWSQIWENPISHNTESIWIQQEETNYCATPAMEFDFIPVEIFQTVIQQLHNWKSPGTDYIHNYWLKKFTFLHPFLHNYINKFIQEPETMPDYMTTGITYMLPKDQDDPNNPAKYRPITCLQSLYKIITSCLSHLIYKHTTKNNILAEQQKGCRKYSQECKEQITIDAIILKQVQQYKTSLFSMYIDYKKAYDSMPHTWLMKVLEIYKIHPVIISFLRNTMSNWSTSLKLSSSNHDIETGNIKIQRGIFQGDTLSPLWFCLALNPLSNLLNKSKIGYTFKNSCNLGENEQIPLLNHLLYMDDIKLYASTEQDLYQLAETTECFSQDIGMEFGIDKCKINSIISGKPFQHHYDTSAGQRIEPLDEHETYKYLGCQQSKNIHHKEIKLKLKQQIKHRLNAILKSHLYSKNIIKVINSYAIPVLTYSFGLINWSKSDLKQLQRIVNTTMTLHRKHHPRSCTQRLTLPRGDGGRGLIDIHNLHNKQISNLRAYFLHGTSLIHRTIVLNDNKYTPLNLQDLATQKNEAQITRQTKLTEWSRKSLHGRHYHDLNLPYVDKYASNEWLRRGQLFPETEGFMLAIQDQVIETRNYRKYIMKLPNTQDTCRRCNSGAETIQHVTGACRAIVQTDYKHRHDQVANIIHQKLAHKYNLISSPPTPYYKYTPQTVLDNSSYKLYYDRAILTDRTVHNNRPDITLLNKHNKTATLIDIAIPNTHNLQTTISEKLRKYVDLKDEITRMWNLRKVTIVPIVISTTGVIPQSLQESLKSIDLPKLTYINLQKAVILNTCRIVRKFLQNDSTSSDQISTQTTRADVDLA

SEQ ID NO: 181 - protein, 981 aa, Emmelina monodactyla
MRRAHPVEANVLSAPPKETKRRWRDEELAILAKTEAGLAPGVGSHINQQLFNGLPGFGRTLEAIKGVRRKDSYKTLVSQYRSELALTTQSVNMHTQDIVIEDVCEAPEQVVEAGPDPLLLIEVVDAPPNLESYSGDRIVAELLARVAARKQPVDSRRRRLRRSKTNDTNKTPLNSRAKRRREYARVQELYRKNPSRAAAEIIDGQCRRTNHGIQDMDSFWRPILETVEEVSGPTPKALEAQKLQVAEGSPVDFSELWKPITEDEVKASRVDKRSAPGPDGVRAEDWRGVPNASKTEIFNHWMRTGVPEQFKQCRTIFVPKTDEPVGPGEYRPITIASVPLRHMHSILARRLDRCCPPDARQRGFVRADGTLENSAVLDAVLGDCRKKLRECHVAVLDFSKAFDTVSHAALIRLLRARGMPEAFCNYVATIYETASTTLAANGDTSDTPVKIGRGVRQGDPLSPWLFNFVMDLILASLPKEVGYRLENERVSALAYADDLVLVSGSRCGMQQVLDVVGEIAASMGLRLNIGKCSVLSMVPDGKRKKVHYLEGRHFRVNRKWLKQINCVERFRYLGVDFDVAGVCQMEHSIKVALRNITKAPLKPQQRLELVRTYLVPRFLHGLVLGNITDQRLRALDVQIRSVIRVWLRLPMDVPTAYFHASAKDGGLAIPSLRTMVPELIVKRFGRLESSQWSAARAASRSERVVRKLKWARKLSSKFIREHPVTGTESAAKFWREELYASVDEFELRESNKTPESTKWLRHRSERLTGRDFVQFVHTHINALPSRVRNTRGRRDGGAEVNCRAGCMVRETTAHIIQQCHRTHGGRIQRHNYVAARLASHMSREGWTVIEEPTIKTAAGLRKPDVIARKGDVGVIVDVQVVSGQRPLDVAHREKRNKYANHEELVELVAVRLGLPGSGFVRTTTCTLSWRGIWSPKYLLEIKELFGPKSNYWEMFPFWVLNGSHMNWSRFNQLTSQARTSN

SEQ ID NO: 182 - protein, 959 aa, Scirpophaga incertulas
MAKTEAGLDPVGINVNQELHRVLSGFGRTLDAIKGARRKDSYKALVLQLRQQLQHQESTPDNVEQATDGMQVIPDEPEPVEAGSDPTDCVDLEPVSDVMEEEPVVSAYDEIVASLLAKVAARKARGTPGSGRGRHGGRNKINYLKARPSNAKMRRRIEYARVQELFRKNPGRAAAEIISGQCLKSAHGLEEMEAYWRPILESAETVEGPTPKAMKALRRAMIEGSPADYSKLWEPITTDEVKQSRVGNGSAPGPDGICAEDWREIPAARKAEIFNSWMLAGVPHDLSQCRTIFVPKKDVPAGPGEYRPITIASIPLRQMHSILARRLLRCCPLDVRQRGFIRADGALENSAVLDAVLGDSRDKLRECHVAVLDFAKAFDTVSHDALIRLLRERGLPGPFCDYVAKTYETAHTTLAVNRLSSDIPVKIGRGVRQGDPLSPVLFNMVMDLVLASLPKEVGYRLDNERVSALAFADDLVLVSGSKIGMQEVLNVVTEVAATMGLRLNASKSSVLSMVPNGKHKKTHYLSGRHFKIDRKWLRQIDCVERWRYLGIDFDAAGVVRIEHSLKVALDNITKAPLKPQQRLEIVRTFLVPKFLHGLVLGNITDGRLRTIDVQIRSAIRSWLRLPADIPTAYFHASVKDGGLAIPSLRTTIPELIERRFGRLGSSGWSAARAASKSKRIIQKLKWARKLSAKFIREHPVNGTRSAAQYWRETLHASVDGFELRESKHTPDSTKWIRERCMRYSGRDYVQFVHTHINALPSRIRNTRGRRDGGMELNCRAGCMVKETTAHTIQQCHRTHGARIERHNCVASRLASEIGREGWTVIEEPKIRTRLGLRKPDIIATKGGVGVIVDVQIVSGQRSLDESHHVKRSKYADHEELVKLVADRLGLSDAGLVKTTSCTLSWRGVWSRQSLTDIKELFRLKNFGSGDIPGLVLKGSHMCWSRFNHSTLTSQARLPD

SEQ ID NO: 183 - protein, 1082 aa, Emmelina monodactyla
MSLRSQDKFMVTFGWGLATNHGRTLVAGLQPVTVGKKLATDKNLEKMNPRPSGLPLELEVAKISRSDAQVGVQTDSGSSPARTCQVCGRSFRTKIGLGVHMRRAHPVEANVLSAPPKETKRRWRDEELAILAKTEAGLAPGCGSHINQDLFNALPGFGRTLEAIKGVRRKDSYKALVSQYRSELALTTQSVNMHTQDLIIEDVCEAPEQVVEAGPDPMLLIETVDAPPNLESYSGDRIVAELLARVAARKQPGDSRRRRLRRSKTNNVISKTPLNSRAKRRREYARVQELYRKNPSRAAAEIIDGQCRRTNHGIQDMDSFWRPILETVEEVSGPTPKALEAQKLQVTEGSPVDFSELWKPITEDEVKASRVDKRSAPGPDGVRAEDWREVPNASKSEIFNHWMRTGVPEQFKQCRTIFVPKTDEPVGPGEYRPITIASVPLRHLHSILARRLDRCCPPDARQRGFVRADGTLENSAVLDAVLGDCRKKLRECHVAVLDFSKAFDTVSHAALIRLLRDRGMPEAFCNYVANIYETASTTLAANGETSDTPVKIGRGVRQGDPLSPWLFNFVMDLILASLPKEVGYRLENERVSALAYADDLVLVSGSRCGMQQVLDVVGEIAASMGLRLNIGKCSVLSMVPDGKRKKVHYLEGRHFRVNRKWLKQINCVERFRYLGVDFDVAGVCQMEHSIKVALQNITKAPLKPQQRLELVRTYLVPRFLHGLVLGNITDQRLRALDVQIRSVIRVWLRLPMDVPTAYFHASAKDGGLAIPSLRTMVPELIVKRFGRLESSQWSAARAASRSERVVRKLKWARKLSSKFIREHPVTGTESAAKFWRDELYASVDGFELRESNKTPESTKWLRHRSERLTGRDFVQFVHTHINALPSRVRNTRGRRDGGAEVNCRAGCMVRETTAHIIQQCHRTHGGRIQRHNYVAARLASHMSREGWTVVEEPKFKTAAGLRKPDVIARKGDVGVIVDAQVVSGQRPLDVAHREKRNKYANHEELVEMVAVRLGLPGSGCVRTTTCTLSWRGIWSPKSLSEIKELFGPKSNYWEMFPFWVLNGSHMNWSRFNQLTSQARTSN

SEQ ID NO: 184 - protein, 982 aa, Emmelina monodactyla
MRRAHPVEANVLSAPPKETKRRWRDEELAILAKTEAGLAPGVGSHINQQLFNGLPGFGRTLEAIKGVRRKDSYKALVSQYRSELALTTQSVNMHTQDVIIEDVCEAPEQVVEAGPDPLLLIEVVDAPPNLESYSGDRIVAELLARVAARKQPGDSRRRRLRHSKTNNVISKTPLNSRAKRRREYARVQELYRKNPSRAAAEIIDGQCRRTNHGIQDMDSFWRPILETVEEVSGPTPKALEAQKLQVAEGSPVDFSELWKPITEDEVKASRVDKRSAPGPDGVRAEDWRGVPNASKTEIFNHWMRTGVPEQFKQCRTIFVPKTDEPVGPGEYRPITIASVPLRHMHSILARRLDRCCPPDARQRGFVRADGTLENSAVLDAVLGDCRKKLRECHVAVLDFSKAFDTVSHAALIRLLRARGMPEAFCNYVASIYETASTTLAANGDTSDTPVKIGRGVRQGDPLSPWLFNFVMDLILASLPKEVGYRLENERVSALAYADDLVLVSGSRCGMQQVLDVVGEIAASMGLRLNIGKCSVLSMVPDGKRKKVHYLEGRHFRVNRKWLKQINCVERFRYLGVDFDVAGVCQMEHSIKVALRNITKAPLKPQQRLELVRTYLVPRFLHGLVLGNITDQRLRALDVQIRSVIRVWLRLPMDVPTAYFHASAKDGGLAIPSLRTMVPELIVKRFGRLESSQWSAARAASRSERVVRKLKWARKLSSKFIREHPVTGTESAAKFWREELYASVDGFELRESNKTPESTKWLRHRSERLTGRDFVQFVHTHINALPSRVRNTRGRRDGGAEVNCRAGCMVRETTAHIIQQCHRTHGGRIQRHNYVAARLASHMSREGWTVIEEPKIKTAAGLRKPDVIARKGDVGVIVDVQVVSGQRPLDVAHREKRNKYANHEELVELVAVRLGLPGSGFVRTTTCTLSWRGIWSPKSLLEIKELFGPKSNYWEMFPFWVLNGSHMNWSRFNQLTSQARTSN

SEQ ID NO: 185 - protein, 878 aa, Emmelina monodactyla
MRRAHPMEANVLSAPPKETKRRWRDEELAILAKTEAGLAPGGGSHINQQLFNGLPGFGRTLEAIKGVRRKDSYKALVSQYRSELALTTQSVNMHTQNIIIEDVCEAPEQVVEAGPDPLLVIEAVDAPPNLESYSGDRIVAELLARVAARKQPGDSRRRRLRRSKTNVISKTPLNSRAKRRREYATVQELYRKNPSRRTNHGIQDMDSYWRPILETVEEVPGPTPKALEAQKLQVAEGSPVDFSELWKPITEDEVKASRVDKRSASGPDGVRAEDWRGVPNASKSEIFNHWMRTGVPEQFKQCRTIFVPKTDEPVGPGEYRPITIASVPLRHMHSILARRLDRCCPPDARQRGFVRADGTLENSAVLDAVLGDCRKKLRECHVAVLDFSKAFDTVSHAALIRLLRARGMPEAFCNYVANIYETASTTLAANGDTSDTPVKIGRGVRQGDPLSPWLFNFIMDLILASLPKEVGYRLENERVSALAYADDLVLVSGSRCGMQPVLDVVGEIAASMGFRLNIGKCSVLSMVPDGKRKKVHYLEGRHFRVNRKWLKQINCVERFRYLGVDFDVAGVCQMEHSIKVALRNITKAPLKPQQRLELVRTYPVPRFLHGLVLGNITDQRLRALDVQIRSVIRVWLRLPMDVPTAYFHASAKDGGLANPSLRTMVPELIVKRFGRLESSQWSAARAASRSERVARKLKWARKLSNKFVREHPVTATESAAKFWREELYASVDGFELRESNKTPVSTKWLRHRSERLTGRDFVQFVHTHINALPSRVRNTQGRRDGGAEVNCRAGCMVRETTAHIIQQCHRTHGGRIQRHNYVAARLASHMSREGWTVFEEPKFKTAAGLRKPDVVARKGDVGVSILGSEWIAHELVKV

SEQ ID NO: 186 - protein, 1340 aa, Emmelina monodactyla
MKSQFKKYNLRPLPGGRRGVSGADAGYLSMRTVGDGGLSRRVPLEQNTTADTDSHSFPPSSPNSLFPSPSSSPHPFSLISSPQSSVSSSMSDDAVQEACANNFAPVAGTTRARKKWSEAMNRFIWRTYLIVTKLETNTKGYLEPLYQLFNEKFPDMEATKNRVGCQRRAILNNKLLKQEILDEIKSEVAITLQTDTNYHDNPIPSITTTSQRMHWSDEINESILKIYYEVTDLETNLTAYRTKLYQSFVGQYPHLSHLSEQRIADQRRAIVHNKLLSLTKIKQIRDSIHINENVETYTHTNSNLIPSNSHVTVEITAPRYDTAITTDIPESNEVDLPPELKEHLNRLFEETVEKFTNTNPTSRPPIPKLKVSYKLNNTLKYINSSLLPNYITPDSEFEAVQLIIYCAAHVTATICGAQMRNSQNKRPQSNYIPPWQRRLQNKIEELRVHIGKVTEYSRGNHSHRLTKHLEKIKYKYLVHSRHENNNIDLTHFLDTLKQKLNVLVSRLRRYKQTSLRKKENKLFNNNEKGFYRKMCCQNQTNFSSNSVVPTPDDLSLFWSNIWSKPVNHTDADWMLEYQQSLCSLPSMHFNKVNLDMLKSIIAKTHSWKAAGSDKIQNFWYKKLTYTHEILLHHINNFIEQPETLPLYITEGQTYMIPKDKTDTSNPAKYRPITCLQNIYKIITACISELITRHVEENGILAEEQKGCRRRTQGCKEQLIIDNVVSRQAFRSKRNIYSMYIDYQKAFDSVPHSWLIKILNFYRIHPTIVKFLENTMQIWRTKLKIYTHNSTVSTDPIHIRRGIFQGDALSPLWFCLALNPLSYLLNNTESGFKIKHENNFQKITHLMYMDDIKLFGSNLNELNSLADITQIFSDDIKMSFGIDKCKIQSINKGKIEENIYSLPNQQQIDPVNPIEGYKYLGFYQTQQIHQKQAKQTLTQNFKNRLHQILNTQLSSRNTFKAINSFAIPVLTYSFGIIQWSQTDLKKLQRTINVLLTKYRKHHPRSCTQRMTLPRHEGGRGLIDLQNLHNKQILTLRKYFYSKHNSSIHRAIVNADIKLTPLNLKNTTFLPKLSKIQEKIQQWAEKSLHGRHRADLTNTVVDKIASNAWLKKGELFPETEGFMVSIQDQVVDTKNYRKHIIRDPNMHSDFCRKCHTSPETIQHITGACKALAQTDYKHRHDQIAAIIHQHLAHKHQLITEKVPYYKYVPDIVIDTELFKIYWDRTILTDKTIACNRPDITFHDKTNKIVYLIDIAVPNTHNLQSTHSEKNSKYIDLSIEIKRQWRVDTVKTVPIVISSTGVIPKTLHASLKLLSMPPGTFTLLQKAAIMNTCRIVRKFLSLD

SEQ ID NO: 187 - protein, 2021 aa, Lasioglossum morio
MAGPSTSPVTIYIEFPFPGEFRCPECFGKPGIKLSGVYKTHNDLIKHAKKHHPGHIVIHRCGVCGEHGTGAFPLRYVKAHHTAAHTDRPRPNRCGRGGAYVIPLTTAAPTTVRSPSSTTSTNFSGRGRPESILRDANGAGTTIVTTTSTTTPTTTTPTTTTTADGLRPAATTVTSGGAHPPSPSGPAAVPTTRTAATSTISTTTTTTTSTTTRRTASSSLRQQKLSFGPAAAGRGVTTETNTATETRQTLPPTSTATSRARAVVATSRTSTTPPPPRVMTRTRSATALASAASLRKSTTPPPPPAPTRKRTTATRTSNTPPTSTATTRAAAASKAPLRKSTTPPPPPPPTRRRNEVGRPSTTPPPSTAASRPAAAAPSRAPLRKSTTPPPPPAPTTRTRTATTTATVATTKKLPSPSTTSTKTTTTTTTKRGGATDKRLESVSGSTPPGTRAAPAANRRAGPGAVQRTSPSLPTRKSTPSSPPTLSNSGPARRTRGSTVSPKTKAPPTSPRGPVTRSRGASVPVELESVKRRTAALTTTTTRRKAAPKPGTKRSPRGVGKREEACAPTNPSNPTLHPDSSPRLFTSVIRTAASPTYAAVTAGATVVSATPPGDQGAIRRQRSMTPISPESPAATPSSLALTTILRALSTSPCSPPTIHGEQAGARGCCVVSCVAVATLTTTTVTTTVSGGSIMTSRPLAGGGERGAKKAWPVPAIPSLPPIEEVTVSPGPARTASSPSPPAIEEREEEGGEEEDDSPLPWQSAASRRRRRRQRALSSSPSSPSFSMPLSRSPNPETSLQRTTPTRRPSAEDIRTPEPPRRPPARAQRPPTPPPAPAVTRATRGATTTNTITATTTTAAPRVRNQPPPSRQQRRGAQRGTTAGDGRNSRSGSSRAPGDAARVDRSRDLRDLLFRMGGYASRFRSMGGNNPGRSSQGGSTTGATVTAGRTNAPSGVVRVPATPQLPRDPEHRRPTPVGLPNPRPRASLRREQAALATERGLLIDLAEAVDNPQDLEEVATQIAAFFKRFGSQPAGVGGRTGGRPTTNARERGRVVNTPVTGPSGRHEGVTPRGTDQVREATRIQRLFRQNRRRAVQEVLMGAPAQCQVPKDQVTEHFRNMYSPASTPPASGPLGFPSEAPTASSDAALVQPFGVSEVDRRLRRMSNSAPGPDGLSYRDLRKADPSCSILTALFNMIRRLESVPSSWKSSNTVLIHKKGDRMDLSNWRPLAMSDTTPKLFAAVLADRLVSWALQNGRLSPQQKGFLPCEGCYEHNYTLQEILNDARRGKSQVVVAWLDLSNAFGSIPHSTIYHAFAEAQVPLPFRNIVEGLYDGCTTRVRTSQGFTDPVPILSGVKQGCPLSPVAFNLALEPVLRAASGTSVGYTLHGRRYNILAYADDLVLIADTPGGMDTLLSTVEAAAGGVGLRFNPAKCATLHQDSRGSRRAVPTCFSLQGQGLKSLAAGVPYEHLGVPTGFQVKQTPLLSIEELIRDLHAVDRSLLAPWQKCETVGSFILPRLDFLLRGAHVEKGPLKVADKLVRKLAKSWLNLPERASAEVVYLPPSRGGCGLLPLADLADALVIGHAYRLLTAPDPAISGLARDSLREAVARKIGRTPTDLDLATYLSGSLEGEFARTSWDFSTLWSRARNAARRSSNSLQLRWEWCAERQELGIRLRGSRGRTTVVTPVARSQVLHRLRSAVTEFYSHRLGSKPDQGKVFGVSSRTKVSNHFLRGGSFTRFADWRFIHRARLDVLPLNGARRWGEGDKRCRRCGENMETLPHVLCHCRPHSAAWQLRHDAVVSRIARACRLPGTLSVNQRVEGLTGDLEALRPDIVVRHEPSKSVVIIDVTVTFENGIEAFHAARGRKISKYLPIGAALEERGYRVVTDAIVVGALGSWDRDNESVLKLLRIGKKYAGLMRRLIVSETIRWGRDIYVEHVSGVRQYAAAPAAVPPVDSTLPPLAVNVASPLALLPRSCENNIAPRNHIVDEAIGHEARTSTQGPSGPVQYFYISLRIYFILSYLII

SEQ ID NO: 188 - protein, 2007 aa, Lasioglossum morio
MAGPSNSPLTIYIEFPFPGDFRCPECFGKPGIKLSGVYKTHNDLVKHAKKHHPGHIVIHRCGVCGEHGTGSFPLRYVKAHHLAAHTDGPRPNRCGRGGAYVIPLTTAAPTTVRSSLSTTSTNFSGRGRPESILRDASGAGTTIVTTTSTTTPTTTTPTTTTTADGLRPAATTSPISGGAHIPPPSGPAAVPTTRTAATSTTSTNTTTTTSTTTRRTASSSLTQQRLPFGPSTAGRGATTGTKQTTKTRQTLPPTSTATSRARAVVATSRTSTTPPPPRVMTRTRSATALASAASLRKSTTPPPPPAPTRKRTTATRTSNTPPTSTATTRAAAASKAPLRKSTTPPPPPPPTRRRNEVGRPSTTPPPSTAASRPAAAAASGAPLRKSTTPPPPPAPTTRTRTATTSATVATTKKLPSPSTTSTRTTTTTTTKRGGATDKRLESVSGSTPPGTRAAPAANRRAGPGAVQRTSPSLPTRKSTPSSPPTLSNSGPARRTRGSTVSPKTKAPPTSPRGPITRSRGASVPVELESVKRRTAALTTTTTRRKAAPKPGTKRSPRGVGKREEACAPTNPSNPTLHPDSSPRLFTSVIRTAASPTYAAVTAGATVVTAAPPGDHNEGRRLRSMARASSLPPESSAAMPSSPPLTAILRALSASPCSPPTIHGEEEGARDGCVVPCVAPATLTTTTVTTTVSGGSIMTSRPLAGGGERGAKKAWPVPAIPSLPPIEEVTVSPGPARTASSPSPPTIEEREEEGGEEEDDSPLPWQSAASRRRRRRQRALSSSPSSPSLSMPLSRSPNPETSLQRTTPTRRPSAEDVRTPEPPRRPPARAQRPLTPPPAPAVTRASRGATTTNTITATTTTAAPRVRDQPPSSRQQRRGAQRGTTAGDGRSSRPVSSRAPGDAARVDRSRDLRDLLFRMGGYASRFRSMGGNNPGRSSQGGSTTGATVPAGRTNAPSGVVRVPTTPQLPRDSEHRRPTPVGQPNPRPRASLRREQAALATERGLLIDLAEAVDNPQDLEEVATQIAAFFKRFGSQPAGVGGRTGGRPTTNARERGRVVNTPVTGPSGRHEGVTPRGTDQVREATRIQRLFRQNRRRAVQEVLMGAPAQCQVPKDQVTEHFRNMYSPASTPPASGPLGFPSEAPTASSDAALVEPFGVSEVDRRLRRMSNSAPGPDGLSYRDLRKADPSCSILTAYFNMIRRLESVPSSWKSSNTVLIHKKGDRMDLSNWRPLAMSDTTPKLFAAVLADRLVSWALHNGRLSPQQKGFLPCEGCYEHNYTLQEILNDARRGKSQVVVAWLDLSNAFGSIPHSTIYHAFAEAQVPLPFRNIVEGLYDGCTTRVRTSQGFTDPVPILSGVKQGCPLSPVAFNLALEPVLRAASGTSVGYTLHGRRYNILAYADDLVLIADTPGGMDTLLSTVEAAAGGVGLRFNPAKCATLHQDSRGSRRAVPTCFSLQGQGLKSLAAGVPYEHLGVPTGFQVKQTPLLSIEELIRDLHAVDRSLLAPWQKCETVGSFILPRLDFLLRGAHVEKGPLKVADKLVRKLAKSWLNLPERASAEVVYLPPSRGGCGLLPLADLADALVIGHAYRLLTAPDPAISGLARDSLREAVARKIGRPPTDLDLATYLSGSLEGEFARTSWDFSTLWSRARNAARRSSNSLQLRWEWCAERQELGIRLRGSRGRTTVVTPVARSQVLHRLRSAVTEFYSHRLGSKPDQGKVFGVSSRTKVSNHFLRGGSFTRFADWRFIHRARLDVLPLNGARRWGEGDKRCRRCGENMETLPHVLCHCRPHSAAWQLRHDAVVSRIARACRLPGTLRVNQRVEGLTGDLEALRPDIVVRHEPSKSVVIIDVTVTFENGIEAFHAARGRKISKYLPIGAALEEQGYRVVTDAIVVGALGSWDRDNESVLKLLRIGKKYAGLMRRLIVSETIRWGRDIYVEHVSGVRQYAAAPAAVPPVDITLPPPAVIVASPLALLPRTSESNIAPRNNTCDVDIGHEARTSTQGPSGPV

SEQ ID NO: 189 - protein, 2006 aa, Lasioglossum morio
MAGPTSSPITIYIEFPFPGEFRCPECFGKPGIKLSGVYKTHNDLIKHAKKHHPGHIVIHRCGVCGEHGTGAFPLRYVKAHHTAAHTDRPRPNRCGRGGAYVIPLTTAAPTIARSSLSTTSTDFSGRGRPESILRDASGAGPTIVITTSTTTPTTTTPTTTTTADGLRPAATTVTSGGAPSPPTSPAAVPTTRTAVTSTRSTTTTTTSTTTRRTASSSLTQQRLPFGPSTAGRGATTGTKQATKTRQTTLTTTTATSRARAAVATSRTSTTPPPSQATLRTRSATAAAPAASLRKSTTPPPPPAPTRTRTSVTRTSTTPPPSTATTRTRTAAAAASKAPLRKSTTPPPPPPPTRRRTEAGRPSTTPPTSKATSGTKPAAAAAPRAPPRKSTTPPATSRMRTATPPATVATSKLPSPPTTTTRTTATTTTKRGGATRRSDEVVSGSTPPGTRAAPAASRRAGPGAVQRTSPSLPTRKSTPSSPPTLSNSGPARRTRGSTVSPKTKAPPTSPRGPVTRSRGASVPVELESVKRRTAALTTTTTRRKAAPKPGTKRSPRGVGKRDGPCAPTNPSNPTLHPDSSPRLFTSVIRTAASPTYAAVTAGATVVTAAPPGDHTEGRRLRSMSRASSLPPESSTAMPSSPPLTAILRALSTSPCSPPTIHGEEEGARDGCVVPCVAPATLTTTTVTTTVSGGSIMTSRPLAGGGERGAKKAWPVPAIPSLPPIEEVTVSPGPARTASSPSPPTIEEREEEGGVEEDDSPLPWQSAASRRRRRRQRALSSSPSSPSLSMPLSRSPNLETSLQRTTPTRRPSAEDVRTPEPPRRPPARAQRPPTPPPAPAAPRASRGATTTTITATTTTTAAPRVRNQPPPSRQQRRGAQRGTTAGDGRNSRSGSSRAPGDAARVDRSRDLRDLLFRMGGYASRFRSMGGNNPGRSNQGGSTTGATVPAGRTNAPSGVVRVPTTPQLPRDSEHRRPTPVGQPNPRPRASLRREQAALATERGLLIDLAEAVDNLQDLEEVATQIAAFFKRFGSQPAGVGGRTGGRPTTNARERGRVVNTPVTGPSGRHEGVTPRGTDQVREATRIQRLFRQNRRRAVQEVLMGAPAQCQVPKDQVTEHFRNMYSPASTPPASGPLGFPSEAPTASSDAALVQPFGVSEVDRRLRRMSNSAPGPDGLSYRDLRKADPSCSILTACFNMIRRLESVPSSWKSSNTVLIHKKGDRMDLSNWRPLAMSDTTPKLFAAVLADRLVSWALQNGRLSPQQKGFLPCEGCYEHNYTLQEILNDARRGRSQVVVAWLDLSNAFGSIPHSTIYHAFAEAQVPLPFRNIVEGLYDGCTTRVRTSQGFTDPVPILSGVKQGCPLSPVAFNLALEPVLRAASGTSVGYTLHGRRYNILAYADDLVLIADTPGGMDTLLNTVEAAAGGVGLRFNPAKCATLHQDSRGSRRAVPTCFSLQGQGLKSLAAGVPYEHLGVPTGFQVKQTPLLSIEELIRDLHAVDRSLLAPWQKCETVGSFILPRLDFLLRGAHVEKGPLKTADKLVRKLAKSWLNLPERASAEVVYLPPSRGGCGLLPLADLADALVIGHAFRLLTTPDPAISGLARDSLREAVARKIGRTPTDQDLATYLSGSLEGEFARTSWDFSTLWSRARNAARRSSESLQLRWEWCAARQELGIRLRGSRGRTTVVTPVARSQVLHRLRSAVTEYYSHRLDSKPDQGKVFGVSSRTKVSNHFLRGGSFTRFADWRFVHRARLNVLPLNGARRWGEGDKRCRRCGENLETLPHVICHCRPHSAAWQLRHDAVVSRIARACRLPGTLRVNQRVEGLTDDLEALRPDIVVRHEPSKSVVIIDVTVTFENGIEAFHAARERKISKYLPIGAVLEEQGYRVVTDAIVVGALGSWDRANEPVLKLLRIGKKYAGLMRRLIVSETIRWGRDIYVEHVSGVRQYAAAPAAVPPVDTTLPPPAVIMASPLALLPRSTESTIAPRLTNDSDTDLGHAARNMTQGPSDPV

SEQ ID NO: 190 - protein, 1998 aa, Lasioglossum morio
MAGPSTSPLTIYIEFPFPGDFRCPECFGKPGIKLSGVYKTHNDLIKHAKKHHPGHVVVHRCGVCGEHGTGAFPLRYVKAHHLAAHTDGPRPNRCGRGGAYVIPLTTAAPTTVRSSGSTTSTNSSGRGRPESILRSANGAGPTVVPTIATTTTATTTTTTTTASGLRPPAVTTATSGGAPPPSTSPAAAPTTRAAATSTTTTTSTTATRPTSSSLRQQRLPFGPATAGRGATTGTVTMTRTRQTPPTTATATSRAKAVVATSRTSTTPPPTSATSRAGPRTAAAPTASLRKSTTPPPPPATTRTRTTASRTSTTPPPSTATARTGTATAAASRASVRKSTTPPPPPPPTRRRTTAARTSTTPPPSSATSRAKQAAAAAPRAPLRKSTTPPPPPATSRTRKATTAAKVATRELPSPPTTTATATTTTRRGGVTGKSLETVSGSTPPGSRAAPAANKRAGSGAVQRASPSPPTRRSTPSSPPTQSNSGPARRTRGSTVSPRTKAPPTSPRGPITRSRGASVPVELESAKKRTAALNATRRKTAPTSGSKRSPRGVGKRDGPCAPTNPSNPTLHPDSSPRLFTSVIRTAASPTYAAVTAGATVVTAAPPGDQTEVRRLRSMTRASSLPPESPIATPSSPTLNTILRALSTSPCSPPSTLGEQEGARGCCVVSCVAPATLTTTTVTTTVSGGSIMTSRPLAGGGERGAKRAWLVPAIPSLPPIEEVTVSPGPARTASSPSPPAIEEREEEGGEEDDSPLPWQSAASRRRRRQLRVLSLSPTSPSVSLPPSRSSYPETSPQEARTSPRRPSTEDVRTPEPIRRTPARAQRPHTPPPAPDANRATRGVTTINTITATTTSVAPRVRNQPPPSRQQRRGAQRGTTAGDGRSSRPVSSRAPGDAARVDRSRDLRDLLFRMGGYASRFRSMGGNNPGRSSQGGSTTGATVPAGRTNAPSGVVRVPTTPQLPRDSEHRRPTPVGQPNPRPRASLRREQAALATERGLLIDLAEAVDNPQDLEEVATQIAAFFKRFGSQPAGVGGRTGGRPTTNARERGRVVNTPVTGPSGRHEGVTPRGTDQVREATRIQRLFRQNRRRAVQEVLMGAPAQCQVPKDQVTEHFRNMYSPASTPPASGPLGFPSEAPTASSDAALIQPFGVSEVDRRLRRMSNSAPGPDGLSYRDLRKADPSCSILTALFNMIRRLESVPSSWKSSNTVLIHKKGDRMDLSNWRPLAMSDTTPKLFAAVLADRLVSWALQNGRLSPQQKGFLPCEGCYEHNYTLQEILNDARRGRSQVVVAWLDLSNAFGSIPHSTIYHAFAEAQVPLPFRSIVEGLYDGCTTRVRTSQGFTDPVPILSGVKQGCPLSPVAFNLALEPVLRAASGTSVGYTLHGRRYNILAYADDLVLIADTPGGMETLLNTVEAAAGGVGLRFNPAKCATLHQDSRGSRRAVPTCFSLQGQGLKSLAAGVPYEHLGVPTGFQVKQTPLLSIEELIRDLHAVDRSLLAPWQKCETVGSFILPRLDFLLRGAHVEKGPLKTADKLVRKLAKSWLNLPERASAEVVYLPPSRGGCGLLPLADLADALVIGHAYRLLTAPDPAISGLARDSLREAVARKIGRPPTDLDLATYLSGSLEGEFARTSWDFSTLWSRARNAARRSSESLQLRWEWCAARQELGIRLRGSRGRTTVVTPVARSQVLHRLRSAVTEFYSHRLVSKPDQGKVFGVSSRTRVSNHFLRGGSFTRFADWRFVHRARLNVLPLNGARRWGEGDKRCRRCGENLETLPHVICHCRPHSAAWQLRHDAVVSRIARACRLPGTLRVNQRVEGLTDDLEALRPDIVVRHEPSKSVVIIDVTVTFENGIEAFHAARGRKISKYLPIGAALEEQGYRVVTDAIVVGALGSWDQANEPVLKLLRIGKKYAGLMRRLIVSETIRWGRDIYVEHVSGVRQYAAAPAAVPPVDATFPPPAVTVTPLLAPLPRVIESIAPRTNSDNDIGHAAHTLTQGPSGPI

SEQ ID NO: 191 - protein, 1981 aa, Lasioglossum morio
MAGPTNSPITIYIEFPFPGEFRCPECYGKPGTRTSGVYKTHNDLVKHAKKCHPGHIVVHRCGVCGEHGTGSFPLRYVKAHHLAAHTDGPRPSRCGRGGAYVIPLTTAAPTTVRSSLSTTSTNFSGRGRPESILRDASGAGPIIVTTTSTTTPTTTTPTTTTTADGLRPAATTSSISGGAPPPPTSPAAVPTTRTAATTTSTTTTTTTSTTTRRTASSSLTQQRLPFGPSAAGRGATTGTKQATKTRQTTLTTSTATSRARAAVATSRTSTTPPPSQATLRTRSATAAAPAASLRKSTTPPPPPAPTRTRTSVTRTSTTPPPSTATTRTRTAAAAASKAPLRKSTTPPPPPPPTRRRTEAGRPSTTPPTSKATSGTKPAAAAAPRAPPRKSTTPPPPPATSRTRTATSTAKVATAKKLPSPPPTSTRTATTTTTKRGGVTNRSLETVSGSTPPGTRAAPAADRRAGSGAAQRASTSPPTRKSTPSSPPTLSNSGPARRTRGSTVSPRTKAPPTSPRGPITRSRGASVPVELESVKRRTAALNTTRRKAAPTSGSKRSPRGVGKRDGPCAPTNHSNPTLHPDSSPRSFTSVIRTAASPTYAAVTAGATVVTAAPPGDQTTLNTILRALSTSPCSPPTTSGEQAGARGCCVVSCVAVATLTTTTVTTTVSGGSIMISRPLAGGGERGAKRAWPVPAIPSLPPIEEVTVSPGPARAASSPSPTAIEEREEEGGEEEDDSPLPWMSAASRRRRRRQRALSSSPTSPSVSLPLSMSPNPETSLQRTTPTRRPSAEDVRTPEPPRRPPARAQRPPTPPPAPAVTRASRGATTTNTITATTTTTAAPRVREQPPSSRQQRRGAQRGTTAGDGRNSRSGSSRAPGDAARVDRSRDLRDLLFRMGGYASRFRSMGGNNPGRSNQSGSTTGATVPAGRTNAPPGVVRVPTTPQLPRDSGHRRPTPVGQPNPRPRASLRREQAALATERGLLIDLAEAVDNLQDLEEVATQIAAFFKRFGSQPAGVGGRTGGRPTTNARERGRVVNTPVTGPSGRHEGVTPRGTDQVREATRIQRLFRQNRRRAVQEVLMGAPAQCQVPKDQVTEHFRNMYSPASTPPASGPLGFPSEAPTASSDAALVQPFGVSEVDRRLRRMSNSAPGPDGLSYRDLRKADPSCSILTAYFNLIRRLESVPSSWKSSNTVLIHKKGDRMDLSNWRPLAMSDTTPKLFAAVLADRLVSWALQNGRLSPQQKGFLPCEGCYEHNYTLQEILNDARRGKSQVVVAWLDLSNAFGSIPHSTIYHAFAEAQVPLPFRNIVEGLYDGCTTRVRTSQGFTDPVPILSGVKQGCPLSPVAFNLALEPVLRAASGTSVGYTLHGRRYNILAYADDLVLIADTPGGMDTLLNTVEAAAGGVGLRFNPAKCATLHQDSRGTRRAVPTSFSLQGQALKSLAAGVPYEHLGVPTGFQVKQTPLLSIEELIRDLHAVDRSLLAPWQKCETVGSFILPRLDFLLRGAHVEKGPLKVADKLVRKLAKSWLNLPERASAEVVYLPPSRGGCGLLPLADLADALVIGHAYRLLTAPDPAISGLARDSLREAVARKIGRPPTDLDLATYLSGSLEGEFARTSWDFSTLWSRARNAARRSSNSLQLRWEWCAERQELGIRLRGSRGRTTVVTPVARSQVLHRLRSAVTEFYSHRLGSKPDQGKVFGVSSRTKVSNHFLRGGSFTRFADWRFIHRARLDVLPLNGARRWGEGDKRCRRCGENMETLPHVLCHCRPHSAAWQLRHDAVVSRIARACRLPGTLRVNQRVEGLTGDLEALRPDIVVRHEPSKSVVIIDVTVTFENGIEAFHAARGRKISKYLPIGAVLEGQGYRVVTDAIVVGALGSWDQDNESVLKLLRIGKKYAGLMRRLIVSETIRWGRDIYVEHVSGVRQYAAAPAAVPPVDTTLPPTAVTVTPPLAPLPRVIESIAPRAHSDSDIGHAARTLTQGPSGPI

SEQ ID NO: 192 - protein, 1244 aa, Lasioglossum morio
MSAASRRRRRRQRALSSSPTSPSVSLPLSRSPNPETSLQRTTPTRRPSAEDVRTPEPPRRPPARAQRPLTPPPAPAAPRALRGATTITITATTTTTAAPRVRNQPPPSRQQRRGAQRGTTAGDGRNSRSGSSRAPGDAARVDRSRDLRDLLFRMGGYASRFRSMGGNNPGRSNQGGSTTGATVPAGRTNAPLGVVRVPTTPQLTRDSEHRRPTPVDQPNPRPRASLRREQAALATERGLLIDLAEAVDNLQDLEEVATQIAAFFKRFGSQPAGVGGRTGGRPTTNARERGRVVNTPVTGPSGRHEGATPRGTDQVREATRIQRLFRQNRRRAVQEVLMGAPAQCQVPKDQVTEHFRNMYSPASTPPASGPLGFPSEAPTASSDAALVQPFGVSEVDRRLRRMSNSAPGPDGLSYRDLRKADPSCSILTALFNMIRRLESVPSSWKSSNTVLIHKKGDRMDLSNWRPLAMSDTTPKLFAAVLADRLVSWALQNGRLSPQQKGFLPCEGCYEHNYTLQEILNDARRGRSQVVVAWLDLSNAFGSIPHSTIYHAFAEAQVPLPFRNIVEGLYDGCTTRVRTSQGFTDPVPILSGVKQGCPLSPVAFNLALEPVLRAASGTSVGYTLHGRRYNILAYADDLVLIADTPGGMETLLNTVEAAAGGVGLRFNPAKCATLHQDSRGSRRAVPTCFSLQGQGLKSLAAGVPYEHLGVPTGFQVRQTPLLSIEELIRDLHAVDRSLLAPRQKCETVGSFILPRLDFLLRGAHVEKGPLKLADKLVRKLAKSWLNLPERASAEVVYLPPSRGGCGLLPLADLADALVIGHAYRLLTAPDPAISGLARDSLREAVATKIGRTPTDQDLATYLSGSLEGEFARTSWDFSTLWSRARNAARRSSESLQLRWEWCAARQELGIRLRGSRGRTTVVTPVARSQVLHRLRSAVTEYYSHRLDSKPDQGKVFGVSSRTKVSNHFLRGGNFTRFADWRFVHRARLNVLPLNGARRWGEGDKRCRRCGENLETLPHVMCHCRPHSAAWQLRHDAVVSRIARACRLPGTLRVNQRVEGLTGDLEALRPDIVVRHEPSKSVVIIDVTVTFENGIEAFHAAREKKIMKYLPIGAALEEQGYRVVTDAIVVGALGSWDQDNESVLNLLRIGKKYAGLMRRLIVSETIRWGRDIYVEHVSGVRQYAAAPAAVPPVDLTLPPPAVNVASPLALLPRTSESTIAPRAINDSVIDRGHVARTMTQGPSGPV

SEQ ID NO: 193 - protein, 1998 aa, Lasioglossum morio
MAGPSNSPITIYIEFPFPGDFRCPECFGKPGIKLSGVYKTHNDLVKHAKKHHPGHIVIHRCGVCGEHGTGAFPLRYVKAHHLAAHTDGPRPNRCGRGGAYVIPLTTAAPTTVRSSGSTTSTNSSGRGRPESILRSANGAGPTVVPTIATTTTATTTTTTTTASGLRPPAVTTATSGGAPPPSTSPAAAPTTRAAATSTTTTTSTTATRPTSSSLRQQRLPFGPATAGRGATTGTVTMTRTRQTPPTTATATSRAKAVVATSRTSTTPPPTSATSRAGPRTAAAPTASLRKSTAPPPPPATTRTRTTASRTSTTPPPSTATARTGTATAAASRASVRKSTTPPPPPPPTRRRTTAARTSTTPPPSSATSRAKQAAAAAPRAPLRKSTTPPPPPATSRTRKATTAAKVATRELPSPPTTTATATTTTRRGGVTGKSLETVSGSTPPGSRAAPAANKRAGSGAVQRASPSPPTRRSTPSSPPTQSNSGPARRTRGSTVSPRTKAPPTSPRGPITRSRGASVPVELESAKKRTAALNATRRKTAPTSGSKRSPRGVGKRDGPCAPTNPSNPTLHPDSSPRLFTSVIRTAASPTYAAVTAGATVVTAAPPGDQTEVRRLRSMTRASSLPPESPIATPSSPTLNTILRALSTSPCSPPSTLGEQEGARGCCVVSCVAPATLTTTTVTTTVSGGSIMTSRPLAGGGERGAKRAWLVPAIPSLPPIEEVTVSPGPARTASSPSPPAIEEREEEGGEEDDSPLPWQSAASRRRRRQLRVLSLSPTSPSVSLPPSRSSYPETSPQEARTSPRRPSTEDVRTPEPIRRTPARAQRPHTPPPAPDANRATRGVTTINTITATTTSVAPRVRNQPPPSRQQRRGAQRGTTAGDGRSSRPVSSRAPGDAARVDRSRDLRDLLFRMGGYASRFRSMGGNNPGRSSQGGSTTGATVPAGRTNAPSGVVRVPTTPQLPRDSEHRRPTPVGQPNPRPRASLRREQAALATERGLLIDLAEAVDNPQDLEEVATQIAAFFKRFGSQPAGVGGRTGGRPTTNARERGRVVNTPVTGPSGRHEGVTPRGTDQVREATRIQRLFRQNRRRAVQEVLMGAPAQCQVPKDQVTEHFRNMYSPASTPPASGPLGFPSEAPTASSDAALIQPFGVSEVDRRLRRMSNSAPGPDGLSYRDLRKADPSCSILTALFNMIRRLESVPSSWKSSNTVLIHKKGDRMDLSNWRPLAMSDTTPKLFAAVLADRLVSWALQNGRLSPQQKGFLPCEGCYEHNYTLQEILNDARRGRSQVVVAWLDLSNAFGSIPHSTIYHAFAEAQVPLPFRSIVEGLYDGCTTRVRTSQGFTDPVPILSGVKQGCPLSPVAFNLALEPVLRAASGTSVGYTLHGRRYNILAYADDLVLIADTPGGMETLLNTVEAAAGGVGLRFNPAKCATLHQDSRGSRRAVPTCLSLQGQGLKSLAAGVPYEHLGVPTGFQVKQTPLLSIEELIRDLHAVDRSLLAPWQKCETVGSFILPRLDFLLRGAHVEKGPLKTADKLVRKLAKSWLNLPERASAEVVYLPPSRGGCGLLPLADLADALVIGHAYRLLTAPDPAISGLARDSLREAVARKIGRPPTDLDLATYLSGSLEGEFARTSWDFSTLWSRARNAARRSSESLQLRWEWCAARQELGIRLRGSRGRTTVVTPVARSQVLHRLRSAVTEFYSHRLVSKPDQGKVFGVSSRTRVSNHFLRGGSFTRFADWRFVHRARLNVLPLNGARRWGEGDKRCRRCGENLETLPHVICHCRPHSAAWQLRHDAVVSRIARACRLPGTLRVNQRVEGLTDDLEALRPDIVVRHEPSKSVVIIDVTVTFENGIEAFHAARGRKISKYLPIGAALEEQGYRVVTDAIVVGALGSWDQANEPVLKLLRIGKKYAGLMRRLIVSETIRWGRDIYVEHVSGVRQYAAAPAAVPPVDATFPPPAVTVTPLLAPLPRVIESIAPRTNSDNDIGHAAHTLTQGPSGPI

SEQ ID NO: 194 - protein, 2001 aa, Lasioglossum morio
MAGPSTCPITIYIEFPFPGDFRCPECFGKPGIKLSGVYKTHNDLVKHAKKHHPGHIVIHRCGVCGEHGTGAFPLRYVKAHHTAAHTDRPRPNRCGRGGAYVIPLTTASTTVRSPSSTTSTNFSGRGRPESILRSANGAGPTVVPTIATTTTATTTTTTTTASGLRPPAVTTATSGGAPPPSTSPAAAPITRAAATSTTTTTSTTTTRPTSSSLRQQRLPFGPATAGRGATTGTVTVTRTRQTPPTTATATSRAKAVVATSRTSTTPPPASATLRAGPRTAAAPTASLRKSTTPPPPPATTRTRTTTSRTSTTPPPSTATARTRTATAAASKASVRKSTTPPPPPPPTRRKTAAARTSTTPPPSSATSRAKQAAAAAPRAPLRKSTTPPPPPAPTRRKTATTAAKVATRELPSPPTTTATATTTTRRGGVTGKSLETVSGSTPPGPRAAPAANKRAGSGAVQRASPSPPTRRSTPSSPPTQSNSGPARRTRGSTVSPRTKAPPTSPRGPITRSRGASVPVELESVKRRTAALNTTRRKAAPTSGLKRSPRGVGKRDGPCAPTNHSNPTLHPDSSPRLFTSVIRTAASPTYAAVTAGATVVTAAPPGDQTDVRRLRSMTRASSLPPESPIATPSSPTLNTILRALSTSPCSPPTTFGEQEGARGCCVVSCVALATLTTTTVTTTVSGGSIMTSRPLAGGGERGAKRAWPVPAIPSLPPIEEVTVSPGPARTASSPSPPAIEEREEEGGEEDDSPLPWQSAASRRRRRQLRVLSLSPTSPSVSLPPSRSSYPETSPQEARTSPRRPSTEDVRTPEPQRRPPARAQRPPTPPPAPAATRASRGATSTTTITATTTTTAAPRVRDQPPSSRQQRRGAQRGTTAGDGRSSRPVSSRTPGDAARVDRSRDLRDMLFRLGGFASRFRTMGGNNPGRSSQGGSTTGATVPAGRTNAPPGVVRVPTTPQLPRDSGHRRPTPVDQPNPRPRASLRREQAALATERGLLIDLAEAVDNLQDLEEVATQIAAFFKRFGSQPAGVGGRTGGRPTTNARERGRVVNTPVTGPSGRHEGVTPRGTDQVREATRIQRLFRQNRRRAVQEVLMGAPAQCQVPKDQVTEHFRNMYSPASTPPASGPLGFPSEAPTASSDAALVQPFGVSEVDRRLRRMSNSAPGPDGLSYRDLRKADPSCSILTAYFNMIRRLESVPSSWKSSNTVLIHKKGDRMDLSNWRPLAMSDTTPKLFAAVLADRLVSWALHNGRLSPQQKGFLPCEGCYEHNYTLQEILNDARRGRSQVVVAWLDLSNAFGSIPHSTIYHAFAEAQVPLPFRNIVEGLYDGCTTRVRTSQGFTDPVPILSGVKQGCPLSPVAFNLALEPVLRAASGTSVGYTLHGRRYNILAYADDLVLIADTPGGMDTLLSTVEAAAGGVGLRFNPAKCATLHQDSRGSRRAVPTCFSLQGQALKSLAAGVPYEHLGVPTGFQVKQTPLLSIEELIRDLHAVDRSLLAPWQKCETVGSFILPRLDFLLRGAHVEKGPLKVADKLVRKLAKSWLNLPERASAEVVYLPPSRGGCGLLPLADLADALVIGHAYRLLTAPDPAISGLARDSLREAVARKIGRPPTDLDLATYLSGSLEGEFARTSWDFSTLWSRARNAARRSSSSLQLRWEWCAERQEMGIRLRGSRGRTTVVTPVARSQVLHRLRSAVTEFYSHRLGSKPDQGKVFGVSSRTKVSNHFLRGGSFTRFADWRFIHRARLDVLPLNGARRWGEGDKRCRRCGENMETLPHVLCHCRPHSAAWQLRHDAVVSRIARACRLPGTLRVNQRVEGLTGDLEALRPDIVVRHEPSKSVVIIDVTVTFENGIEAFHAARGRKISKYLPIGAALEEQGYRVVTDAIVVGALGSWDRDNESVLKLLRIGKKYAGLMRRLIVSETIRWGRDIYVEHVSGVRQYAAAPAAVPPVDSTLPPPAVNVASPLAPLPRTDENCFAPREYIDSVTDIGHAARTMTQGPSGPV

SEQ ID NO: 195 - protein, 2009 aa, Lasioglossum morio
MDGPSTSPITIYIEFPFPGDFRCPECFGKPGIKLSGVYKTHNDLIKHAKKHHPGHVVVHRCGVCGEHGTGAFPLRYVKAHHTAAHTDRPRPNRCGRGGAYVIPLTTAAPTTVRSSLSTTSTNFSGRGRPESILRDASGAGPTIVTTTSTTTPTTTTPTTTTTADGLRPAATTVTSGGAPPPPTSPAAVPTTRTAATSTSTTTTTTTSTTTRRTASSSLTQQRLPFGPSTAGRGATTGTKQATKTRQTTLTTTTATSRARAAVATSRTSTTPPPSQATLRTRSATAAAPAAPLRKSTTPPPPPAPTRTRTSVTRTSTTPPPSTATTRTRTAAAAASKAPLRKSTTPPPPPPPTRRRTEAGRPSTTPPTSKATSGTKPAAAAAPRAPPRKSTTPPPPPATSRTRTATPPATVATSKLPSPPTTTTRTTATTTTKRGGATRRSDEVVSGSPPSGTRAAPAANRRAGPGAVQRTSPSLPTRKSNPSSPPTMSTSGPARRTRGSTVSPKTKAPPTSPRGPVTRSRGASVPVELESVKRRTAALTTTTTRRKAAPKPDTKRSPRGVGKREEACAPTNPSNPTLHPDSSPRLFTSVIRTAASPTYAAVTAGATVVTAAPPGDHTEGRRLRSMSRASSLPPESSTAMPSSPPLTAILRALSTSPCSPPTIHGEEEGARDGCVVPCVAPATLTTTTVTTTVSGGSIMTSRPLAGGERGAKRAWPVPAIPSLPPIEEVTVTPGPARAASSPSPPAIEEREEEGGEEEDDSPLPWQSAASRRRRRRQRALSSSPSSPSFSLPLSRSSIPETSPQDRTTPTRRPSAEDVRTPEPQRRPPARAQRPLTPPPAPAAPRASRGATTITITATTTTTAAPRVRNQPPPSRQQRRGAQRGTTAGDGRNSRSGSSRAPGDAARVDRSRDLRDLLFRMGGYASRFRSMGGNNPGRSNQGGSTTGATVPAGRTNAPPGVVRVPTTPQLPRDSGHRRPTPVGQPNPRPRASLRREQAALATERGLLIDLAEAVDNLQDLEEVATQIAAFFKRFGSQPAGVGGRTGGRPTTNARERGRVVNTPVTGPSGRHEGVTPRGTDQVREATRIQRLFRQNRRRAVQEVLMGAPAQCQVPKDQVTEHFRNMYSPASTPPASGPLGFPSEAPTASSDAALVQPFGVSEVDRRLRRMSNSAPGPDGLSYRDLRKADPSCSILTAYFNMIRRLESVPSSWKSSNTVLIHKKGDRMDLSNWRPLAMSDTTPKLFAAVLADRLVSWALHNGRLSPQQKGFLPCEGCYEHNYTLQEILNDARRGRSQVVVAWLDLSNAFGSIPHSTIYHAFAEAQVPLPFRNIVEGLYDGCTTRVRTSQGFTDPVPILSGVKQGCPLSPVAFNLALEPVLRAASGTSVGYTLHGRRYNILAYADDLVLIADTPGGMDTLLSTVEAAAGGVGLRFNPAKCATLHQDSRGTRRAVPTSFSLQDQALKSLAAGVPYEHLGVPTGFQVKQTPLLSIEELIRDLHAVDRSLLAPWQKCETVGSFILPRLDFLLRGAHVEKGPLKVADKLVRKLAKSWLNLPERASAEVVYLPPSRGGCGLLPLADLADALVIGHAYRLLTAPDPAISGLARDSLREAVARKIGRPPTDLDLATYLSGSLEGEFARTSWDFSTLWSRARNAARRSSNSLQLRWEWCAERQELGIRLRGSRGRTTVVTPVARSQVLHRLRSAVTEFYSHRLGSKPDQGKVFGVSSRTKVSNHFLRGGSFTRFADWRFVHRARLDVLPLNGARRWGEGDKRCRRCGENMETLPHVLCHCRPHSAAWQLRHDAVVSRIARACRLPGTLRVNQRVEGLIGDLEALRPDIVVRHEPSKSVVIIDVTVTFENGIEAFHAARGRKISKYLPIGAALEEQGYRVVTDAIVVGALGSWDQDNESVLKLLRIGKKYAGLMRRLIVSETIRWGRDIYVEHVSGVRQYAAAPAAVPPVDLTLPPPAVNVASPLALLPRTSESTIAPRAINDSVIDRGHAARTMTQGPSGPV

SEQ ID NO: 196 - protein, 2011 aa, Lasioglossum morio
MAGPSTSPLTIYIEFPFPGDFRCPECFGKPGIKLSGVYKTHNDLIKHAKKHHPGHVVVHRCGVCGEHGTGAFPLRYVKAHHLAAHTDGPRPNRCGRGGAYVIPLTTAAPTTVRSSLSTTSTNFSGRGRPESILRDASGAGPTIVITTSTMTPTTTTPTTTTTADGLRPAATTPSISGGAHPPSPSGPAAAPTTRAAATSTTSTSTTTTTSTTTRRTASSSLTQQRLPFGPSTAGRGATTGTKQATKTRQTTLTTSTATSRARAAVATSRTSTTPPPSQATLRTRSATAAAPVASLRKSTTPPPPPAPTRTRTSATRTSTTPPPSTATTRTRTATAAASKAPLRKSTTPPPPPPPTRRRTEAGRPSTTPPTSKATSGTKPAAAAAPRAPPRKSTTPPPPPATSRTRTATPPATVATSKLPSPPTTTTRTTATTTTKRGGATRRSDEVVSGSTPPGTRAAPAASRRAGPGAVQRTSPSLPTRKSTPSSPTTLSNSGPARRTRGSTVSPKTKAPPTSPRGPVTRSRGASVPVELESVKRRTAALTTTTTRRKAAPKPGTKRSPRGVGKREEACAPTNPSNPTLHPDSSPRLFTSVIRTAASPTYAAVTAGATVVTAAPPGDHNEGGRLRSMARASSLPPESSAAMPSSPPLTAILRALSASPCSPPTIHGEEEGARDGCVVPCVAPATLTTTTVTTTVSGGSIMTSRPLAGGGERGAKKAWPVPAIPSLPPIEEVTVSPGPARTASSPSPPTIEEREEEGGEEEDDSPLPWQSAASRRRRRRQRALSSSPSSPSLSMPLSRSPNPETSLQRTTPTRRPSAEDVRTPEPPRRPPARAQRPLTPPPAPAVTRASRGATTTNTITATTTTAAPRVRDQPPSSRQQRRGAQRGTTAGDGRSSRPVSSRAPGDAARVDRSRDLRDLLFRMGGYASRFRSMGGNNPGRLNQSGSATGATVPAGRTNAPPGVVRVPTTPQLPRDSGHRRPTPVDQPNPRPRASLRREQAALATERGLLIDLAEAVDNSQDLEEVATQIAAFFKRFGSQPAGVGGRTGGRPTTNARERGRVVNTPVTGPSERHEGVTPRRTDQVKEATRIQRLFRQNRRRAVQEVLMGAPAQCQVPKDQVLEHFRNMYSPASTPTAAGPLGFPSEAPTAASDAALVEPFGVSEVDRRLRRMSNSAPGPDGLSYRDLRKADPSCGILTAYFNMVRRLESVPSSWKSSNTVLIHKKGDRMDLSNWRPLAMSDTTPKLFAAVLADRLVSWALHNGRLSPQQKGFLPCEGCYEHNYTLQEILNDARRGRSQVVVAWLDLSNAFGSIPHSTIYHAFAEAQVPLPFRSIVEGLYDGCTTRVRTSQGFTDPVPILSGVKQGCPLSPVAFNLALEPVLRAASGTSVGYTLHGRRYNILAYADDLVLIADTPGGMETLLNTVEAAAGGVGLRFNPAKCATLHQDSRGSRRAVPTCFSLQGQGLKSLAAGVPYEHLGVPTGFQVKQTPLLSIEELIRDLHAVDRSLLAPWQKCETVGSFILPRLDFLLRGAHVEKGPLKTADKLVRKLAKSWLNLPERASAEVVYLPPSRGGCGLLPLADLADALVIGHAYRLLTAPDPAISGLARDSLREAVARKIGRPPTDLDLATYLSGSLEGEFARTSWDFSTLWSRARNAARRSSESLQLRWEWCAARQEMGLRLRGSRGRTTVVTPVARSQVLHRLRSAVTEFYSQRLVSKPDQGKVFGVSSRTKVSNHFLRGGSFTRFADWRFVHRARLNVLPLNGARRWGEGDKRCRRCGENLETLPHVICHCRPHSAAWQLRHDAVVSRIARACRLPGTLRVNQRVEGLTDDLEALRPDIVVRHEPSKSVVIIDVTVTFENGIEAFHAARERKIMKYLPIGAVLEEQGYRVVTDAIVVGALGSWDRANEPVLKLLRIGKKYAGLMRRLIVSETIRWGRDIYVEHVSGVRQYAAAPAAVPPVDSTLPPPAVIVASPFALLPRSGESNIASRNNNCDIAIGHEAHTLTQGSSGPV

SEQ ID NO: 197 - protein, 1986 aa, Lasioglossum morio
MAGPSTSPLTIYIEFPFPGEFRCPECFGKPGIKLSGVYKTHNDLVKHAKKHHPGHIVIHRCGVCGEHGTGAFPLRYVKAHHTAAHTDRPRPNRCGRGGAYVIPLTTAAPTIVRSSLSTTSTNFSGRGRPESILRDASGAGPTIVTTTSTTTPTTTTPTTTTTADGLRPAATTVTSGGAPPPPTSPAAVPTTRTAATSTSTTTTTTTSTTTRRTASSSLRQQKLSFGPAAAGRGVTTGTKTVTKTRQTPPTTSTATSGTRAVVATSRSSTTPPPPRAMTRTRSATALAATASLRKSTTPPPPPAPSRTRTSVTRTSTTPPPSTATMRTRTAAAAASKAPLRKSTTPPPPPPPTRRRTEAGRPSTTPPTSKATSGTKPAAAAAPRAPPRKSTTPPATSRTRTATSTAKVATAKKLPSPPPTSTRTATTTTTKRGGVTNRSLESVPGSPPPGTRAAPAANRRAGSGAAQRASTSPPTRKSTSSPPPTLSNSGPARRTRGSTVSPRTKAPPTSPRGPITRSRGASVPVELESVKRRTAALNTTRRKAAPTSGSKRSPRGVGKREEACAPTNPSNPTLHPDSSPRLFTSVIRTAASPTYAAVTAGATVVSATPPGDQGALRRQRSMTPISPESPAATPSSLALTTILRALSTSPCSPPTTFGEQAGARGCCVVSCVAVATLTTTTVTTTVSGGSIMTSRPLAGGERGAKRAWPVPAIPSLPPIEEVTVTPGPARTASSPSPPAIEEREEEGGEEDDDSPLPWQSAASRRRRRRQRALSSSPSSPSFSMPLSRSPNPETSLQRTTPTRRPSAEDVRTPEPPRRPPARGQRPPTPPPAPAVTRATRGATTTNTITATTTTAAPRVRNQPPPSRQQRRGAQRGTTAGDGRSSRPVSSRAPGDAARVDRSRDLRELLFRMGGYASRFRSMGGNNPGSSRPSGSTTGATVPAGRTNAPPGVARVPTTPQLPRDSGHRRPTPVGQPNPRPRASLRREQAALATERGLLIDLAEAVDNLQDLEEVATQIAAFFKRLGSQPAGVGGRTGGRPTTNARERGRVVNTPVTGPSGRHEGVTPRGTDQVREATRIQRLFRQNRRRAVQEVLMGAPAQCQVPKDQVTEHFRNMYSPASTPPASGPLGFPSEAPTASSDAALVQPFGVSEVDRRLRRMSNSAPGPDGLSYRDLRKADPSCSILTALFNMIRRLELVPSSWKSSNTVLIHKKGDRMDLSNWRPLAMSDTTPKLFAAVLADRLVSWALHNGRLSPQQKGFLPCEGCYEHNYTLQEILNDARRGKSQVVVAWLDLSNAFGSIPHSTIYHAFAEAQVPLPFRNIVEGLYDGCTTRVRTSQGFTDPVPILSGVKQGCPLSPVAFNLALEPVLRAASGTSVGYTLHGRRYNILAYADDLVLIADTPGGMETLLNTVEAAAGGVGLRFNPAKCATLHQDSRGSRRAVPTCFSLQGQALKSLAAGVPYEHLGVPTGFQVKQTPLLSIEELIRDLHAVDRSLLAPWQKCETVGSFILPRLDFLLRGAHVEKGPLKVADKLVRKLAKSWLNLPERASAEVVYLPTSRGGCGLLPLADLADALVIGHAYRLLTAPDPAISGLARDSLREAVARKIGRPPTDLDLATYLSGSLEGEFARTSWDFSTLWSRARNAARRSSNSLQLRWEWCAERQELGIRLRGSRGRTTVVTPVARSQVLHRLRSAVTEFYSHRLGSKPDQGKVFGVSSRTKVSNHFLRGGSFTRFADWRFVHRARLDVLPLNGARRWGEGDKRCRRCGENMETLPHVLCHCRPHSAAWQLRHDAVVSRIARACRLPGTLRVNQRVEGLTGDLEALRPDIVVRHEPSKSVVIIDVTVTFENGIEAFHAARDRKISKYLPIGAALEEQGYRVVTDAIVVGALGSWDQANEPVLKLLRIGKKYAGLMRRLIVSETIRWGRDIYVEHVSGVRQYAAAPAAVPPVDSTLPPLAVNVASPLALLPRSTESTIAPRVINHSDTQT

SEQ ID NO: 198 - protein, 1995 aa, Lasioglossum morio
MAGPSTSPVTIYIEFPFPGDFRCPECFGKPGIKLSGVYKTHNDLIKHAKKHHPGHVVVHRCGVCGEHGTGAFPLRYVKAHHTAAHTDRPRPNRCGRGGAYVIPLTTAAPTTVRSSLSTTSTNFSGRGRPESILRDASGAGPTIVITTSTTTPTTTTPTTTTTADGLRPAATMTSISGGAHPPSPSGPAAVPTTRTAATSTTSTNTTTTTSTTTRRTASSSLTQQRLPFGPSTAGRGATTGTKQATKTRQTTLTTTTATSRARAVVATSRTSTTPPPSQATLRTRSATAAAPAASLRKSTTPPPPPAPTRTRTSATRTSTTPPPSTATTRTRTAAAAASKAPLRKSTTPPPPPPPTRRRTEAGRPSTTPPPSKATSGTKPAAAAAPRAPPRKSTTPPPPPATSRTRTATPPATVATSKLPSPPTTRTTATTTTKRGGATRRSDEVVSGSTPPGTRAAPAASRRAGPGAVQRTSPSLPTRKSTPSSPPTLSNSGPARRTRGSTVSPKTKAPPTSPRGPVTRSRGASVPVELESVKRRTAALTTTTTRRKAAPKPGTKRSPRGVGKRDGPCAPTNPSNPTLHPDSSPRLFTSVIRTAASPTYAAVTAGATVVTAAPPGDHTEGRRLRSMSRASSLPPESSTAIPSSPPLTAILRALSTSPCSPPTIHGEEEDARDGCVVPCVAPATLTTTTVTTTVSGGSIMTSRPLAGGERGAKRAWPVPAIPSLPPIEEVTVTPGPARAASSPSPPAIEEREEEGGEEEDDSPLPWQSAASRRRRRRQRALSSSPSSPSFSLPLSRSSIPETSPQDRTTPTRRPSAENVRTPEPQRRPPARAQRPPTPPPAPAATRASRGATTTTITATTTTTAAPRVRDQPPSSRQQRRGAQRGTTAGDGRSSRPVSSRAPGDAARVDRSRDLRDMLFRLGGFASRFRSMGGNNPGRSNQGGSTTGATVPAGRTNAPPGVVRVPTTPQLPRDLEHRRPTPVGQPNPRPRASLRREQAALATERGLLIDLAEAVDNTQDLEEVATQIAAFFKRFGSQPAGVGGRTGGRPTTNARERGRVVNTPVTGPSGRHEGVTPGGTDQVREATRIQRLFRQNRRRAVQEVLMGAPAQCQVPKDQVTEHFRNMYSPASTPPASGPLGFPSEAPTASSDAALVQPFGVSEVDRRLRRMSNSAPGPDGLSYRDLRKADPSCSILTAYFNMIRRLESVPSSWKSSNTVLIHKKGDRMDLSNWRPLAMSDTTPKLFAAVLADRLVSWALHNGRLSPQQKGFLPCEGCYEHNYTLQEILNDARRGRSQVVVAWLDLSNAFGSIPHSTIYHAFAEAQVPLPFRNIVEGLYDGCTTRVRTSQGFTDPVPILSGVKQGCPLSPVAFNLALEPVLRAASGTSVGYTLHGRRYNILAYADDLVLIADTPGGMDTLLSTVEAAAGGVGLRFNPAKCATLHQDSRGSRRAVPTCFSLQGQALKSLAAGVPYEHLGVPTGFQVKQTPLLSIEELIRDLHAVDRSLLAPWQKCETVGSFILPRLDFLLRGAHVEKGPLKVADKLVRKLAKSWLNLPERASAEVVYLPPSRGGCGLLPLADLADALVIGHAYRLLTAPDPAISGLARDSLREAVARKIGRTPTDLDLATYLSGSLEGEFARTSWDFSTLWSRARNAARRSSNSLQLRWEWCAERQELGIRLRGSRGRTTVVTPVARSQVLHRLRSAVTEFYSHRLGSKPDQGKVFGVSSRTKVSNHFLRGGSFTRFADWRFVHRARLDVLPLNGARRWGESDKRCRRCGENMETLPHVLCHCRPHSAAWQLRHDAVVSRIARACRLPGTLRVNQRVEGLTGDLEALRPDIVVRHEPSKSVVIIDVTVTFENGIEAFHAARDRKISKYLPIGAALEEQGYRVVTDAIVVGALGSWDRANEPVLKLLRIGKKYAGLMRRLIVSETIRWGRDIYVEHVSGVRQYAAAPAAVPPVDSTLPPLAVNVASPLALLPRSTESTIAPRVINHSDTQT

SEQ ID NO: 199 - protein, 2010 aa, Lasioglossum morio
MAGPSTSPLTIYIEFPFPGDFRCPECFGKPGIKLSGVYKTHNDLIKHAKKHHPGHVVVHRCGVCGEHGTGAFPLRYVKAHHTAAHTDRPRPNRCGRGGAYVIPLTTAAPTTVRSSLSTTSTNFSGRGRPESILRDASGAGPTIVITTSTMTPTTTTPTTTTTADGLRPAATTPSISGGAHPPSPSGPAAAPTTRAAATSTTSTSTTTTTSTTTRRTASSSLTQQRLPFGPSTAGRGATTGTKQATKTRQTTLTTSTATSRARAAVATSRTSTTPPPSQATLRTRSATAAAPAASLRKSTTPPPPPAPTRTRTSATRTSTTPPPSTATTRTRTATAAASKAPLRKSTTPPPPPPPTRRRTEAGRPSTTPPTSKATSGTKPAAAAAPRAPPRKSTTPPPPPATSRTRTATPPATVATSKLPSPPTTTTRTTATTTTKRGGATRRSDEVVSGSTPPGTRAAPAANRRAGPGAAQRTSPSLPTRKSNPSSPPTMSTSGPARRTRGSTVSPRTKAPPTSPRGPITRSRGASVPVELESVKRRTAALTTTTTRRKAAPKPGTKRSPRGVGKRDGPCAPTNPSNPTLHPDSSPRLFTSVIRTAASPTYAAVTAGATVVTAAPPGDHTEGRRLRSMSRASSLPPESSTAMPSSPPLTAILRALSTSPCSPPTIHGEEEGARDGCVVPCVVPATLTTTTVTTTVSGGSIMTSRPLAGGERGAKRAWPVPAIPSLPPIEEVTVTPGPARAASSPSPPAIEEREEEGGEEDDDSPLPWQSAASRRRRRRQRALSSSPSSPSFSMPLSRSPNPETSLQRTTPTRRPSAEDVRTPEPPRRPPARAQRPLTPPPAPAVTRATRGATTTNTITATTTTAAPRVRNQPPPSRQQRRGAQRGTTAGDGRSSRPVSSRAPGGAARVDRSRDLRDLLFRMGGYASRFRSMGGNNPGRSNQGGSTTGATVPAGRTNAPPGVVRVPTTPQLPRDSEHRRPTPIDQPNPRPRASLRREQAALATERGLLIDLAEAVDNPQDLEEVATQIAAFFKRFGSQPAGVGGRTGGRPTTNARERGRVVNTPVTGPSGRHEGVTPRGTDQVREATRIQRLFRQNRRRAVQEVLMGAPAQCQVPKDQVTEHFRNMYSPASTPPASGPLGFPSEAPTASSDAALVQPFGVSEVDRRLRRMSNSAPGPDGLSYRDLRKADPSCSILTAYFNMIRRLESVPSSWKSSNTVLIHKKGDRMDLSNWRPLAMSDTTPKLFAAVLADRLVSWALQNGRLSPQQKGFLPCEGCYEHNYTLQEILNDARRGKSQVVVAWLDLSNAFGSIPHSTIYHAFAEAQVPLPFRNIVEGLYDGCTTRVRTSQGFTDPVPILSGVKQGCPLSPVAFNLALEPVLRAASGTSVGYTLHGRRYNILAYADDLVLIADTPGGMDTLLNTVEAAAGGVGLRFNPAKCATLHQDSRGSRRAVPTCFSLQGQGLKSLAAGVPYEHLGVPTGFQVKQTPLLSIEELIRDLHAVDRSLLAPWQKCETVGSFILPRLDFLLRGAHVEKGPLKTADKLVRKLAKSWLNLPERASAEVVYLPPSRGGCGLLPLADLADALVIGHAFRLLTTPDPAISGLARDSLREAVARKIGRTPTDQDLATYLSGSLEGEFARTSWDFSTLWSRARNAARRSSESLQLRWEWCAARQELGIRLRGSRGRTTVVTPVARSQVLHRLRSAVTEFYSHRLVSKPDQGKVFGVSSRTKVSNHFLRGGSFTRFADWRFVHRARLNVLPLNGARRWGEGDKRCRRCGENLETLPHVICHCRPHSAAWQLRHDAVVSRIARACRLPGTLRVNQRVEGLTDDLEALRPDIVVRHEPSKSVVIIDVTVTFENGIEAFHAARERKISKYLPIGAALEEQGYRVVTDAIVVGALGSWDQANEPVLKLLRIGKKYAGLMRRLIVSETIRWGRDIYVEHVSGVRQYAAAPAAVPPADLALPPPAVMVTPPLAPPPRTDVNCFAPRNNTCDAPTGHEALILTQGSSSPA

SEQ ID NO: 200 - protein, 1312 aa, Lasioglossum morio
MTSRPLAGGGERGAKRAWPVPAIPSLPPIEEVTVSPGPARTASSPSPPAIEEREEEGGEEDDSPLPWQSAASRRRRRQLRVLSLSPTSPSASLPPSRSSYPEASPQETRTSPRRPSTEDVRTPEPPRRPPARAQRPLTPPPAPAATRASRGATTTTTITATTTTTAAPRTRVQPPSSRQQRRGAQRGTTAGDGRNSRSGSSRAPGDAARVDRSRDLRDMLFRLGGFASRFRSMGGNNPGRSNQSGSTTGATVPAGRTNAPSGVVRVPATPQLPRDSEHRRPTPVGQPNPRPRASLRREQAALATERGLLIDLAEAVDNPQDLEEVATQIAAFFKRFGSQPAGVGGRTGGRPTTNAGRRGRVVNTPVTGPSERHEGVTPRRTDQVKEATRIQRLFRQNRRRAVQEVLMGAPAQCQVPKDQVLEHFRNMYSPASTPTAAGPLGFPSEAPTAASDAALVEPFGVSEVDRRLRRMSNSAPGPDGLSYRDLRKADPSCGILTAYFNMVRRLESVPSSWKSSNTVLIHKKGDRMDLSNWRPLAMSDTTPKLFAAVLADRLVSWALHNGRLSPQQKGFLPCEGCYEHNYTLQEILNDARRGRSQVVVAWLDLSNAFGSIPHSTIYHAFAEAQVPLPFRNIVEGLYDGCTTRVRTSQGFTDPVPILSGVKQGCPLSPVAFNLALEPVLRAASGTSVGYTLHGRRYNILAYADDLVLIADTPGGMETLLNTVEAAAGGVGLRFNPAKCATLHQDSRGSRRAVPTCFSLQGQGLKSLAAGVPYEHLGVPTGFQVKQTPLLSIEELIRDLHAVDRSLLAPWQKCETVGSFILPRLDFLLRGAHVEKGPLKLADKLVRKLAKSWLNLPERASAEVVYLPPSRGGCGLLPLADLADALVIGHAFRLLTTPDPAISGLARDSLREAVARKIGRPPTDQDLATYLSGSLEGEFARTSWDFSTLWSRARNAARRSSESLQLRWEWCAARQELGLRLRGSRGRTTVVTPVARSQVLHRLRSAVTEFYSHRLVSKPDQGKVFGVSSRTKVSNHFLRGGSFTRFADWRFVHRARLNVLPLNGARRWGEGDKRCRRCGENLETLPHVICHCRPHSAAWQLRHDAVVSRIARACRLPGTLRVNQRVEGLTDDLEALRPDIVVRHEPSKSVVIIDVTVTFENGIEAFHAARERKIMKYLPIGAALEEQGYRVVTDAIVVGALGSWDQDNESVLKLLRIGKKYAGLMRRLIVSETIRWGRDIYVEHVSGVRQYAAAPVAVPSVDVTLPPPAVNVASPLALLPRTSESNIAPRNHIVDEAIGHEAHTLTQGPSGPV

SEQ ID NO: 201 - protein, 1080 aa, Lasioglossum morio
MLFRLGGFASRFRSMGGNNPGRSNQGGSTTGATVPAGRTNAPPGVVRVPTTPQLPRDLEHRRPTPVGQPNPRPRASLRREQAALATERGLLIDLAEAVDNTQDLEEVATQIAAFFKRFGSQPAGVGGRTGGRPTTNARERGRVVNTPVTGPSGRHEGVTPGGTDQVREATRIQRLFRQNRRRAVQEVLMGAPAQCQVPKDQVTEHFRNMYSPASTPPASGPLGFPSEAPTASSDAALVQPFGVSEVDRRLRRMSNSAPGPDGLSYRDLRKADPSCSILTAYFNMIRRLESVPSSWKSSNTVLIHKKGDRMDLSNWRPLAMSDTTPKLFAAVLADRLVSWALHNGRLSPQQKGFLPCEGCYEHNYTLQEILNDARRGRSQVVVAWLDLSNAFGSIPHSTIYHAFAEAQVPLPFRNIVEGLYDGCTTRVRTSQGFTDPVPILSGVKQGCPLSPVAFNLALEPVLRAASGTSVGYTLHGRRYNILAYADDLVLIADTPGGMDTLLSTVEAAAGGVGLRFNPAKCATLHQDSRGSRRAVPTCFSLQGQALKSLAAGVPYEHLGVPTGFQVKQTPLLSIEELIRDLHAVDRSLLAPWQKCETVGSFILPRLDFLLRGAHVEKGPLKVADKLVRKLAKSWLNLPERASAEVVYLPPSRGGCGLLPLADLADALVIGHAYRLLTAPDPAISGLARDSLREAVARKIGRTPTDLDLATYLSGSLEGEFARTSWDFSTLWSRARNAARRSSNSLQLRWEWCAERQELGIRLRGSRGRTTVVTPVARSQVLHRLRSAVTEFYSHRLGSKPDQGKVFGVSSRTKVSNHFLRGGSFTRFADWRFVHRARLDVLPLNGARRWGESDKRCRRCGENMETLPHVLCHCRPHSAAWQLRHDAVVSRIARACRLPGTLRVNQRVEGLTGDLEALRPDIVVRHEPSKSVVIIDVTVTFENGIEAFHAARDRKISKYLPIGAALEEQGYRVVTDAIVVGALGSWDRANEPVLKLLRIGKKYAGLMRRLIVSETIRWGRDIYVEHVSGVRQYAAAPAAVPPVDSTLPPLAVNVASPLALLPRSTESTIAPRVINHSDTQT

SEQ ID NO: 202 - protein, 1951 aa, Lasioglossum morio
MAGPTTSPITIVIEFPLAAEFRCPECYGKPGVRTSGVYKTHNDLVKHAKKSHPGHIVVHRCGVCGEHGTGAFPLRYVKAHHLAAHTDRPRPSRSGRGGAYVIPLTTASTTTARSSLSTTGTNSSGRGRPESYSSCATGAGLTVVPTIATTTTATTTTTTTTTGLRPTATTTSISGGAPRPPKSPAAAPTTRAAATRTTITTTSTTTTRPSSSSLRQQKLSFGPAAAGRGATTRTVTATETRQTPPPTATATSRAKAVVATSRTSITPPPPRTMTRTRSATALAPRASVRKSTTPPPPPAPPKRTAAASRPSTTPPPPRTMTRTRSATALASRASIRKSTTPPPPPAPPKKGITAAARVATKNLPSPPTTTTRTTPTTTTTKRGGVTGTVPGTSTSGSGAAPAAIRRSGSGAVQRSSPSPPVRKTTSSSPPTLSPSGPARRTRGSTVSPKTKAPTTSPRGPITRSRGASVPVELECVKRRTAALKDIRRKAAPKPGSKRSPGGVGKRGAPSSAPTTSPNPPHHQSSRPRLFTSVTRTAASPSYAAVTAGATVVSATPPGDQGAVRRQRSTTPISPESPAATPSSQALTTILRALSTSPCSPPTTTGDQEGVRGCCAVSCVAIATLTTTTVTTTVSGGPIMTSRPLAGGVERGSKRTRQEPAVLSLPPIAEVTVSPGPAWTARSPSPPTIEEREEVEREEEEDDSPLPWQSAASRRRRRRQLLSLSLSPVTPPSSSVPPSRSSIPETSPQRTTPPRRPPAGDIRTPELHRRPPARPQRPPTPPPAPEASRAMRRVNDTTITAATTTQAPRTGAQPPPSLQPRRSAQRGTTAGGEDNTRRVSSRAPGGAARVDRSRDLRDMLFRMGGFASRFRSMGGNNPGRSNQGGSTTGATVPAGRTNAPSGVVRVPTTPQLPRDSEHRRPTPVDQPNPRPRASLRREQAALATERGLLIDLAEAVDNTQDLEEVATQIAAFFKRFGSQSAGVGGRTGGRPTTNARERGRVVNTPVTGPSGRHEGVTPRGTDQVREATRIQRLFRQNRRRAVQEVLMGAPAQCQVPKDQVTEHFRNMYSPASTPPASGPLGFPSEAPTASSDAALVQPFGVSEIDRRLRRMSNSAPGPDGLSYRDLRKADPSCSILTALFNMIRRLESVPSSWKSSNTVLIHKKGDRMDLSNWRPLAMSDTTPKLFAAVLADRLVSWALHNGRLSPQQKGFLPCEGCYEHNYTLQEILNDARRGRSQVVVAWLDLSNAFGSIPHSTIYHAFAEAQVPLPFRNIVEGLYDGCTTRVRTSQGFTDPVPILSGVKQGCPLSPVAFNLALEPVLRAASGTSVGYTLHGRRYNILAYADDLVLIADTPGGMDTLLSTVEAAAGGVGLRFNPAKCATLHQDSRGSRRAVPTCFSLQGQGLKSLAAGVPYEHLGVPTGFQVKQTPLLSIEELIRDLHAVDRSLLAPWQKCETVGSFILPRLDFLLRGAHVEKGPLKTADKLVRKLAKSWLNLPERASAEVVYLPPSRGGCGLLPLADLADALVIGHAFRLLTTPDPAISGLARDSLREAVARKIGRTPTDQDLATYLSGSLEGEFARTSWDFSTLWSRARNAARRSSESLQLRWEWCAARQELGIRLRGSRGRTTVVTPVARSQVLHRLRSAVTEYYSHRLDSKPDQGKVFGVSSRTRVSNHFLRGGSFTRFADWRFVHRARLNVLPLNGARRWGEGDKRCRRCGENLETLPHVICHCRPHSAAWQLRHDAVVSRIARACRLPGTLRVNQRVEGLTDDLEALRPDIVVRHEPSKSVVIIDVTVTFENGIEAFHAARERKISKYLPIGAVLEEQGYRVVTDAIVVGALGSWDRANEPVLKLLRIGKKYAGLMRRLIVSETIRWGRDIYVEHVSGVRQYAAAPAAVPPADLALPPPAVMVTPPLAPLPRTDMNCSAPRNNMRDTLTGHEALILTQGSSSPA

SEQ ID NO: 203 - protein, 2001 aa, Lasioglossum morio
MAGPSTCPITIYIEFPFPGEFRCPECYGKPGTRTSGVYKTHNDLVKHAKKCHPGHIVVHRCGVCGEHGTGAFPLRYVKAHHLAAHTDGPRPSRCGRGGAYVIPLTTASTTVRSSLSTTSTNFSGRGRPESILRSANGAGPTVVPTIATTTTATTTTTTTTASGLRPPAVTTATSGGAPPPSTSPAAAPTTRAAATSTTTTTSTTTTRPTSSSLRQQRLPFGPATAGRGATTGTVTVTRTRQTPPTTATATSRAKAVVATSRTSTTPPPASATLRAGPRTAAAPTASLRKSTTPPPPPATTRTRTTTSRTSTTPPPSTATARTRTATAAASKASVRKSTTPPPPPPPTRRKTAAARTSTTPPPSSATSRAKQAAAAAPRAPLRKSTTPPPPPAPTRRKTATTAAKVATRELPSPPTTTATATTTTRRGGVTGKILETVSGSTPPGPRAAPAANKRAGSGAVQRASPSPPTRRSTPSSPPTQSNSGPARRTRGSTVSPRTKAPPTSPRGPITRSRGASVPVELESVKRRTAALNTTRRKAAPTSGSKRSPRGVGKRDGPCAPTNHSNPTLHPDSSPRLFTSVIRTAASPTYAAVTAGATVVTAAPPGDQTDVRRLRSMTRASSLPPESPIATPSSPTLNTILRALSTSPCSPPTPFGEQEGARGCCVVSCVALATLTTTTVTTTVSGGSIMTSRPLAGGGERGAKRAWPVPAIPSLPPIEEVTVSPGPARTASSPSPPAIEEREEEGGEEDDSPLPWQSAASRRRRRQLRVLSLSPTSPSVSLPLSRSSYPETSPQEARTSPRRPSTEDVRTPEPQRRPPARAQRPPTPPPAPAATRASRGATSTTTITATTTTTAAPRVRDQPPSSRQQRRGAQRGTTAGDGRSSRPVSSRTPGDAARVDRSRDLRDMLFRLGGFASRFRTMGGNNPGRSNQGGSTTGATVPAGRTNAPPGVVRVPTTPQLPRDSGHRRPTPVDQPNPRPRASLRREQAALATERGLLIDLAEAVDNPQDLEEVATQIAAFFKRFGSQPTGVGGRTGGRPTTNARERGRVVNTPVTGPSGRHEGVTPRGTDQVREATRIQRLFRQNRRRAVQEVLMGAPAQCQVPKDQVTEHFRNMYSPASTPPASGPLGFPSEAPTASSDAALVQPFGVSEVDRRLRRMSNSAPGPDGLSYRDLRKADPSCSILTAYFNMIRRLESVPSSWKSSNTVLIHKKGDRMDLSNWRPLAMSDTTPKLFAAVLADRLVSWALHNGRLSPQQKGFLPCEGCYEHNYTLQEILNDARRGRSQVVVAWLDLSNAFGSIPHSTIYHAFAEAQVPLPFRNIVEGLYDGCTTRVRTSQGFTDPVPILSGVKQGCPLSPVAFNLALEPVLRAASGSSVGYTLHGRRYNILAYADDLVLIADTPGGMDTLLSTVEAAAGGVGLRFNPAKCATLHQDSRGSRRAVPTCFSLQGQGLKSLAAGVPYEHLGVPTGFQVKQTPLLSIEELIRDLHAVDRSLLAPWQKCETVGSFILPRLDFLLRGAHVEKGPLKVADKLVRKLAKSWLNLPERASAEVVYLPPSRGGCGLLPLADLADALVIGHAYRLLTAPDPAISGLARDSMREAVARKIGRPPTDLDLATYLSGSLEGEFARTSWDFSTLWSRARNAARRSSNSLQLRWEWCAERQEMGIRLRGSRGRTTVVTPVARSQVLHRLRSAVTEFYSHRLGSKPDQGKVFGVSSRTKVSNHFLRGGSFTRFADWRFVHRARLDVLPLNGARRWGEGDKRCRRCGENMETLPHVLCHCRPHSAAWQLRHDAVVSRIARACRLPTTLRVNQRVEGLTGDLEALRPDIVVRHEPSKSVVIIDVTVTFENGIEAFHAARERKIMKYLPIGAALEEQGYRVVTDAIVVGALGSWDQDNESVLKLLRIGKKYAGLMRRLVVSETIRWGRDIYVEHVSGVRQYAAAPAAVPPVDLAIPPPTVMVTPPLALLPRYIESTIAPRVITDSDTDLGHAARIMTQGPSGPV

SEQ ID NO: 204 - protein, 2001 aa, Lasioglossum morio
MAGPTNSPITIVIEFPFPGEFRCPECFGKPGIKLSGVYKTHNDLIKHAKKHHPGHVVVHRCGVCGEHGTGSFPLRYVKAHHLAAHTDGPRPSRCGRGGAYVIPLTTAAPTTVRSPSSTTSTNSSGRGRPESILRSANGAGPTVVPTIATTTTATTTTTTTTASGLRPPAVTTATSGGAPPPSTSPAAAPTTRAAATSTTTTTSTTTTRPTSSSLRQQRLPFGPATAGRGATTGTVTVTRTRQTPPTTATATSRAKAVVATSRTSTTPPPASATSRAGPRTEAAPAVSLRESTTPPPPPATTRTRTTASRTSTTPPPSTATARTRTATAAASKASVRKSTTPPPPPPPTRRKTAAARTSTTPPPPSATSRTKQAAAAAPRAPLRKSTTPPPPPATSRTRKATTAAKVATRELPSPPTTTATATTTTRRGGVTGKSLETVSGSTPPGSRAAPAANKRAGSGAVQRASPSPPTRRSTPSSPPTQSNSGPARRTRGSTVSPRTKAPPTSPRGPITRSRGASVPVEPESVKRRTAALNTTRRKAAPTSGSKRSPRGVGKRDGPCAPTNHSNPTLHPDSSPRLFTSVIRTAASPTYAAVTAGATVVTAAPPGGQTEVRRLRSMTRASSLPPESPIATPSSPTLNTILRALSTSPCSPPTTFGEQEGARGCCVVSCVALATLTTTTVTTTVSGGSIMTSRPLAGGGERGAKRAWPVPAIPSLPPIEEVTVSPGPARTASSPSPPTIEEREEEGGEEDDSPLPWQSAASRRRRRQLRVLSLSPTSPSVSLPPSRSSYPETSPQEARTSPRRPSTEDVRTPEPQRRPPARAQRPPTPPPAPAATRASRGATSTTTITATTTTTAAPRVRNQPPSSRQQRRGAQRGTTAGDGRNSRSGSSRAPGDAARVDRSRDLRDLLFRMGGYASRFRSMGGNNPGRSNQGGSTTGATVPAGRTNAPSGVVRVPTTPQLPRDSEHRRPTPVDQPNPRPRASLRREQAALATERGLLIDLAEAVDNLQDLEEVATQIAAFFKRFGSQPAGVGGRTGGRPTTNARERGRVVNTPVTGPSGRHEGVTPRGTDQVREATRIQRLFRQNRRRAVQEVLMGAPAQCQVPKDQVTEHFRNMYSPASTPPASGPLGFPSEAPTASSDAALVQPFGVSEVDRRLRRMSNSAPGPDGLSYRDLRKADPSCSILTAYFNMIRRLESVPSSWKSSNTVLIHKKGDRMDLSNWRPLAMSDTTPKLFAAVLADRLVSWALHNGRLSPQQKGFLPCEGCYEHNYTLQEILNDARRGRSQVVVAWLDLSNAFGSIPHSTIYHAFAEAQVPLPFRNIVEGLYDGCTTRVRTSQGFTDPVPILSGVKQGCPLSPVAFNLALEPVLRAASGTSVGYTLHGRRYNILAYADDLVLIADTPGGMDTLLSTVEAAAGGVGLRFNPAKCATLHQDSRGSRRAVPTCFSLQGQGLKSLAAGVPYEHLGVPTGFQVKQTPLLSIEELIRDLHAVDRSLLAPWQKCETVGSFILPRLDFLLRGAHVEKGPLKVADKLVRKLAKSWLNLPERASAEVVYLPPSRGGCGLLPLADLADALVVGHAYRLLTAPDPAISGLARDSLREAVARKIGRPPTDLDLATYLSGSLEGEFARTSWDFSTLWSRARNAARRSSNSLQLRWEWCAERQELGIRLRGSRGRTTVVTPVARSQVLHRLRSAVTEFYSHRLGSKPDQGKVFGVSSRTKVSNHFLRGGSFTRFADWRFIHRARLDVLPLNGARRWGEGDKRCRRCGENMETLPHVLCHCRPHSAAWQLRHDAVVSRIARACRLPGTLRVNQRVEGLTGDLEALRPDIVVRHEPSKSVVIIDVTVTFENGIEAFHAARGRKISKYLPIGAALEEQGYRVVTDAIVVGALGSWNQDNESVLKLLRIGKKYAGLMRRLIVSETIRWGRDIYVEHVSGVRQYAAAPAAVPPVDTTLPPPAVIVASPLALLPRTSESNIAPRNNTCDVDIGHEARTSTQGPSGPV

SEQ ID NO: 205 - protein, 1951 aa, Lasioglossum morio
MAGPTTSPITIVIEFPLAAEFRCPECYGKPGVRTSGVYKTHNDLVKHAKKSHPGHIVVHRCGVCGEHGTGAFPLRYVKAHHLAAHTDRPRPSRSGRGGAYVIPLTTASTTTVRSSPSTAGTYLSGRGRPESLSSCATGAGLTVVPTIATTTMATTTTTTTTTGLRPTATTTVIPGGAPRPSKSPAAAPTTRAAATRTTTTTTSTTTTRPSSSSLRQQKLSFGPAAAGRGATTGTVTATETRQTPPPTATATSRAKAVVATSRTSTTPPPPRTMTRTRSATAVASRASVRKSTTPPPPPAPPKRTAAASRPSTTPPPPRTMTRTRSATALASRASIRKSTTPPPPPAPPKKGITAAARVATKNLPSPPTTTTRTTPTTTTTKRGGVTGTVPGTSTSGSGAAPAAIRRSGSGAVQRSSPSPPVRKTTSSSPPTLSPSGPARRTRGSTVSPKTKAPTTSPRGPITRSRGASVPVELECVKRRTAALKDIRRKAAPKPGSKRSPGGVGKRGAPSSAPTTSPNPPHHQSSRPRLFTSVTRTAASPSYAAVTAGATVVSATPPGDQGAVRRQRSTTPISPESPAATPSSQALTTILRALSTSPCSPPTTTGDQEGVRGCCAVSCVAIATLTTTTVTTTVSGGPIMTSRPLAGGVERGSKRTRQEPAVLSLPPIAEVTVSPGPAWTARSPSPPTIEEREEVEREEEEDDSPLPWQSAASRRRRRRQLLSLSLSPVTPPSSSVPPSRSSIPETSPQRTTPPRRPPAGDIRTPELHRRPPARPQRPPTPPPAPEASRAMRRVNDTTITAATTTQAPRTGAQPPPSLQPRRSAQRGTTAGGEDNTRRVSSRAPGGAARVDRSRDLRDMLFRMGGFASRFRSMGGNNPGRSNQGGSTTGATVPAGRTNAPSGVVRVPTTPQLPRDSEHRRPTPVDQPNPRPRASLRREQAALATERGLLIDLAEAVDNTQDLEEVATQIAAFFKRFGSQSAGVGGRTGGRPTTNARERGRVVNTPVTGPSGRHEGVTPRGTDQVREATRIQRLFRQNRRRAVQEVLMGAPAQCQVPKDQVTEHFRNMYSPASTPPASGPLGFPSEAPTASSDAALVQPFGVSEIDRRLRRMSNSAPGPDGLSYRDLRKADPSCSILTALFNMIRRLESVPSSWKSSNTVLIHKKGDRMDLSNWRPLAMSDTTPKLFAAVLADRLVSWALHNGRLSPQQKGFLPCEGCYEHNYTLQEILNDARRGRSQVVVAWLDLSNAFGSIPHSTIYHAFAEAQVPLPFRNIVEGLYDGCTTRVRTSQGFTDPVPILSGVKQGCPLSPVAFNLALEPVLRAASGTSVGYTLHGRRYNILAYADDLVLIADTPGGMDTLLSTVEAAAGGVGLRFNPAKCATLHQDSRGSRRAVPTCFSLQGQGLKSLAAGVPYEHLGVPTGFQVKQTPLLSIEELIRDLHAVDRSLLAPWQKCETVGSFILPRLDFLLRGAHVEKGPLKTADKLVRKLAKSWLNLPERASAEVVYLPPSRGGCGLLPLADLADALVIGHAFRLLTTPDPAISGLARDSLREAVARKIGRTPTDQDLATYLSGSLEGEFARTSWDFSTLWSRARNAARRSSESLQLRWEWCAARQELGIRLRGSRGRTTVVTPVARSQVLHRLRSAVTEYYSHRLDSKPDQGKVFGVSSRTRVSNHFLRGGSFTRFADWRFVHRARLNVLPLNGARRWGEGDKRCRRCGENLETLPHVICHCRPHSAAWQLRHDAVVSRIARACRLPGTLRVNQRVEGLTDDLEALRPDIVVRHEPSKSVVIIDVTVTFENGIEAFHAARERKISKYLPIGAVLEEQGYRVVTDAIVVGALGSWDRANEPVLKLLRIGKKYAGLMRRLIVSETIRWGRDIYVEHVSGVRQYAAAPAAVPPADLALPPPAVMVTPPLAPLPRTDMNCSAPRNNMRDTLTGHEALILTQGSSSPA

SEQ ID NO: 206 - protein, 2010 aa, Lasioglossum morio
MAGPTSSPITIYIEFPFPGDFRCPECFGKPGIKLSGVYKTHNDLIKHAKKHHPGHIVVHRCGVCGEHGTGAFPLRYVKAHHTAAHTDRPRPNRCGRGGAYVIPLTTAAPTTVRSPSSTTSTNSSGRGRPESILRSANGAGPTVVPTIATTTTATTTTTTTTADGLRPAATMTPISGGAHPPSPSGPAAVPTTRTAATSTSTTTTTTTSTTTRRTASSSLTQQRLPFGPSTAGRGATTGTKQATKTRQTTLTTTTATSRARAVVATSRTSTTPPPSQATLRTRSATAAAPAASLRRSTTPPPPPAPTRTRTSATRTSTTPPPSTATTRARTAAAAASKAPLRKSTTPPPPPPPTRRRTEAGRPSTTPPTSKATSGTKPAAAAAPRAPPRKSTTPPPPPATSRTRTATPPATVATSKLPSPPTTTTRTTATTTTKRGGATRRSDEVVSGSPPSGTRAAPAANRRAGPGAVQRTSPSLPTRKSNPSSPPTMSTSGPARRTGGSTVSPKTKAPPTSPRGPVTRSRGASVPVELESVKRRTAALTTTTTRRKAAPKPGTKRSPRGVGKRDGPCAPTNPSNPTLHPDSSPRLFTSVIRTAASPTYAAVTAGATVVTAAPPGDHTEGRRLRSMSRASSLPPESSTAMPSSPPLTAILRALSTSPCSPPTIHGEEEGARDGCVVPCVAPATLTTTTVTTTVSGGSIMTSRPLAGGERGAKRAWPVPAIPSLPPIEEVTVTPGPARAASSPSPPAIEEREEEGGEEEDDSPLPWQSAASRRRRRQLRVLSLSPTSPSVSLPLSRSSIPETSPQDRTTPTRRPSAENVRTPEPQRRPPARAQRPPTPPPAPAATRASRGATTTTITATTTTTAAPRVRDQPPSSRQQRRGAQRGTTAGDGRSSRPVSSRAPGDAVRVDRSRDLRDMLFRLGGFASRFRSMGGNNPGRSNQGSSTTGATVPAGRTNAPPGVVRVPTTPQLPRDLEHRRPTPVGQPNPRPRASLRREQAALATERGLLIDLAEAVDNTQDLEEVATQIAAFFKRFGSQPAGVGGRTGGRPTTNARERGRVVNTPVTGPSGRHEGVTPGGTDQVREATRIQRLFRQNRRRAVQEVLMGAPAQCQVPKDQVTEHFRNMYSPASTPPASGPLGFPSEAPTASSDAALVEPFGVSEVDRRLRRMSNSAPGPDGLSYRDLRKADPSCSILTAYFNMIRRLESVPSSWKSSNTVLIHKKGDRMDLSNWRPLAMSDTTPKLFAAVLADRLVSWALHNGRLSPQQKGFLPCEGCYEHNYTLQEILNDARRGKSQVVVAWLDLSNAFGSIPHSTIYHAFAEAQVPLPFRNIVEGLYDGCTTRVRTSQGFTDPVPILSGVKQGCPLSPVAFNLALEPVLRAASGTSVGYTLHGRRYNILAYADDLVLIADTPGGMDTLLSTVEAAAGGVGLRFNPAKCATLHQDSRGSRRAVPTCFSLQGQGLKSLAAGVPYEHLGVPTGFQVKQTPLLSIEELIRDLHAVDRSLLAPWQKCETVGSFILPRLDFLLRGAHVEKGPLKAADKLVRKLAKSWLNLPERASAEVVYLPPSRGGCGLLPLADLADALVIGHAFRLLTTPDPAISGLARDSLREAVARKIGRPPTDEDLATYLSGSLEGEFARTSWDFSTLWSRARNAARRSSESLQLRWEWCAARQELGLRLRGSRGRTTVVTPVARSQVLHRLRSAVTEFYSHRLVSKPDQGKVFGVSSRTKVSNHFLRGGSFTRFADWRFVHRARLNVLPLNGARRWGEGDKRCRRCGENLETLPHVICHCRPHSAAWQLRHDAVVSRIARACRLPGTLRVNQRVEGLTDDLEALRPDIVVRHEPSKSVVIIDVTVTFENGIEAFHAARGRKISKYLPIGAALEEQGYRVVTDAIVVGALGSWDQANEPVLKLLRIGKKYAGLMRRLIVSETIRWGRDIYVEHVSGVRQYAAAPAAVPPADLALPPPAVMVTPLAPFPRTSESNIAPREINNSCDSDIGYIAQTLTQGPSGPV

SEQ ID NO: 207 - protein, 1998 aa, Lasioglossum morio
MAGPTNSPITIVIEFPFPGEFRCPECFGKPGIKLSGVYKTHNDLIKHAKKHHPGHVVVHRCGVCGEHGTGAFPLRYVKAHHTAAHTDRPRPNRCGRGGAYVIPLTSASTTVRSPSSTTSTNFSGRGRPESILRSANGAGPTVVPTIATTTTATTTTTTTTASGLRPPAVTTATSGGAPPPSTSPAAAPTTRAAATSTTTTTSTTTTRPTSSSLRQQRLPFGPATAGRGATTGTVTVTRTRQTPPTTATATSRAKAVVATSRTSTTPPPSSATLRAGPRMAAAPTASLRKSTTPPPPPATTRTRTTTSRTSTTPPPSTATARTRTATAAASKASVRKSTTPPPPPPPTRRKTAAARTSTTPPPSSATSRAKQAAAAAPRAPLRKSTTPPPPPATSRTRKATTAAKVATRELPSPPTTTATATTTTRRGGVTGKSLETVSGSTPPGSRAAPAANKRAGSGAVQRASPSPPTRRSTPSSPPTQSNSGPARRTRGSTVSPRTKAPPTSPRGPITRSRGASVPVELESTKKRTAALNATRRKTAPTSGSKRSPRGVGKRDGPCAPTNPSNPTLHPDSSPRLFTSVIRTAASPTYAAVTAGATVVTAAPPGDQTEVRRLRSMTRASSLPPESPITTPSSPTLNTILRALSTSPCSPPSTLGEQEGARGCCVVSCVALATLTTTTVTTTVSGGSIMTSRPLAGGGERGAKRAWPVPAIPSLPPIEEVTVSPGPARTASSPSPPAIEEREEEGGEEDDSPLPWQSAASRKRRRQLRVLSLSPTSPSVSLPPSRSSYPETSPQEARTSPRRPSTEDVRTPEPIRRTPARAQRPHTPPPAPDANRATRGVTTTIITATTTTAAPRVRNQPPPSRQQRRGAQRGTTAGDGRNSRSGSSRAPGGAARVDRSRDLRDLLFRMGGYASRFRSMGGNNPGRSNQGGSTTGATVTAGRTNAPSGVVRVPATPQLPRDPEHRRPTPVGQPNPRPRASLRREQAALATERGLLIDLAEAVDNPQDLEEVATQIAAFFKRFGSQPAGVGGRTGGRPTTNARERGRVVNTPVTGPSGRHEGVTPRGTDQVREATRIQRLFRQNRRRAVQEVLMGAPAQCQVPKDQVTEHFRNMYSPASTPTAAGPLGFPSEAPTAASDAALVEPFGVSEVDRRLRRMSNSAPGPDGLSYRDLRKADPSCGILTAYFNMIRRLESVPSSWKSSNTVLIHKKGDRMDLSNWRPLAMSDTTPKLFAAVLADRLVSWALQNGRLSPQQKGFLPCEGCYEHNYTLQEILNDARRGKSQVVVAWLDLSNAFGSIPHSTIYHAFAEAQVPLPFRNIVEGLYDGCTTRVRTSQGFTDPVPILSGVKQGCPLSPVAFNLALEPVLRAASGTSVGYTLHGRRYNILAYADDLVLIADTPGGMDTLLNTVEAAAGGVGLRFNPAKCATLHQDSRGSRRAVPTCFSLQGQGLKSLAAGVPYEHLGVPTGFQVKQTPLLSIEELIRDLHAVDRSLLAPWQKCETVGSFILPRLDFLLRGAHVEKGPLKTADKLVRKLAKSWLNLPERASAEVVYLPPSRGGCGLLPLADLADALVIGHAFRLLTTPDPAISGLARDSLREAVARKIGRTPTDQDLATYLSGSLEGEFARTSWDFSTLWSRARNAARRSSESLQLRWEWCAARQELGIRLRGSRGRTTVVTPVARSQVLHRLRSAVTEYYSHRLDSKPDQGKVFGVSSRTKVSNHFLRGGSFTRFADWRFVHRARLNVLPLNGARRWGEGDKRCRRCGENLETLPHVICHCRPHSAAWQLRHDAVVSRIARACRLPGTLRVNQRVEGLTDDLEALRPDIVVRHEPSKSVVIIDVTVTFENGIEAFHAARGRKISKYLPIGAALEEQGYRVVTDAIVVGALGSWDRDNESVLKLLRIGKKYAGLMRRLIVSETIRWGRDIYVEHVSGVRQYAAAPAAVPPADVTVPPPAVNVASPLALLPRTNESSIAPRNINCDEVIGHEAHTLTQGPSGPI

SEQ ID NO: 208 - protein, 2001 aa, Lasioglossum morio
MAGPSTSPVTIYIEFPFPGDFRCPECFGKPGIKLSGVYKTHNDLIKHAKKHHPGHIVIHRCGVCGEHGTGAFPLRYVKAHHLAAHTDGPRPNRCGRGGAYVIPLTTAAPTTVRSSLSTTSTNFSGRGRSESILRDASGAGTTIVTTTSTTTPTTTTPTTTTTADGLRPAATTVTSGGAPPPPTSPAAVPTTRTAATSTISTTTTTTTSTTTRRTASSSLRQQKLSFGPAAAGRGVTTETNTATETRQTLPPTSTATSRARAVVATSRTSTTPPPPRVMTRTRSATALASAASLRKSTTPPPPPAPTRKRTTATRTSNTPPTSTATTRAAAASKAPLRKSTTPPPPPPPTRRRNEVGRPSTTPPPSTAASRPAAAAASRAPLRKSTTPPPPPAPTTRTRTATTTATVATTKKLPSPSTTSTKTTTTTTTTKRGGATDKRLESVSGSTPPGTRAAPAANRRAGPGAVQRTSPSLPTRKSTPSSPPTLSNSGPARRTRGSTVSPKTKAPPTSPRGPVTRSRGASVPVELESVKRRTAALTTTTTRRKAAPKPGTKRSPRGVGKREEACAPTNPSNPTLHPDSSPRLFTSVIRTAASPTYAAVTAGATVVSATPPGDQGALRRQRSMTPIPPESPAATPSSLALTTILRALSTSPCSPPTTFGEQAGARGCCVVSCVAVATLTTTTVTTTVSGGSIMTSRPLAGGERGAKRTWPVPAIPSLPPIEEVTVTPGPARAASSPSPPAIEEREEEGGEEDDDSPLPWQSAASRRRRRRQRALSSSPSSPSFSMPLSRSPNPETSLQRTTPTRRPSAEDVRTPEPIRRTPARAQRPHTPPPAPDANRATRGVTTTNTITAITTTAAPRVRNQPPPSRQQRRGAQRGTTAGDGRSSRPVSIRAPGDAARVDRSRDLRDLLFRMGGYASRFRSMGGNNPGRSSQGGSTTGATVPAGRTNAPSGVVRVPTTPQLPRDSEHRRPTPVGQPNPRPRASLRREQAALATERGLLIDLAEAVDNPQDLEEVATQIAAFFKRFGSQPAGVGGRTGGRPTTNARERGRVVNTPVTGPSGRHEGVTPRGTDQVREATRIQRLFRQNRRRAVQEVLMGAPAQCQVPKDQVTEHFRNMYSPASTPPASGPLGFPSEAPTASSDAALVQPFGVSEVDRRLRRMSNSAPGPDGLSYRDLRKADPSCSILTAYFNMIRRLESVPSSWKSSNTVLIHKKGDRMDLSNWRPLAMSDTTPKLFAAVLADRLVSWALQNGRLSPQQKGFLPCEGCYEHNYTLQEILNDARRGKSQVVVAWLDLSNAFGSIPHSTIYHAFAEAQVPLPFRNIVEGLYDGCTTRVRTSQGFTDPVPILSGVKQGCPLSPVAFNLALEPVLRAASGTSVGYTLHGRRYNILAYADDLVLIADTPGGMDTLLNTVEAAAGGVGLRFNPAKCATLHQDSRGSRRAVPTCFSLQGQGLKSLAAGVPYEHLGVPTGFQVKQTPLLSIEELIRDLHAVDRSLLAPWQKCETVGSFILPRLDFLLRGAHVEKGPLKTADKLVRKLAKSWLNLPERASAEVVYLPPSRGGCGLLPLADLADALVIGHAFRLLTTPDPAISGLARDSLREAVARKIGRPPTDEDLATYLSGSLEGEFARTSWDFSTLWSRARNAARRSSESLQLRWEWCAARQELGLRLRGSRGRTTVVTPVARSQVLHRLRSAVTEYYSHRLDSKPDQGKVFGVSSRTKVSNHFLRGGSFTRFADWRFVHRARLNVLPLNGARRWGEGDKRCRRCGENLETLPHVICHCRPHSAAWQLRHDAVVSRIARACRLPGTLRVNQRVEGLTDDLEALRPDIVVRHEPSKSVVIIDVTVTFENGIEAFHAARERKIMKYLPIGAALEERGYRVVTDAIVVGALGSWDRDNESVLKLLRIGKKYAGLMRRLIVSETIRWGRDIYVEHVSGVRQYAAAPAAVPPADVTLPPPAVNVASPLALPHRSDESIAPRNENCDRDIGHTAHTLTQGPSGPI

SEQ ID NO: 209 - protein, 2010 aa, Lasioglossum morio
MAGPTSSPITIYIEFPFPGDFRCPECFGKPGIKLSGVYKTHNDLIKHAKKHHPGHIVVHRCGVCGEHGTGAFPLRYVKAHHTAAHTDRPRPNRCGRGGAYVIPLTTAAPTTVRSPSSTTSTNSSGRGRPESILRSANGAGPTVVPTIATTTTATTTTTTTTADGLRPAATMTPISGGAHPPSPSGPAAVPTTRTAATSTSTTTTTTTSTTTRRTASSSLTQQRLPFGPSTAGRGATTGTKQATKTRQTTLTTTTATSRARAVVATSRTSTTPPPSQATLRTRSATAAAPAASLRRSTTPPPPPAPTRTRTSATRTSTTPPPSTATTRARTAAAAASKAPLRKSTTPPPPPPPTRRRTEAGRPSTTPPTSKATSGTKPAAAAAPRAPPRKSTTPPPPPATSRTRTATPPATVATSKLPSPPTTTTRTTATTTTKRGGATRRSDEVVSGSPPSGTRAAPAANRRAGPGAVQRTSPSLPTRKSNPSSPPTMSTSGPARRTGGSTVSPKTKAPPTSPRGPVTRSRGASVPVELESVKRRTAALTTTTTRRKAAPKPGTKRSPRGVGKRDGPCAPTNPSNPTLHPDSSPRLFTSVIRTAASPTYAAVTAGATVVTAAPPGDHTEGRRLRSMSRASSLPPESSTAMPSSPPLTAILRALSTSPCSPPTIHGEEEGARDGCVVPCVAPATLTTTTVTTTVSGGSIMTSRPLAGGERGAKRAWPVPAIPSLPPIEEVTVTPGPARAASSPSPPAIEEREEEGGEEEDDSPLPWQSAASRRRRRQLRVLSLSPTSPSVSLPLSRSSIPETSPQDRTTPTRRPSAENVRTPEPQRRPPARAQRPPTPPPAPAATRASRGATTTTITATTTTTAAPRVRDQPPSSRQQRRGAQRGTTAGDGRSSRPVSSRAPGDAVRVDRSRDLRDMLFRLGGFASRFRSMGGNNPGRSNQGSSTTGATVPAGRTNAPPGVVRVPTTPQLPRDLEHRRPTPVGQPNPRPRASLRREQAALATERGLLIDLAEAVDNTQDLEEVATQIAAFFKRFGSQPAGVGGRTGGRPTTNARERGRVVNTPVTGPSGRHEGVTPGGTDQVREATRIQRLFRQNRRRAVQEVLMGAPAQCQVPKDQVTEHFRNMYSPASTPPASGPLGFPSEAPTASSDAALVEPFGVSEVDRRLRRMSNSAPGPDGLSYCDLRKADPSCSILTAYFNMIRRLESVPSSWKSSNTVLIHKKGDRMDLSNWRPLAMSDTTPKLFAAVLADRLVSWALHNGRLSPQQKGFLPCEGCYEHNYTLQEILNDARRGKSQVVVAWLDLSNAFGSIPHSTIYHAFAEAQVPLPFRNIVEGLYDGCTTRVRTSQGFTDPVPILSGVKQGCPLSPVAFNLALEPVLRAASGTSVGYTLHGRRYNILAYADDLVLIADTPGGMDTLLSTVEAAAGGVGLRFNPAKCATLHQDSRGSRRAVPTCFSLQGQGLKSLAAGVPYEHLGVPTGFQVKQTPLLSIEELIRDLHAVDRSLLAPWQKCETVGSFILPRLDFLLRGAHVEKGPLKAADKLVRKLAKSWLNLPERASAEVVYLPPSRGGCGLLPLADLADALVIGHAFRLLTTPDPAISGLARDSLREAVARKIGRPPTDEDLATYLSGSLEGEFARTSWDFSTLWSRARNAARRSSESLQLRWEWCAARQELGLRLRGSRGRTTVVTPVARSQVLHRLRSAVTEFYSHRLVSKPDQGKVFGVSSRTKVSNHFLRGGSFTRFADWRFVHRARLNVLPLNGARRWGEGDKRCRRCGENLETLPHVICHCRPHSAAWQLRHDAVVSRIARACRLPGTLRVNQRVEGLTDDLEALRPDIVVRHEPSKSVVIIDVTVTFENGIEAFHAARGRKISKYLPIGAALEEQGYRVVTDAIVVGALGSWDQANEPVLKLLRIGKKYAGLMRRLIVSETIRWGRDIYVEHVSGVRQYAAAPAAVPPADLALPPPAVMVTPLAPFPRTSESNIAPREINNSCDSDIGYIAQTLTQGPSGPV

SEQ ID NO: 210 - protein, 1244 aa, Lasioglossum morio
MSAASRRRRRRQRALSSSPTSPSVSLPLSRSPNPETSLQRTTPTRRPSAEDVRTPEPPRRPPARAQRPPTPPPAPAAPRASRGATTTTITATTTTTAAPRVRNQPPPSRQQRRGAQRGTTAGDGRSSRPVSSRAPGDAARVDRSRDLRELLFRMGGYASRFRSMGGNNPGSSRPSGSTTGATVPAGRTNAPSGVVRVPTTPQLPRDSEHRRPTPVGQPNPRPRASLRREQAALATERGLLIDLAEAVDNPQDLEEVATQIAAFFKRFGSQPAGVGGRTGGRPTTNARERGRVVNTPVTGPSERHEGVTPRRTDQVKEATRIQRLFRQNRRRAVQEVLMGAPAQCQVPKDQVLEHFRNMYSPASTPTAAGPLGFPSEAPTAASDAALVEPFGVSEVDRRLRRMSNSAPGPDGLSYRDLRKADPSCGILTAYFNMVRRLESVPSSWKSSNTVLIHKKGDRMDLSNWRPLAMSDTTPKLFAAVLADRLVSWALHNGRLSPQQKGFLPCEGCYEHNYTLQEILNDARRGKSQVVVAWLDLSNAFGSIPHSTIYHAFAEAQVPLPFRNIVEGLYDGCTTRVRTSQGFTDPVPILSGVKQGCPLSPVAFNLALEPVLRAASGTSVGYTLHGRRYNFLAYADDLVLIADTPGGMDTLLSTVEAAAGGVGLRFNPAKCATLHQDSRGSRRAVPTCFSLQGQALKSLAAGVPYEHLGVPTGFQVKQTPLLSIEELIRDLHAVDRSLLAPWQKCETVGSFILPRLDFLLRGAHVEKGPLKVADKLVRKLAKSWLNLPERASAEVVYLPPSRGGCGLLPLADLADALVIGHAYRLLTAPDPAISGLARDSLREAVARKIGRTPTDLDLATYLSGSLEGEFARTSWDFSTLWSRARNAARRSSNSLQLRWEWCAERQEMGIRLRGSRGRTTVVTPVARSQVLHRLRSAVTEFYSHRLGSKPDQGKVFGVSSRTKVSNHFLRGGSFTRFADWRFIHRARLDVLPLNGARRWGEGDKRCRRCGENMETLPHVLCHCRPHSAAWQLRHDAVVSRIARACRLPGTLRVNQRVEGLTGDLEALRPDIVVRHEPSKSVVIIDVTVTFENGIEAFHAARGRKISKYLPIGAALEEQGYRVVTDAIVVGALGSWDQDNESVLKLLRIGKKYAGLMRRLIVSETIRWGRDIYVEHVSGVRQYAAAPAAVPPVDSTLPPPAVNVASPLAPLPRTDENCFAPREYIDSVTDIGHAARTMTQGPSGPV

SEQ ID NO: 211 - protein, 1384 aa, Lasioglossum morio
MARASSLPPESSAAMPSSPPLTAILRALSASPCSPPTIHGEEEGARDGCVVPCVAPATLTTTTVTTTVSGGSIMTSRPLAGGGERGAKKAWPVPAIPSLPPIEEVTVSPGPARTASSPSPPTIEEREEEGGEEEDDSPLPWQSAASRRRRRRQRALSSSPSSPSLSMPLSRSPNPETSLQRTTPTRRPSAEDVRTPEPPRRPPARAQRPLTPPPAPAVTRASRGATTTNTITATTTTAAPRVRDQPPSSRQQRGGAQRGTTAGDGRSSRPVSSRAPGDAARVDRSRDLRDLLFRMGGYASRFRSMGGNNPGRLNQSGSATGATVPAGRTNAPPDVVRVPTTPQLPRDSGHRRPTPVDQPNPRPRASLRREQAALATERGLLIDLAEAVDNSQDLEEVATQIAAFFKRFGSQPAGVGGRTGGRPTTNARERGRVVNTPVTGPSERHEGVTPRRTDQVKEATRIQRLFRQNRRRAVQEVLMGAPAQCQVPKDQVLEHFRNMYSPASTPTAAGPLGFPSEAPTAASDAALVEPFGVSEVDRRLRRMSNSAPGPDGLSYRDLRKADPSCGILTAYFNMVRRLESVPSSWKSSNTVLIHKKGDRMDLSNWRPLAMSDTTPKLFAAVLADRLVSWALHNGRLSPQQKGFLPCEGCYEHNYTLQEILNDARRGRSQVVVAWLDLSNAFGSIPHSTIYHAFAEAQVPLPFRSIVEGLYDGCTTRVRTSQGFTDPVPILSGVKQGCPLSPVAFNLALEPVLRAASGTSVGYTLHGRRYNILAYADDLVLIADTPGGMETLLNTVEAAAGGVGLRFNPAKCATLHQDSRGSRRAVPTCFSLQGQGLKSLAAGVPYEHLGVPTGFQVKQTPLLSIEELIRDLHAVDRSLLAPWQKCETVGSFILPRLDFLLRGAHVEKGPLKTADKLVRKLAKSWLNLPERASAEVVYLPPSRGGCGLLPLADLADALVIGHAYRLLTAPDPAISGLARDSLREAVARKIGRPPTDLDLATYLSGSLEGEFAGTSWDFSTLWSRARNAARRSSESLQLRWEWCAARQEMGLRLRGSRGRTTVVTPVARSQVLHRLRSAVTEFYSQRLVSKPDQGKVFGVSSRTKVSNHFLRGGSFTRFADWRFVHRARLNVLPLNGARRWGEGDKRCRRCGENLETLPHVICHCRPHSAAWQLRHDAVVSRIARACRLPGTLRVNQRVEGLTDDLEALRPDIVVRHEPSKSVVIIDVTVTFENGIEAFHAARERKIMKYLPIGAVLEEQGYRVVTDAIVVGALGSWDQANEPVLKLLRIGKKYAGLMRRLIVSETIRWGRDIYVEHVSGVRQYAAAPAAVPPVDSTLPPPAVIVASPFALLPRSGESNIASRNNNCDIAIGHEAHTLTQGSSGPV

SEQ ID NO: 212 - protein, 1952 aa, Lasioglossum morio
MAGPSNSPITIYIEFPFPGDFRCPECFGKPGIKLSGVYKTHSDLIKHAKKHHPGHVVVHRCGVCGEHGTGAFPLRYVKAHHTAAHTDRPRPNRCGRGGAYVIPLTTAAPTTARSSLSTTGTNSSGRGRPESYSSCATGAGLTVVPTIATTTTATTTTTTTTTGLRPTATTTFISGGAPRPPKSPAAAPTTRAAATRTTITTTSTTTTRPSSSSLRQQKLSFGPAAAGRGATTRTVTATETRQTPPPTATATSRAKAVVATSRTSITPPPPRTMTRTRSATALAPRASVRKSTTPPPPPAPPKRTAAASRPSTTPPPPRTMTRTRSATALASRASIRKSTTPPPPPAPPKKGITAAARVATKNLPSPPTTTTRTTPTTTTTKRGGATGTVPGTSTSGSGAAPAAIRRSGSGAVQRSSPSPPVRKSTSSSPPTLSPSGPARRTRGSTVSPKTKAPTTSPRGPITRSRGASVPVELECVKRRTAALKDIRRKAAPKPGSKRSPGGVGKRGAPSSAPTTSPNPPHHQSSRPRLFTSVTRTAASPSYAAVTAGATVVSATPPGDQGAVRRQRSTTPISPESPAATPSSQALTTILRALSTSPCSPPTTTGDQEGVRGCCAVSCVAIATLTTTTVTTTVSGGPIMTSRPLAGGVERGSKRTRQEPAVLSLPPIAEVTVSPGPAWTARSPSPPTIEEREEVEREEEEDDSPLPWQSAASRRRRRRQLLSLSLSPVTPPSSSVPPSRSSIPETSPQRTTPPRRPPAGDIRTPELHRRPPARPQRPPTPPPAPEASRAMRRVNDTTITAATTTQAPRTGAQPPPSLQPRRSAQRGTTAGGEDNTRRVSSRAPGDAARVDRSRDLRDMLFRMGGFASRFRSMGGNNPGRSNQGGSTTGATVPAGRTNAPSGVVRVPTTPQLPRDSEHRRPTPVDQPNPRPRASLRREQAALATERGLLIDLAEAVDNTQDLEEVATQIAAFFKRFGSQSAGVGGRTGGRPTTNARERGRVVNTPVTGPSGRHEGVTPGGTDQVREATRIQRLFRQNRRRAVQEVLMGAPAQCQVPKDQVTEHFRNMYSPASTPPASGPLGFPSEAPTASSDAALVQPFGVSEIDRRLRRMSNSAPGPDGLSYRDLRKADPSCSILTTLFNMIRRLESVPSSWKSSNTVLIHKKGDRMDLSNWRPLAMSDTTPKLFAAVLADRLVSWALHNGRLSPQQKGFLPCEGCYEHNYTLQEILNDARRGRSQVVVAWLDLSNAFGSIPHSTIYHAFAEAQVPLPFRNIVEGLYDGCTTRVRTSQGFTDPVPILSGVKQGCPLSPVAFNLALEPVLRAASGTSVGYTLHGRRYNILAYADDLVLIADTPGGMDTLLSTVEAAAGGVGLRFNPAKCATLHQDSRGSRRAVPTCFSLQGQGLKSLAAGVPYEHLGVPTGFQVKQTPLLSIEELIRDLHAVDRSLLAPWQKCETVGSFILPRLDFLLRGAHVEKGPLKTADKLVRKLAKSWLNLPERASAEVVYLPPSRGGCGLLPLADLADALVIGHAFRLLTTPDPAISGLARDSLREAVARKIGRTPTDQDLATYLSGSLEGEFARTSWDFSTLWSRARNAARRSSESLQLRWEWCAARQELGIRLRGSRGRTTVVTPVARSQVLHRLRSAVTEYYSHRLDSKPDQGKVFGVSSRTRVSNHFLRGGSFTRFADWRFVHRARLNVLPLNGARRWGEGDKRCRRCGENLETLPHVMCHCRPHSAAWQLRHDAVVSRIARACRLPGTLRVNQRVEGLTGDLEALRPDIVVRHEPSKSVVIIDVTVTFENGIEAFHAARERKISKYLPIGAVLEEQGYRVVTDAIVVGALGSWDQANEPVLKLLRIGKKYAGLMRRLIVSETIRWARDIYVEHVSGVRQYAAAPAAVPPVDATPPPPAVMVTPPMAPPPRADSVAPRTTNSDRRDNTMGHEALILTQGSSSPV

SEQ ID NO: 213 - protein, 2011 aa, Lasioglossum morio
MAGPSNSPITIYIEFPFPGEFRCPECFGKPGIKLSGVYKTHNDLVKHAKKHHPGHTVIHRCGVCGEHGTGAFPLRYVKAHHTAAHTDRPRPNRCGRGGAYVIPLTTAAPTTVRSPSSTTSTNSSGRGRPESILRSANGAGPTVVPTIATTTTATTTTTTTTADGLRPAATMTPISGGAHPPSPSGPAAVPTTRTAATSTTSTSTTTTTSTTTRRTASSSLTQQRLPFGPSTAGRGATTGTKQATKTRQTTLTTTTATSRARAVVATYRTSTTPPPSQATLRTRSATAAAPAASLRRSTTPPPPPAQTRTRTSATRTSTTPPPSTATTRARTAAAAASKAPLRKSTTPPPPPPPTRRRTEAGRPSTTPPTSKATSGTKPAAAAAPRAPPRKSTTPPPPPATSRTRTATPPATVATSKLPSPPTTTTRTTATTTTKRGGATRRSDEVVSGSPPSGTRAAPAANRRAGPGAVQRTSPSLPTRKSNPSSPPTMSTSGLARRTRGSTVSPKTKAPPTSPRGPVTRSRGASVPVELESVKRRTAALTTTTTRRKAAPKPGTKRSPRGVGKRDGPCAPTNPSNPTLHPDSSPRLFTSVIRTAASPTYAAVTAGATVVTAAPPGDHTEGRRLRSMSRASSLPPESSTAMPSSPPLTAILRALSTSPCSPPTIHGEEEGARDGCVVPCVAPATLTTTTVTTTVSGGSIMTSRPLAGGERGAKRAWPVPAIPSLPPIEEVTVTPGPARAASSPSPPAIEEREEEGGEEEDDSPLPWQSAASRRRRRRQRALSSSPSSPSFSLPLSRSSIPETSPQDRTTPTRRPSAENVRTPEPQRRPPARAQRPPTPPPAPAATRASRGATTTTITATTTTTAAPRVRDQPPSSRQQRRGAQRGTTAGDGRSSRPVSSRAPGDAARVDRSRDLRDMLFRLGGFASRFRSMGGNNPGRSNQGGSTTGATVPAGRTNAPPGVVRVPTTPQLPRDLEHRRPTPVGQPNPRPRASLRREQAALATERGLLIDLAEAVDNTQDLEEVATQIAAFFKRFGSQPAGVGGRTGGRPTTNARERGRVVNTPVTGPSGRHEGVTPRGTDQVREATRIQRLFRQNRRRAVQEVLMGAPAQCQVPKDQVTEHFRNMYSPASTPPASGPLGFPSEAPTASSDAALVQPFGVSEVDRRLRRMSNSAPGPDGLSYRDLRKADPSCSILTAYFNMIRRLESVPSSWKSSNTVLIHKKGDRMDLSNWRPLAMSDTTPKLFAAVLADRLVSWALQNGRLSPQQKGFLPCEGCYEHNYTLQEILNDARRGKSQVVVAWLDLSNAFGSIPHSTIYHAFAEAQVPLPFRNIVEGLYDGCTTRVRTSQGFTDPVPILSGVKQGCPLSPVAFNLALEPVLRAASGTSVGYTLHGRRYNILAYADDLVLIADTPGGMDTLLNTVEAAAGGVGLRFNPAKCATLHQDSRGSRRAVPTCFSLQGQGLKSLAAGVPYEHLGVPTGFQVKQTPLLSIEELIRDLHAVDRSLLAPWQKCETVGSFILPRLDFLLRGAHVEKGPLKVADKLVRKLAKSWLNLPERASAEVVYLPPSRGGCGLLPLADLADALVNGHAYRLLTAPDPAISGLARDSLREAVARKIGRPPTDLDLATYLSGSLEGEFARTSWDFSTLWSRARNAARRSSNSLQLRWEWCAERQELGIRLRGSRGRTTVVTPVARSQVLHRLRSAVTEFYSHRLGSKPDQGKVFGVSSRTKVSNHFLRGGSFTRFADWRFIHRARLDVLPLNGARRWGEGDKRCRRCGENMETLPHVLCHCRPHSAAWQLRHDAVVSRIARACRLPGTLRVNQRVEGLTGDLEALRPDIVVRHEPSKSVVIIDVTVTFENGIEAFHAARGRKISKYLPIGAALEEQGYRVVTDAIVVGALGSWDQDNESVLKLLRIGKKYAGLMRRLIVSETIRWGRDIYVEHVSGVRQYAAAPAAVPPVDSTLPPPAVNVASPLAPLPRTDENCFAPREYIDSVTDIGHAARTMTQGPSGPV

SEQ ID NO: 214 - protein, 2000 aa, Lasioglossum morio
MAGPSNSPITIYIEFPFPGEFRCPECFGKPGIKLSGVYKTHNDLVKHAKKHHPGHIVIHRCGVCGEHGTGAFPLRYVKAHHTAAHTDRPRPNRCGRGGAYVIPLTTAAPTTVRSSLSTTSTNFSGRGRPESILRDANGAGTTIVTTTSTTTPTTTTPTTTTTADGLRPAATTVTSGGAPPPPTSPAAVPTTRTAATSTISTTTTTTTSTTTRRTASSSLRQQKLSFGPAAAGRGVTTETNTATETRQTLPPTSTATSRARAVVATSRTSTTPPPPRVMTRTRSATALASAASLRKSTTPPPPPAPTRKRTTATRTSNTPPTSTATTRAAAASKAPLRKSTTPPPPPPPTRRRNEVGRPSTTPPPSTAASRPAAAAASRAPLRKSTTPPPPPAPTTRTRTATTSATVATTKKLPSPSTTSTRTTTTTTTKRGGATDKRLESVSGSTPPGTRAAPAANRRAGPGAVQRTSPSLPTRKSTPSSPPTLSNSGPARRTRGSTVSPKTKAPPTSPRGPITRSRGASVPVELESVKRRTAALTTTTTRRKAAPKPGTKRSPRGVGKREEACAPTNPSNPTLHPDSSPRLFTSVIRTAASPTYAAVTAGATVVSATPPGDQGALRRQRSMTPIPPESPAATPSSLALTTILRALSTSPCSPPTTFGEQAGARGCCVVSCVAVATLTTTTVTTTVSGGSIMTSRPLAGGERGAKRAWPVPAIPSLPPIEEVTVPPGPARTASSPSPPSIEEREEEGGEEDDDSPLPWQSAASRRRRRRQRALSSSPSSPSFSMPLSRSPNPETSLQRTTPTRRPSAEDVRTPEPPRRPPARGQRPPTPPPAPAVTRATRGATTTNTITATTTTAAPRVRNQPPPSRQQRRGAQRGTTAGDGRNSRSGSSRAPGDAARVDRSRDLRDLLFRMGGYASRFRSMGGNNPGRSNQGGSTTGATVPAGRTNAPSGVVRVPTTPQLPRDSEHRRPTPVGQPNPRPRASLRREQAALATERGLLIDLAEAVDNPQDLEEVATQIAAFFKRFGSQPAGVGGRTGGRPTTNARERGRVVNTPVTGPSGRHEGVTPRGTDQVREATRIQRLFRQNRRRAVQEVLMGAPAQCQVPKDQVTEHFRNMYSPASTPPASGPLGFPSEAPTASSDAALVQPFGVSEVDRRLRRMSNSAPGPDGLSYRDLRKADPSCSILTAYFNMIRRLESVPSSWKSSNTVLIHKKGDRMDLSNWRPLAMSDTTPKLFAAVLADRLVSWALQNGRLSPQQKGFLPCEGCYEHNYTLQEILNDARRGKSQVVVAWLDLSNAFGSIPHSTIYHAFAEAQVPLPFRNIVEGLYDGCTTRVRTSQGFTDPVPILSGVKQGCPLSPVAFNLALEPVLRAASGTSVGYTLHGRRYNILAYADDLVLIADTPGGMDTLLNTVEAAAGGVGLRFNPAKCATLHQDSRGSRRAVPTCFSLQGQGLKSLAAGVPYEHLGVPTGFQVKQTPLLSIEELIRDLRAVDRSLLAPWQKCETVGSFILPRLDFLLRGAHVEKGPLKTADKLVRKLAKSWLNLPERASAEVVYLPPSRGGCGLLPLADLADALVIGHAFRLLTTPDPAISGLARDSLREAVARKIGRPPTDEDLATYLSGSLEGEFARTSWDFSTLWSRARNAARRSSESLQLRWEWCAARQELGLRLRGSRGRTTVVTPVARSQVLHRLRSAVTEYYSHRLDSKPDQGKVFGVSSRTKVSNHFLRGGSFTRFADWRFVHRARLNVLPLNGARRWGEGDKRCRRCGENLETLPHVICHCRPHSAAWQLRHDAVVSRIARACRLPGTLRVNQRVEGLTDDLEALRPDIVVRHEPSKSVVIIDVTVTFENGIEAFHAARERKIMKYLPIGAALEERGYRVVTDAIVVGALGSWDQDNESVLKLLRIGKKYAGLMRRLIVSETIRWGRDIYVEHVSGVRQYAAAPAAVPPADVTLPPPAVNVASPLALPHRSDESIAPRNENCDRDIGHTAHTLTQGPSGPI

SEQ ID NO: 215 - protein, 1982 aa, Lasioglossum morio
MAGPTSSPLTIYIEFPFPGEFRCPECYGKPGTRTSGVYKTHNDLVKHAKKCHPGHIVVHRCGVCGEHGTGSFPLRYVKAHHLAAHTDGPRPSRCGRGGAYVIPLTTAAPTTVRSSLSTTSTNFSGRGRPESILRDASGAGPTIVTTTSTTTPTTTTPTTTTTADGLRPAATTSPISGGAHTPSPSGPAAAPTTRAAATSTSTTTTTTTSTTTRRTASSSLRQQKLSFGPATAGRGVTTGTKTVTKTRQTPPTTSTATSGTRAVVATSRSSTTPPPPRAMTRTRSATALASTASLRKSTTPPPPPAPSRTRTSVTRTSTTPPPSTATTRTRTAAAAASKAPLRKSTTPPPPPPPTRRRTEAGRPSTTPPTSKATSGTKPAAAAAPRAPPRKSTTPPPPPATSRTRTATSTAKVATAKKLPSPPPTSTRTATTTTTKRGGVTNRSLETVSGSTPPGTRAAPAADRRAGSGAAQRASTSPPTRKSTPSSPPTLSNSGPARRTRGSTVSPRTKAPPTSPRGPITRSRGASVPVELESVKRKTAALNTTRRKAAPTSGSKRSPRGVGKRDGPCAPTNHSNPTLHPDSSPRSFTSVIRTAASPTYAAVTAGATVVTAAPPGDQTTLNTILRAHSTSPCSPPTTSGEQAGARGCCVVSCVAVATLTTTTVTTTVSGGSIMTSRPLAGGGERGAKRAWPVPAIPSLPPIEEVTVSPGPARTASSPSPPAIEEREEEGGEEEDDSPLPWMSAASRRRRRRQRALSSSPTSPSVSLPLSRSPNPETSLQRTTPTRRPSAEDVRTPEPPRRPPARAQRPPTPPPAPAVTRASRGATTTNTITATTTTTAAPRVRNQPPPSRQQRRGAQRGTTAGDGRSSRPVSSRAPGDAARVDRSRDLRDLLFRMGGYASRFRSMGGNNPGRSNQGGSTTGATVTAGRTNAPSGVVRVPATPQLTRDSEHRRPTPVGQPNPRPRASLRREQAALATERGLLIDLAEAVDNPQDLEEVATQIAAFFRRFGSQPAGVGGRTGGRPTTNAGRRGRVVNTPVTGPSERHEGVTPRRTDQVKEATRIQRLFRQNRRRAVQEVLMGAPAQCQVPKDQVLEHFRNMYSPASTPTAAGPLGFPSEAPTAASDAALVEPFGVSEVDRRLRRMSNSAPGPDGLSYRDLRKADPSCGILTAYFNMVRRLESVPSSWKSSNTVLIHKKGDRMDLSNWRPLAMSDTTPKLFAAVLADRLVSWALHNGRLSPQQKGFLPCEGCYEHNYTLQEILNDARRGRSQVVVAWLDLSNAFGSIPHSTIYHAFAEAQVPLPFRNIVEGLYDGCTTRVRTSQGFTDPVPILSGVKQGCPLSPVAFNLALEPVLRAASGTSVGYTLHGRRYNILAYADDLVLIADTPGGMETLLNTVEAAAGGVGLRFNPAKCATLHQDSRGSRRAVPTCFSLQGQGLKSLAAGVPYEHLGVPTGFQVKQTPLLSIEELIRDLHAVDRSLLAPWQKCETVGSFILPRLDFLLRGAHVEKGPLKVADKLVRKLAKSWLNLPERASAEVVYLPPSRGGCGLLPLADLADALVIGHAYRLLTAPDPAISGLARDSLREAVARKIGRPPTDLDLATYLSGSLEGEFARTSWDFSTLWSRARNAARRSSNSLQLRWEWCAERQELGIRLRGSRGRTTVVTPVARSQVLHRLRSAVTEFYSHRLGSKPDQGKVFGVSSRTKVSNHFLRGGSFTRFADWRFIHRARLDVLPLNGARRWGEGDKRCRRCGENMETLPHVLCHCRPHSAAWQLRHDAVVSRIARACRLPGTLRVNQRVEGLTGDLEALRPDIVVRHEPSKSVVIIDVTVTFENGIEAFHAARGRKISKYLPIGAALEEQGYRVVTDAIVVGALGSWDQDNESVLKLLRIGKKYAGLMRRLIVSETIRWGRDIYVEHVSGVRQYAAAPAAVPPVDTTLPPTAVTVTPPLAPLPRVIESIAPRAHSDSDIGHAARTLTQGPSGPI

SEQ ID NO: 216 - protein, 1310 aa, Lasioglossum morio
MTSRPLAGGERGAKRAWPVPAIPSLPPIEEVTVSPGPARAVSNPSPPTIEEREEEGGEEEDDSPLPWMSAASRRRRRRQRALSSSPTSPSVSLPLSRSPNPETSLQRTTPTRGPSAEDVRTPEPPRRPPARAQRPLTPPPAPAAPRALRGATTITITATTTTTAAPRVRNQPPPSRQQRRGAQRGTTAGDGRNSRSGSSRAPGDAARVDRSRDLRDLLFRMGGYASRFRSMGGNNPGRSNQGGSTTGATVPAGRTNAPSGVVRVPTTPQLTRDSEHRRPTPVDQPNPRPRASLRREQAALATERGLLIDLAEAVDNLQDLEEVATQIAAFFKRFGSQPAGVGGRTGGRPTTNARERGRVVNTPVTGPSGRHEGATPRGTDQVREATRIQRLFRQNRRRAVQEVLMGAPAQCQVPKDQVTEHFRNMYSPASTPPASGPLGFPSEAPTASSDAALVQPFGVSEVDRRLRRMSNSAPGPDGLSYRDLRKADPSCSILTAYFNMIRRLESVPSSWKSSNTVLIHKKGDRMDLSNWRPLAMSDTTPKLFAAVLADRLVSWALHNGRLSPQQKGFLPCEGCYEHNYTLQEILNDARRGRSQVVVAWLDLSNAFGSIPHSTIYHAFAEAQVPLPFRNIVEGLYDGCTTRVRTSQGFTDPVPILSGVKQGCPLSPVAFNLALEPVLRAASGTSVGYTLHGRRYNILAYADDLVLIADTPGGMDTLLSTVEAAAGGVGLRFNPAKCATLHQDSRGSRRAVPTCFSLQGQGLKSLAAGVPYEHLGVPTGFQVKQTPLLSIEELIRDLHAVDRSLLAPWQKCETVGSFILPRLDFLLRGAHVEKGPLKLADKLVRKLAKSWLNLPERASAEVVYLPPSRGGCGLLPLADLADALVIGHAFRLLTTPDPAISGLARDSLREAVARKIGRPPTDQDLATYLSGSLEGEFARTSWDFSTLWSRARNAARRSSESLQLRWEWCAARQELGLRLRGSRGRTTVVTPVARSQVLHRLRSAVTEFYSHRLVSKPDQGKVFGVSSRTKVSNHFLRGGSFTRFADWRFVHRARLNVLPLNGARRWGEGDKRCRRCGENLETLPHVICHCRPHSAAWQLRHDAVVSRIARACRLPGTLRVNQRVEGLTDDLEALRPDIVVPHEPSKSVVIIDVTVTFENGIEAFHAARERKIMKYLPIGAALEEQGYRVVTDAIVVGALGSWDQDNESVLKLLRIGKKYAGLMRRLIVSETIRWGRDIYVEHVSGVRQYAAAPVAVPSVDVTLPPPAVNVASPLALLPRTSESNIAPRNHIVDEAIGHEAHTLTQGPSGPV

SEQ ID NO: 217 - protein, 1100 aa, Lasioglossum lativentre
MARLGELREMYVRLGGYASRFRSMGGNNPGNSLPGGRRGGMTAPAERTNAPGSVVGASATRQTPQGLEHRRSTPAGQPNPCPRASRRRELAALATERELLVGLAEAVDNPQDLEEVAMQIATFFQGFRPQPAGVGGRTGGRPTTGARARGRVVNTSVPRPSGRAELGAERRTDQVKEATRLQRLFRQNRRRAVQEVLMGAPVQCQVPKDRVMQHFLDMYSPASTPATSGPLGFPSEAPTAASDAALVEPFGVSEVDRRIRRMSNSAPGPDGLSYRDLRRADPSCVVLTAYFNLCRRLESIPSSWKASNTVLIHKKGDRDDLSNWRPLAMSDTTPKLFAAVLADRLVSWALHNGRLSPQQKGFLPCEGCYEHNYTLQEILNDAHRGKSQVVVAWLDLSNAFGSIPHDTIYRAFAEASVPLPFRNIVEGLYDGCTTRVRTSQGFTDPVPILSGVKQGCPLSPVAFNLALEPVLRAITATSAGYTLHGRRYSVLAYADDLALTADSPEGMETLLRTVEAAANGVGLRFNPAKCATLHLDSRGTRRALPTCFSLQGQELKALAAGAPYEHLGVPTGFQVRQTPLSTIEELVRDLHAVDRSLLAPWQKCEAVGSFILPRLDYMLRGAHVEKGPLKEADKLVRKLAKSWLNLPQRASAEVVYLPPSRGGCELLPLADLADALVIGHAFRLLTTPDPVVSGLARDSLSKAVARKIGRTATEQDLATYLSGSLEGEFARDGGDIPTLWSRARNAARRSSDMLQLRWEWSAARQEMGLRLRGSRGRTTVVTPEARCQVLHRLRAAVTEFYTERLGKKPDQGKVFGQSSRTSVSNHFLRGGSFTRFADWRFVHRARLNVLPLNGARRWGEGDKRCRRCGESPETLPHVICHCRPHSAAWQLRHDAVVSRIARACRLPGSLRVNQRVEGLTGDLEALRPDIVVRHEPSKSVVIIDVTVAFENGVEAFEAARERKISKYLPIGAVLEGQGYRVVTDAIVVGALGSWDWANEAVLKLLRVGKSYAGLMRRLIVSETIRWGRDIYVEHVSGVRQYAAPPVAAPAVAPPSSSPADDGAPPLDSAPSANNPLAPRIYGESDGLNAPILTQGPYGPA

SEQ ID NO: 218 - protein, 2001 aa, Lasioglossum morio
MAGPSTSPVTIYIEFPFPGDFRCPECFGKPGIKLSGVYKTHNDLIKHAKKHHPGHIVIHRCGVCGEHGTGAFPLRYVKAHHLAAHTDGPRPNRCGRGGAYVIPLTTAAPTTVRSSLSTTSTNFSGRGRSESILRDASGAGTTIVTTTSTTTPTTTTPTTTTTADGLRPAATTVTSGGAPPPPTSPAAVPTTRTAATSTISTTTTTTTSTTTRRTASSSLRQQKLSFGPAAAGRGVTTETNTATETRQTLPPTSTATSRARAVVATSRTSTTPPPPRVMTRTRSATALASAASLRKSTTPPPPPAPTRKRTTATRTSNTPPTSTATTRAAAASKAPLRKSTTPPPPPPPTRRRNEVGRPSTTPPPSTAASRPAAAAASRAPLRKSTTPPPPPAPTTRTRTATTTATVATTKKLPSPSTTSTKTTTTTTTTKRGGATDKRLESVSGSTPPGTRAAPAANRRAGPGAVQRTSPSLPTRKSTPSSPPTLSNSGPARRTRGSTVSPKTKAPPTSPRGPVTRSRGASVPVELESVKRRTAALTTTTTRRKAAPKPGTKRSPRGVGKREEACAPTNPSNPTLHPDSSPRLFTSVIRTAASPTYAAVTAGATVVSATPPGDQGALRRQRSMTPIPPESPAATPSSLALTTILRALSTSPCSPPTTFGEQAGARGCCVVSCVAVATLTTTTVTTTVSGGSIMTSRPLAGGERGAKRTWPVPAIPSLPPIEEVTVTPGPARAASSPSPPAIEEREEEGGEEDDDSPLPWQSAASRRRRRRQRALSSSPSSPSFSMPLSRSPNPETSLQRTTPTRRPSAEDVRTPEPIRRTPARAQRPHTPPPAPDANRATRGVTTTNTITAITTTAAPRVRNQPPPSRQQRRGAQRGTTAGDGRSSRPVSIRAPGDAARVDRSRDLRDLLFRMGGYASRFRSMGGNNPGRSSQGGSTTGATVPAGRTNAPSGVVRVPTTPQLPRDSEHRRPTPVGQPNPRPRASLRREQAALATERGLLIDLAEAVDNPQDLEEVATQIAAFFKRFGSQPAGVGGRTGGRPTTNARERGRVVNTPVTGPSGRHEGVTPRGTDQVREATRIQRLFRQNRRRAVQEVLMGAPAQCQVPKDQVTEHFRNMYSPASTPPASGPLGFPSEAPTASSDAALVQPFGVSEVDRRLRRMSNSAPGPDGLSYRDLRKADPSCSILTAYFNMIRRLESVPSSWKSSNTVLIHKKGDRMDLSNWRPLAMSDTTPKLFAAVLADRLVSWALQNGRLSPQQKGFLPCEGCYEHNYTLQEILNDARRGKSQVVVAWLDLSNAFGSIPHSTIYHAFAEAQVPLPFRNIVEGLYDGCTTRVRTSQGFTDPVPILSGVKQGCPLSPVAFNLALEPVLRAASGTSVGYTLHGRRYNILAYADDLVLIADTPGGMDTLLNTVEAAAGGVGLRFNPAKCATLHQDSRGSRRAVPTCFSLQGQGLKSLAAGVPYEHLGVPTGFQVKQTPLLSIEELIRDLHAVDRSLLAPWQKCETVGSFILPRLDFLLRGAHVEKGPLKTADKLVRKLAKSWLNLPERASAEVVYLPPSRGGCGLLPLADLADALVIGHAFRLLTTPDPAISGLARDSLREAVARKIGRPPTDEDLATYLSGSLEGEFARTSWDFSTLWSRARNAARRSSESLQLRWEWCAARQELGLRLRGSRGRTTVVTPVARSQVLHRLRSAVTEYYSHRLDSKPDQGKVFGVSSRTKVSNHFLRGGSFTRFADWRFVHRARLNVLPLNGARRWGEGDKRCRRCGENLETLPHVICHCRPHSAAWQLRHDAVVSRIARACRLPGTLRVNQRVEGLTDDLEALRPDIVVRHEPSKSVVIIDVTVTFENGIEAFHAARERKIMKYLPIGAALEEQGYRVVTDAIVVGALGSWDRDNESVLKLLRIGKKYAGLMRRLIVSETIRWGRDIYVEHVSGVRQYAAAPAAVPPADVTLPPPAVNVASPLALPHRSDESIAPRNENCDRDIGHTAHTLTQGPSGPI

SEQ ID NO: 219 - protein, 1092 aa, Lasioglossum morio
MLFRLGGFASRFRTMGGNNPGRSNQGGSTTGATVPAGRTNAPPGVVRVPTTPQLPRDSGHRRPTPVDQPNPRPRASLRREQAALATERGLLIDLAEAVDNPQDLEEVATQIAAFFKRFGSQPTGVGGRTGGRPTTNARERGRVVNTPVTGPSGRHEGVTPRGTDQVREATRIQRLFRQNRRRAVQEVLMGAPAQCQVPKDQVTEHFRNMYSPASTPPASGPLGFPSEAPTASSDAALVQPFGVSEVDRRLRRMSNSAPGPDGLSYRDLRKADPSCSILTAYFNMIRRLESVPSSWKSSNTVLIHKKGDRMDLSNWRPLAMSDTTPKLFAAVLADRLVSWALHNGRLSPQQKGFLPCEGCYEHNYTLQEILNDARRGRSQVVVAWLDLSNAFGSIPHSTIYHAFAEAQVPLPFRNIVEGLYDGCTTRVRTSQGFTDPVPILSGVKQGCPLSPVAFNLALEPVLRAASGSSVGYTLHGRRYNILAYADDLVLIADTPGGMDTLLSTVEAAAGGVGLRFNPAKCATLHQDSRGSRRAVPTCFSLQGQGLKSLAAGVPYEHLGVPTGFQVKQTPLLSIEELIRDLHAVDRSLLAPWQKCETVGSFILPRLDFLLRGAHVEKGPLKVADKLVRKLAKSWLNLPERASAEVVYLPPSRGGCGLLPLADLADALVIGHAYRLLTAPDPAISGLARDSLREAVARKIGRPPTDLDLATYLSGSLEGEFARTSWDFSTLWSRARNAARRSSNSLQLRWEWCAERQELGIRLRGSRGRTTVVTPVARSQVLHRLRSAVTEFYSHRLGSKPDQGKVFGVSSRTKVSNHFLRGGSFTRFADWRFIHRARLDVLPLNGARRWGEGDKRCRRCGENMETLPHVLCHCRPHSAAWQLRHDAVVSRIARACRLPGTLRVNQRVEGLTGDLEALRPDIVVRHEPSKSVVIIDVTVTFENGIEAFHAARGRKISKYLPIGAALEEQGYRVVTDAIVVGALGSWDRDNESVLKLLRIGKKYAGLMRRLIVSETIRWGRDIYVEHVSGVRQYAAAPAAVPPVDTTLPPTAVTVTPPLAPLPRVIESIAPRAHSDSDIGHAARTLTQGPSGPI

SEQ ID NO: 220 - protein, 1935 aa, Lasioglossum morio
MAGPTSSPITIYIEFPFPGDFRCPECFGKPGIKLSGVYKTHNDLIKHAKKHHPGHVVVHRCGVCGEHGTGAFPLRYVKAHHLAAHTDGPRPNRCGRGGAYVIPLTTAAPTTVRSSLSTTSTNFSGRGRPESILRDASGAGPTIVITTSTMTPTTTTPTTTTTADGLRPAATTVTSGGAPPPPTSPAAVPTTRTAATSTISTTTMTTTSTTTRRTASSSLRQQKLSFGPAAAGRGVTTETNTATETRQTLPPTSTATSRARAVVATSRTSTTPPPPRVMTRTRSATALASAASLRKSTTPPPPPAPTRKRTTATRTSNTPPTSTATTRAAAASKAPLRKSTTPPPPPPPTRRRNEVGRPSTTPPPSTAASRPAAAAASTAPLRKSTTPPPPPAPTTRTRTATTTATVATTKKLPSPSTTSTKTTTTTTTTTKRGGATDKRLESVSGSTPPGTRAAPAANRRAGPGAVQRTSPSLPTRKSTPSSPPTLSNSGPARRTRGSTVSPKTKAPPTSPRGPVTRSRGASVPVELESVKRRTAALTTTTTRRKAAPKPGTKRSPRGVGKREEACAPTNPSNPTLHPDSSPRLFTSVIRTAASPTYAAVTAGATVVSATPPGDQGALRRQRSMTPISPESPAATPSSLALTTILRALSTSPCSPPTTFGEQAGARGCCVVSCVAVATLTTTTVTTTVSGGSIMTSRPLAGGERGAKRAWPVPAIPSLPPIEEVTVTPGPARAASSPSPPAIEEREEEGGEEEDDSPLPWQSAASRRRRRRQRALSSSPSSPSFSLPLSRSSIPETSPQDRTTPTRRPSAENVRTPEPQRRPPARAQRPPTPPPVPAATRASRGATTTTITATTTTTAAPRVRDQPPSSRQQRRGAQRGTTAGDGRSSRPVSSRAPGDAARVDRSRDLRDMLFRLGGFASRFRSMGGNNPGRSNQGGSTTGATVPAGRTNAPPGVVRVPTTPQLPRDLEHRRPTPVGQPNPRPRASLRREQAALATERGLLIDLAEAVDNTQDLEEVATQIAAFFKRFGSQPAGVGGRTGGRPTTNARERGRVVNTPVTGPSGRHEGVTPRGTDQVREATRIQRLFRQNRRRAVQEVLMGAPAQCQVPKDQVTEHFRNMYSPASTPPASGPLGFPSEAPTASSDAALVQPFGVSEVDRRLRRMSNSAPGPDGLSYRDLRKADPSCSILTAYFNMIRRLESVPSSWKSSNTVLIHKKGDRMDLSNWRPLAMSDTTPKLFAAVLADRLVSWALHNGRLSPQQKGFLPCEGCYEHNYTLQEILNDARRGRSQVVVAWLDLSNAFGSIPHSTIYHAFAEAQVPLPFRSIVEGLYDGCTTRVRTSQGFTDPVPILSGVKQGCPLSPVAFNLALEPVLRAASGTSVGYTLHGRRYNILAYADDLVLIADTPGGMETLLNTVEAAAGGVGLRFNPAKCATLHQDSRGSRRAVPTCFSLQGQALKSLAAGVPYEHLGVPTGFQVKQTPLLSIEELIRDLHAVDRSLLAPWQKCETVGSFILPRLDFLLRGAHVEKGPLKVADKLVRKLAKSWLNLPERASAEVVYLPPSRGGCGLLPLADLADALVIGHAYRLLTAPDPAISGLARDSLREAVARKIGRTPTDLDLATYLSGSLEGEFARTSWDFSTLWSRARNAARRSSNSLQLRWEWCAERQEMGIRLRGSRGRTTVVTPVARSQVLHRLRSAVTEFYSHRLGSKPDQGKVFGVSSRTKVSNHFLRGGSFTRFADWRFIHRARLDVLPLNGARRWGEGDKRCRRCGENMETLPHVLCHCRPHSAAWQLRHDAVVSRIARACRLPGTLRVNQRVEGLTGDLEALRPDIVVRHEPSKSVVIIDVTVTFENGIEAFHAARGRKISKYLPIGAALEEQGYRVVTDAIVVGALGSWDQDNESVLKLLRIGKKYAGLMRRLIVSDKERSRTSGTGFS

SEQ ID NO: 221 - protein, 1895 aa, Lasioglossum lativentre
MEGPNSSPLIILIDFPFPAEFRCPECYGKPGIKLGGTYKSHTDLAKHAKKYHPGHSIVHRCGECGELGTGKYPLKTVKAHHTAKHSGIGAPGRSGTSRTTTGSTSTRTSGARSSFSATSTNVSGRGRPESILRFAAPTGLTRAPTIATTTTTTTTTTTTVITTAAAVPSRPPPTASPPCGAPTTTSSATRTTTTAATTTTAATRTTAPTTVTRPPPTAPLRLSAGATAGGRTATAAPSPPSAPSTTRATTTTRAVPPPSKAPQRRATIAGATSRPAPRTSGTPPLPAPLRTRAAAATASAASIRKSLTPPTLRAGLRTTTAAARPAPATRKPPTPPPSTANRASLPRRSGEAALAPTPPGTRTVPAAKTRAGTSAAPKRSPSQPGRRPPPSSVNTSGDEPVARRTRGATISPPKRSPTTTSRGLMTRSRRGASVPVELPGARRPTTTTTRRVAATKAGPKKRTTPPRKSGLGQGGVFAPAPAPTTKPNPDSRTATPPRPFTSVVRTAGSPSYAAVTAGTTVTTGTRGDCGERRQLRSATRAASVPPELMAGAVSSPQLSGTTIATWSPPCSTPPTIRGVQGEAGGFAVSSAVPATLTTVTVTVTTSGGPIVTSRPFAGGVERVKRTRQVPEVLSLPPIMEVVTPGPARAAAAAGTPTNARRTQEEEEEDDASPMPWQLATSRSRRIRRGPLSPSSSSESSGEDTPPPPSRTHRRPPARVQHPSPPVSTPVTSGALRGTAPHRMETRPSAPPSAFPIFHRGPGERHPQPRGGGRLSSHHTSDGMSGARRAPGGSARMSNRRVNNDPMGGFASRFRSMGGNKPVRPHPGGSARVGTRVPAGQANAPAGVVRAPATNRHPQVPEHRQPRTDGQPLPRPRASRAREQAALARERELLVDLTRAVDNIQDLEEVASQIAAFFKSFGKQPVGGGASERPTTGGGRRRRGATTGRQRRPDSAGLDSVLSGADRVKEATRLQRLFRENRRRAVQEVLTGPPVQCQVERGRVLQHFLDMYSPADELHAAGPLGFPSEAPGSGSNAALISPFEVREVDRRIRRMSNSAPGPDGLSYRDLRKADPDCVVLTAFFNMCRRLESVPASWKESNTVLIHKKGDREDLSNWRPLAMSDTTPKLFAAVLADRLVSWAVDNERLSPQQKGFLPCEGCFEHNFALQEVLDDARGGRRQVVVAWLDLTNAFGSIPHSTIYRAFAEAAVPLPFQNIVKELYRGCTTRVRTAQGFTDPVPILSGVKQGCPLSPVAFNLALEPVLRAVTASGVGYALHGQRYSVLAYADDLALIADTPEGMETLLKTVEAAANGVGLRFNPSKCATLHQDSRGTRRVLPTRFSLQGQEIRALAAGQPYEHLGVPTGFQVRQTPLSSIEELVRDLRAVDQSLLAPWQKCEAVATFVLPRLDFMLRGASVEKGPLKVADKLLRKFAKSWLNLPQRASAEVVYLPPSRGGCGLLPLADLADALVIGHAFRLLTAPDPMISGLAGASLRKAVAGKIKREPTNDDLATYLSGSLEGEFAKDSGGFSTLWSRARNAARRSGGMLQLRWQWSEARGEMAVGLRGSQGRTVVVPPNARHQILRRLRSAVVEYYVDRLGNKPDQGKVFGVSSRMKVSNHFLRGGSFTRFADWRFIHRARLDVLPLNGARRWGEGDKRCRRCGEALETLPHVMCHCTPHAAAWQLRHDAIVARISRACRLPGELRVNRRVEGLTGDLEALRPDIVVRHEPSKSVVIVDVTVAFENGAEAPKLARERKILKYLPLGAALEGQGYKVVIDAIVIGALGSWDPDNEATLKLLRIGRTYAALMRRLIVSETIRWGRDIYVEHVSGVRQYQVAPPPRVSVPDPLTPRESNGGAVPRLDVPPSAHDVFAPRSSAENDGPEALILTQGPSGPVE

SEQ ID NO: 222 - protein, 2006 aa, Lasioglossum morio
MAGPTNSPLTIYIEFPFPGEFRCPECFGKPGIKLSGVYKTHSDLIKHAKKHHPGHIVVHRCGVCGEHGTGAFPLRYVKAHHTAAHTDRPRPNRCGRGGAYVIPLNTAAPTTVRSSLSTTSTNFSGRGRPESILRDASGAGTTIVTTTSTTTPTTTTPTTTTTADGLRPAATTVTSGGAPPPPTSPAAVPTTRTAATSTISTTTTTTTSTTTRRTASSSLRQQKLSFGPAAAGRGVTTETNTATETRQTLPPTSTATSRARAVVATSRTSTTPPPPRVMTRTRSATALASAASLRKSTTPPPPPAPTRKRTTATRTSNTPPTSTATTRAAAASKAPLRKSTTPPPPPPPTRRRNEVGRPSTTPPPSTAASRPAAAAASRAPLRKSTTPPPPPAPTTRTRTATTTATVATTKKLPSPSTTSTKTTTTTTTTKRGGATDKRLESVSGSTPPGTRAAPAANRRAGPGAVQRTSPSLPTRKSTPSSPPTLSNSGPARRTRGSTVSPKTKAPPTSPRGPVTRSRGASVPVELESVKRRTAALTTTTTRRKAAPKPGTKRSPRGVGKREEACAPTNPSNPTLHPDSSPRLFTSVIRTAASPTYAAVTAGATAVTAAPPGDHNEGRRLRSMARASSLPPESSAAMPSSPPLTAILRALSASPCSPPTIHGEEEGARDGCVVPCVAPATLTTTTVTTTVSGGSIMTSRPLAGGGERGAKKAWPVPAIPSLPPIEEVTVSPGPARTASSPSPPTIEEREEEGGEEEDDSPLPWQSAASRRRRRRQRALSSSPSSPSLSMPLSRSPNPETSLQRTTPTRRPSAEDVRTPEPPRRPPARAQRPLTPPPAPAVTRASRGATTTNTITATTTTAAPRVRDQPPSSRQQRRGAQRGTTAGDGRSSRPVSSRAPGDAARVDRSRDLRDLLFRMGGYASRFRSMGGNNPGRLNQSGSATGATVPAGRTNAPPGVVRVPTTPQLPRDSGHRRPTPVDQPNPRPRASLRREQAALATERGLLIDLAEAVDNSQDLEEVATQIAAFFKRFGSQPAGVGGRTGGRPTTNARERGRVVNTPVTGPSERHEGVTPRRTDQVKEATRIQRLFRQNRRRAVQEVLMGAPAQCQVPKDQVLEHFRNMYSPASTPTAAGPLGFPSEAPTAASDAALVEPFGVSEVDRRLRRMSNSAPGPDGLSYRDLRKADPSCGILTAYFNMVRRLESVPSSWKSSNTVLIHKKGDRMDLSNWRPLAMSDTTPKLFAAVLADRLVSWALHNGRLSPQQKGFLPCEGCYEHNYTLQEILNDARRGRSQVVVAWLDLSNAFGSIPHSTIYHAFAEAQVPLPFRSIVEGLYDGCTTRVRTSQGFTDPVPVLSGVKQGCPLSPVAFNLALEPVLRAASGTSVGYTLHGRRYNILAYADDLVLIADTPGGMETLLNTVEAAAGGVGLRFNPAKCATLHQDSRGSRRAVPTCFSLQGQGLKSLAAGVPYEHLGVPTGFQVKQTPLLSIEELIRDLHAVDRSLLAPWQKCETVGSFILPRLDFLLRGAHVEKGPLKTADKLVRKLAKSWLNLPERASAEVVYLPPSRGGCGLLPLADLADALVIGHAYRLLTAPDPAISGLARDSLREAVARKIGRPPTDLDLATYLSGSLEGEFARTSWDFSTLWSRARNAARRSSESLQLRWEWCAARQEMGLRLRGSRGRTTVVTPVARSQVLHRLRSAVTEFYSQRLVSKPDQGKVFGVSSRTKVSNHFLRGGSFTRFADWRFVHRARLNVLPLNGARRWGEGDKRCRRCGENLETLPHVICHCRPHSAAWQLRHDAVVSRIARACRLPGTLRVNQRVEGLTDDLEALRPDIVVRHEPSKSVVIIDVTVTFENGIEAFHAARERKIMKYLPIGAVLEEQGYRVVTDAIVVGALGSWDRANEPVLKLLRIGKKYAGLMRRLIVSETIRWGRDIYVEHVSGVRQYAAAPAAVPPVDSTLPPPAVIVASPFALLPRSGESNIASRNNNCDIAIGHEAHTLTQGSSGPV

SEQ ID NO: 223 - protein, 1091 aa, Lasioglossum morio
MGGYASRFRSMGGNNPGRPNQSGSTTGATVPAGRTNAPPGVVRVPTTPQLPRDSGHRRPTPVDQPNPRPRASLRREQAALATERGLLIDLAEAVDNTQDLEEVATQIAAFFKRFGSQPAGVGGRTGGRPTTNAGRRGRVVNTPVTGPSERHEGVTPRRTDQVKEATRIQRLFRQNRRRAVQEVLMGAPAQCQVPKDQVLEHFRNMYSPASTPTAAGPLGFPSEAPTAASDAALVEPFGVSEVDRRLRRMSNSAPGPDGLSYRDLRKADPSCGILTAYFNMVRRLESVPSSWKSSNTVLIHKKGDRTDLSNWRPLAMSDTTPKLFAAVLADRLVSWALHNGRLSPQQKGFLPCEGCYEHNYTLQEILNDARRGRSQVVVAWLDLSNAFGSIPHSTIYHAFAEAQVPLPFRNIVEGLYDGCTTRVRTSQGFTDPVPILSGVKQGCPLSPVAFNLALEPVLRAASGTSVGYTLHGRRYNILAYADDLVLIADTPGGMDTLLSTVEAAAGGVGLRFNPAKCATLHQDSRGSRRAVPTCFSLQGQALKSLAAGVPYEHLGVPTGFQVKQTPLLSIEELIRDLHAVDRSLLAPWQKCETVGSFILPRLDFLLRGAHVEKGPLKVADKLVRKLAKSWLNLPERASAEVVYLPPSRGGCGLLPLADLADALVIGHAYRLLTAPDPAISGLARDSLREAVARKIGRPPTDLDLATYLSGSLEGEFARTSWDFSTLWSRARNAARRSSNSLQLRWEWCAERQEMGIRLRGSRGRTTVVTPVARSQVLHRLRSAVTEFYSHRLGSKPDQGKVFGVSSRTKVSNHFLRGGSFTRFADWRFIHRARLDVLPLNGARRWGEGDKRCRRCGENMETLPHVLCHCRPHSAAWQLRHDAVVSRIARACRLPGTLRVNQRVEGLTGDLEALRPDIVVRHEPSKSVVIIDVTVTFENGIEAFHAARGRKISKYLPIGAALEEQGYRVVTDAIVVGALGSWDQDNESVLKLLRIGKKYAGLMRRLIVSETIRWGRDIYVEHVSGVRQYAAAPAAVPPVDLTLPPPAVNVASPLAPLPRTDENCFAPREYIDSVIDRGHAARTMTQGPSGPV

SEQ ID NO: 224 - protein, 2002 aa, Lasioglossum morio
MAGPTSSPITIYIEFPFPGEFRCPECFGKPGIKLSGVYKTHNDLIKHAKKHHPGHVVVHRCGVCGEHGTGSFPLRYVKAHHLAAHTDGPRPSRCGRGGAYVIPLTTAAPTTVRSSLSTTSTNFSGRGRPESILRDASGAGPTIVTTTSTTTPTTTTPTTTTTADGLRPAATTVTSGGAPPPPTSPAAVPTTRTAATSTSTTTTTTTSTTTRRTASSSLTQQRLPFGPSTAGRGATTGTKQATKTRQTTLTTTTATSRARAVVATSRTSTTPPPSQATLRTRSATAAAPAASLRKSTTPPPPPAPTRTRTSATRTSTTPPPSTATTRTRTAAAAASKAPLRKSTTPPPPPPPTRRRTEAGRPSTTPPPSKATSGTKPAAAAAPRAPPRKSTTPPATSRTRTATPPATVATSKLPSPPTTRTTATTTTKRGGATRRSDEVVSGSTPPGTRAAPAASRRAGPGAVQRTSPSLPTRKSTPSSPPTLSNSGPARRTRGSTVSPKTKAPPTSPRGPVTRSRGASVPVELESVKRRTAALTTTTTRRKAAPKPGTKRSPRGVGKREEACAPTNPSNPTLHPDSSPRLFTSVTRTAASPTYAAVTAGATVVTAAPPGDHTEGRRLRSMSRASSLPPEPSTAMPSSPPLTAILRALSTSPCSPPTIHGEEEGARDGCVVPCVAPATLTTTTVTTTVSGGSIMTSRPLAGGERGAKRAWPVPAIPSLPPIEEVTVTPGPARAASSPSPPAIEEREEEGGEEEDDSPLPWQSAASRRRRRRQRALSSSPSSPSFSLPLSRSSIPETSPQDRTTPTRRPSAEDVRTPEPPRRPPARAQRPLTPPPAPAVTRATRGATTTNTITATTTTAAPRVRNQPPPSRQQRRGAQRGTTAGDGRSSRPVSSRAPGDAARVDRSRDLRDLLFRMGGYASRFRSMGGNNPGRSNQGGSTTGATVPAGRTNAPSGVVRVPTTPQLPRDSEHRRPTPVGQPNPRPRASLRREQAALATERGLLIDLAEAVDNPQDLEEVATQIAAFFKRFGSQPAGVGGRTGGRPTTNARERGRVVNTPVTGPSGRHEGVTPRGTDQVREATRIQRLLRQNRRRAVQEVLMGAPAQCQVPKDQVTEHFRNMYSPASTPPASGPLGFPSEAPTASSDAALVQPFGVSEVDRRLRRMSNSAPGPDGLSYRDLRKADPSCSILTALFNMIRRLESVPSSWKSSNTVLIHKKGDRMDLSNWRPLAMSDTTPKLFAAVLADRLVSWALHNGRLSPQQKGFLPCEGCYEHNYTLQEILNDARRGKSQVVVAWLDLSNAFGSIPHSTIYHAFAEAQVPLPFRNIVEGLYDGCTTRVRTSQGFTDPVPILSGVKQGCPLSPVAFNLALEPVLRAASGTSVGYTLHGRRYNILAYADDLVLIADAPGGMETLLNTVEAAAGGVGLRFNPAKCATLHQDSRGSRRAVPTCFSLQGQGLKSLAAGVPYEHLGVPTGFQVKQTPLLSIEELIRDLHAVDRSLLAPWQKCETVGSFILPRLDFLLRGAHVEKGPLKTADKLVRKLAKSWLNLPERASAEVVYLPPSRGGCGLLPLADLADALVIGHAFRLLTTPDPAISGLARDSLREAVARKIGRPPTDEDLATYLSGSLEGEFARTSWDFSTLWSRARNAARRSSESLQLRWEWCAARQELGIRLRGSRGRTTVVTPVARSQVLHRLRSAVTEYYSHRLDSKPDQGKVFGVSSRTKVSNHFLRGGSFTRFADWRFVHRARLNVLPLNGARRWGEGDKRCRRCGENLETLPHVICHCRPHSAAWQLRHDAVVSRIARACRLPGTLRVNQRVEGLTDDLEALRPDIVVRHEPSKSVVIIDVTVTFENGIEAFHAARERKIMKYLPIGAVLEEQGYRVVTDAIVVGALGSWDRANEPVLKLLRIGKKYAGLMRRLIVSETIRWGRDIYVEHVSGVRQYAAAPAAVSPVDTTVPPPAVNVASPLALLPRPDESIAPRNVNCDRDIGHTAHTLTQGPSGPI

SEQ ID NO: 225 - protein, 1897 aa, Lasioglossum lativentre
MAGPNNSPLIINIDFPFPAEFRCPECYGKPGIKLGGTYKSHTDLAKHAKKYHPGHSIVHRCGECGEHGTGKYPLKTVKAHHTAKHPGIGAPGRSGTSRTTTGSTSTRTSGARSSSSATSTNVSGRGRPESILRFAAPTGPTRAIPATTATTTTTTTTTTTTVVTTAAAVPSRPPPTASPPCGAPSTTSSATRTTTTAATTTTAATRTTAPTTVTRPPPTAPLRLSAGATAGGRTATAAPSPPSAPSTTRATTTTRAVPPPSKAPPRRATIAGAASRPAPRTSGTPPLPAPLRTRAAAATASAASIRKSLTPPTLRAVSRTTTAAARPAPATRKPPTPPPSTANRASLPRRSGEAALAPTPPGTRTVPAAKTRAGTSAAPKKSPSQPGRRPPPSSVNTSGDEPVARRTRGATISPPKRSPTTTSRGLMTRSRRGASVPVELPGARRPTTTTTRRVAATKAGPKKRTTPPRKSGLGQGGASAPAPAPTSKPNPDSRTATPPRPFTSVVRTAASPSYAAVTAGTTVTTGTRGDCGERRQLRSATRAASVPPELMAGAISSPQLSGATITTWSPPCSTPPTIRGVQGEAGGFAVSSAVPATLTTVTVTVTTSGGPIVTSRPFAGGVERVKRTRQVPEVLSLPPIMEVVTPGPARAAAAAGTPTNARRTQEEEEEDDASPMPWQLASSRSRRIRRGPLSPSSSSESSGEDSPPPQPRTHRRPPARVHQPSPPVSTPVTSGALRGTAPHRMETRPSASPSVFPIFQRGPGERHPQPRGGGRHSSHRTSDGVSGARRAPGGSARMSNRRVSNDPMGGFASRFRSMGGNNPVRPHPGGSAREGTRVPAGQANAPAGVVRAPVTNRHPQVPERRRPRTDGQPLPRPRASRAREQAALARERELLVDLARAVDTTQDLEEVASQIAAFFKGFGKQPVGGGASERPTTGGGRRRRGATTGRQRRPDSAGLDSVLSGADRVKEATRLQRLFRENRRRAVQEVLTGPPVQCQVERGRVLQHFLDMYSPAGELHAAGPLGFPSEAPGSGSNAALISPFEVREVDRRIRRMSNSAPGPDGLSYRDLRKADPDCIVLTAYFNMCRRLESVPASWKESNTVLIHKKGDREDLSNWRPLAMSDTTPKLFAAVLADRLVSWAVENERLSPQQKGFLPCEGCFEHNFALQEVLDDARGGRRQVVVAWLDLTNAFGSIPHSTIYRAFAEAAVPLPFQAIVKELYRGCTTRVRTAQGFTDPVPILSGVKQGCPLSPVAFNLALEPVLRAVTASGVGYMLHGQRYSVLAYADDLALIADTPEGMETLLKTVEAAANGVGLRFNPSKCATLHQDSRGTRRVLPTRFSLQGQEIRALAAGQPYEHLGVPTGFQVRQTPLSSIEELVRDLRAVDQSLLAPWQKCEAVATFVLPRLDFLLRGASVEKGPLKVADKLLRRLAKSWLNLPQRASAEVVYLPPSRGGCGLLPLADLADALIVGHAFRLLTAPDPMISGLARASLRKAVAGKIKREPTNDDLATYLSGSLEGEFAKDSGGFSTLWSRARNAARRSGGMLQLRWLWSEARGEMAVGLRGSQGRTVVVPPNARHQILRRLRSAVVEYYADRLGNKPDQGKVFGVSSRMKVSNHFLRGGSFTRFADWRFIHRARLDVLPLNGARRWGEGDKRCRRCGEALETLPHVMCHCTPHAAAWQLRHDAIVARVSRACRLPGELRVNRRVEGLTGDLEALRPDIVVRHEPSKSVVIVDVTVAFENGAEAPKLARERKILKYLPLGAALEEQGYRVVIDAIVVGALGSWDPDNEATLKLLRIGRAYAALMRRLIVSETIRWGRDIYVEHVSGVRQYQVAPPPRVSVPDPVTPRESNGGAVPRMDGPPSAYDAFAPRRGAFNDGLEALFLTQGPSGPVE

SEQ ID NO: 226 - protein, 2003 aa, Lasioglossum morio
MAGPTNSPLTIYIEFPFPGEFRCPECFGKPGIKLSGVYKTHSDLIKHAKKHHPGHIVVHRCGVCGEHGTGAFPLRYVKAHHTAAHTDRPRPNRCGRGGAYVIPLNTAAPTTVRSSLSTTSTNFSGRGRPESILRDANGAGTTIVTTTSTTTPTTTTPTTTTTADGLRPAATTVTSGGAPPPPTSPAAVPTTRTAATSTISTTTTTTTSTTTRRTASSSLRQQKLSFGPAAAGRGVTTETNTATETRQTLPPTSTATSRARAVVATSRTSTTPPPPRVMTRTRSATALASAASLRKSTTPPPPPAPTRKRTTATRTSNTPPTSTATTRAAAASKAPLRKSTTPPPPPPPTRRRNEVGRPSTTPPPSTAASRPAAAAASRAPLRKSTTPPPPPAPTTRTRTATTTATVATTKKLPSPSTTSTKTTTTTTTTKRGGATDKRLESVSGSTPPGTRAAPAANRRAGPGAVQRTSPSLPTRKSTPSSPPTLSNSGPARRTRGSTVSPKTKAPPTSPRGPVTRSRGASVPVELESVKRRTAALTTTTTRRKAAPKPGTKRSPRGVGKREEACAPTNPSNPTLHPDSSPRLFTSVIRTAASPTYAAVTAGATVVSATPPGDQGALRRQRSMTPISPESPAATPSSLALTTILRALSTSPCSPPTTFGEQAGARGCCVVSCVAVATLTTTTVTTTVSGGSIMTSRPLAGGERGAKRAWPVPAIPSLPPIEEVTVPPGPARTASSPSPPAIEEREEEGGEEDDDSPLPWQSAASRRRRRRQRALSSSPSSPSFSMPLSRSPNPETSLQRTTPTRRPSAEDVRTPEPPRRPPARAQRPPTPPPAPAAPGASRGATTTTITATTTTTAAPRVRNQPPPSRQQRRGAQRGTTAGDGRSSRPVSSRAPGDAARVDRSRDLRELLFRMGGYASRFRSMGGNNPGSSRPSGSTTGATVPAGRTNAPPGVVRVPTTPQLPRDSGHRRPTPVGQPNPRPRASLRREQAALATERGLLIDLAEAVDNLQDLEEVATQIAAFFKRFGSQPAGVGGRTGGRPTTNARERGRVVNTPVTGPSGRHEGVTPGGTDQVREATRIQRLFRQNRRRAVQEVLMGAPAQCQAPKDQVTEHFRNMYSPASTPPASGPLGFPSEAPTASSDAALIQPFGVSEVDRRLRRMSNSAPGPDGLSYRDLRKADPSCSILTALFNMIRRLESVPSSWKSSNTVLIHKKGDRMDLSNWRPLAMSDTTPKLFAAMLADRLVSWALQNGRLSPQQKGFLPCEGCYEHNYTLQEILNDARRGKSQVVVAWLDLSNAFGSIPHSTIYHAFAEAQVPLPFRNIVEGLYDGCTTRVRTSQGFTDPVPILSGVKQGCPLSPVAFNLALEPVLRAASGTSVGYTLHGRRYNILAYADDLVLIADTPGGMETLLNTVEAAAGGVGLRFNPAKCATLHQDSRGSRRAVPTCFSLQGQGLKSLAAGVPYEHLGVPTGFQVKQTPLLSIEELIRDLHAVDRSLLAPWQKCETVGSFILPRLDFLLRGAHVEKGPLKAADKLVRKLAKSWLNLPERASAEVVYLPPSRGGCGLLPLADLADALVIGHAFRLLTTPDPAISGLARDSLREAVARKIGRPPTDEDLATYLSGSLEGEFARTSWDFSTLWSRARNAARRSSESLQLRWEWCAARQELGLRLRGSRGRTTVVTPVARSQVLHRLRSAVTEFYSHRLVSKPDQGKVFGVSSRTKMSNHFLRGGSFTRFADWRFVHRARLNVLPLNGARRWGEGDKRCRRCGENLETLPHVICHCRPHSAAWQLRHDAVVSRIARACRLPGTLRVNQRVEGLTDDLEALRPDIVVRHEPSKSVVIIDVTVTFENGIEAFHAARERKIMKYLPIGAVLEEQGYRVVTDAIVVGALGSWDQANEPVLKLLRIGKKYAGLMRRLIVSETIRWGRDIYVEHVSGVRQYAAAPAAVPPVDSTLPPPAVIVASPLAPLPRTDENCFAPREYIDSVTDIGHAARTMTQGPSGPV

SEQ ID NO: 227 - protein, 1220 aa, Lasioglossum morio
MPLSRSPNPETSPQDKTTPTRRPSAEDVRTPEPQRRPPARAQRPLTPPPAPAATRALRGATTTTTITAITTTAAPRVREQPPSSRQQRRGAQRGTTAGDGRNSRSGSSRAPGDAARVDRSRDLRDLLFRMGGYASRFRSMGGNNPGRSNQGGSTTGATVPAGRTNAPSGVVRVPTTPQLPRDSGHRRPTPVDQPNPRPRASLRREQAALATERGLLIDLAEAVDNLQDLEEVATQIAAFFKRFGSQPAGVGGRTGGRPTTNARERGRVVNTPVTGPSGRHEGVTPRGTDQVREATRIQRLFRQNRRRAVQEVLMGAPAQCQVPKDQVTEHFRNMYSPASTPPASGPLGFPSEAPTASSDAALVQPFGVSEVDRRLRRMSNSAPGPDGLSYRDLRKADPSCSILTAYFNMIRRLESVPSSWKSSNTVLIHKKGDRMDLSNWRPLAMSDTTPKLFAAVLADRLVSWALHNGRLSPQQKGFLPCEGCYEHNYTLQEILNDARRGRSQVVVAWLDLSNAFGSIPHSTIYHAFAEAQVPLPFRNIVEGLYDGCTTRVRTSQGFTDPVPILSGVKQGYPLSPVAFNLALEPVLRAASGTSVGYTLHGRRYNILAYADDLVLIADTPGGMDTLLSTVEAAAGGVGLRFNPAKCATLHQDSRGSRRAVPTCFSLQGQGLKSLAAGVPYEHLGVPTGFQVKQTPLLSIEELIRDLHAVDRSLLAPWQKCETVGSFILPRLDFLLRGAHVEKGPLKTADKLVRKLAKSWLNLPERASAEVVYLPPSRGGCGLLPLADLADALVIGHAFRLLTTPDPAISGLARDSLREAVARKIGRTLTDQDLATYLSGSLEGEFARTSWDFSTLWSRARNAARRSSESLQLRWEWCAARQELGIRLRGSRGRTTVVTPVARSQVLHRLRSAVTEYYSHRLDSKPDQGKVFGVSSRTRVSNHFLRGGSFTRFADWRFVHRARLNVLPLNGARRWGEGDKRCRRCGENLETLPHVMCHCRPHSAAWQLRHDAVVSRIARACRLPGTLRVNQRVEGLTGDLEALRPDIVVRHEPSKSVVIIDVTVTFENGIEAFHAARVRKISKYLPIGAVLEEQGYRVVTDAIVVGALGSWDQANEPVLKLLRIGKKYAGLMRRLIVSETIRWARDIYVEHVSGVRQYAAAPAAVPPVDATPPPPAVMVTPPMAPPPRADSVAPRTTNSDRRDNTMGHEALILTQGSSSPV

SEQ ID NO: 228 - protein, 2008 aa, Lasioglossum morio
MAGPTNSPITIYIEFPFPGEFRCPECFGKPGIKLSGVYKTHNDLIKHAKKHHPGHVVVHRCGVCGEHGTGAFPLRYVKAHHTAAHTDRPRPNRCGRGGAYVIPLTIAAPTTVRSSLSTTSTNFSGRGRPESILRDASGAGPTIVTTTSTTTPTTTTPTTTTTADGLRPAATTVTSGGAPPPPTSPAAVPTTRTAATSTSTTTTTTTSTTTRRTASSSLTQQRLPFGPSTAGRGATTGTKQATKTRQTTLTTTTATSRARAAVATSRTSTTPPPSQATLRTRSATAAAPAASLRKSTTPPPPPAPTRTRTSVTRTSTTPPPSTATTRTRTAAAAASKAPLRKSTTPPPPPPPTRRRTEAGRPSTTPPPSKATSGTKPAAAAAPRAPPRKSTTPPPPPATSRTRTATPPATVATSKLPSPPTTTTRTTATTTTKRGGATRRSDEVVSGSPPSGTRAAPAANRRAGPGAVQRTSPSLPTRKSNPSSPPTMSTSGPARRTRGSTVSPKTRAPPTSPRGPVTRSRGASVPVELESVKRRTAALTTTTTRRKAAPKPGTKRSPRGVGKRDGPCAPTNPSNPTLHPDSSPRLFTSVIRTAASPTYAAVTAGATVVTAAPPGDHTEGRRLRSMSRASSLPPESSTAMPSSPPLTAILRALSTSPCSPPTIHGEEEGARDGCVVPCVAPATLTTTTVTTTVSGGSIMTSRPLAGGERGAKRAWPVPAIPSLPPIEEVTVTPGPARAASSPSPPAIEEREEEGGEEEDDSPLPWQSAASRRRRRRQRALSSSPSSPSFSLPLSRSSIPETSPQDRTSPTRRPSAEDVRTPEPQRRPPARAQRPPTPPPAPAATRASRGATTTTITATTTTTAAPRVRDQPPSSRQQRRGAQRGTTAGDGRSSRPVSSRAPGDAARVDRSRDLRDLLFRMGGYASRFRSMGGNNPGRLNQSGSATGATVPAGRTNAPPGVVRVPTTPQLPRDSEHRRPTPVGQPNPRPRASLRREQAALATERGLLIDLAEAVDNPQDLEEVATQIAAFFKRFGSQPAGVGGRTGGRPTTNAGRRGRVVNTPVTGPSERHEGVTPRRTDQVKEATRIQRLFRQNRRRAVQEVLMGAPAQCQVPKDQVLEHFLNMYSPASTPTAAGPLGFPSEAPTASSDAALVQPFGVSEVDRRLRRMSNSAPGPDGLSYRDLRKADPSCSILTALFNMIRRLESVPSSWKSSNTVLIHKKGDRMDLSNWRPLAMSDTTPKLFAAVLADRLVSWALQNGRLSPQQKGFLPCEGCYEHNYTLQEILNDARRGRSQVVVAWLDLSNAFGSIPHSTIYHAFAEAQVPLPFRNIVEGLYDGCTTRVRTSQGFTDPVPILSGVKQGCPLSPVAFNLALEPVLRAASGTSVGYTLHGRRYNILAYADDLVLIADTPGGMDTLLSTVEAAAGGVGLRFNPAKCATLHQDSRGSRRAVPTCFSLQGQGLKSLAAGVPYEHLGVPTGFQVKQTPLLSIEELIRDLHAVDRSLLAPWQKCETVGSFILPRLDFLLRGAHVEKGPLKTADKLVRKLAKSWLNLPERASAEVVYLPPSRGGCGLLPLADLADALIVGHAFRLLTTPDPAISGLARDSLREAVARKIGRPPTDQDLATYLSGSLEGEFARTSWDFSTLWSRARNAARRSSESLQLRWEWCAARQELGIRLRGSRGRTTVVTPVARSQVLHRLRSAVTEYYSHRLDSKPDQGKVFGVSSRTKVSNHFFRGGSFTRFADWRFVHRARLNVLPLNGARRWGEGDKRCRRCGENLETLPHVICHCRPHSAAWQLRHDAVVSRIARACRLPGTLRVNQRVEGLTDDLEALRPDIVVRHEPSKSVVIIDVTVTFENGIEAFHAARERKISKYLPIGAVLEEQGYRVVTDAIVVGALGSWDQANEPVLKLLRIGKKYAALMRRLIVSETIRWGRDIYVEHVSGVRQYAAAPAAVPRVDSTLPPPAVMVASPFALLPRSGEGNIASRNNNCDISIGHEAHTLTQGSSGPV

SEQ ID NO: 229 - protein, 1898 aa, Lasioglossum lativentre
MAGPNSCPLIINIDFPFPAEFRCPECYGKPGIKLGGTYKSHTDLAKHAKKYHPGHSIVHRCGECGELGTGKYPLKTVKAHHTAKHTGIGAPGRSGTNRTTTGSTSTRTSGARSSLSATSTNVSGRGRPESILRFAAPTGLTRATPPTTATTTTTTTTTTTTVVTTAAAVPSRPPSMASPPCGAPSTTSSATRTTTTAATTTTAATRTTAPTTVTRPPPTAPLRLSAGATAGGRTATAAPSPPSAPSTTRATTTTKAVPPPSKAPPRRATIAGAASRPAPRTSGTPPLPAPLRTRAAAATASAASIRKSLTPPTLRAVSRTTTAAARPAPATRKPPTPPPSTANRASLPRRSGEAALAPTPPGTRTVPAAKTRAGTSAATRKSPSQPGRRPPPSSVNTSGDEPVARRTRGATISPPKRSPTTTSRGLMTRSRRGASVPVELPGAKRPTTTTTRKAAAPKAGPKKRTTPPRKSGLGQGGVFAPAPAPTTKPNPDSRTATPPRPFTSVVRTAGSPSYAAVTAGTTVTTGTRGDCGERRQLRSATRAASVPPELMAGAVSSPQLSGTTIATWSPPCSTPPTIRGVQGEAGGFAVSSAVPATLTTVTVTVTTSGGPIVTSRPFAGGVERVKRTRQVPEVLSLPPIMEVVTPGPARAAAAAGTPTNARRTQEEEEEDDASPMPWQLATSRSRRIRRGPLSPSSSSESSGEDTPPPPSRTHRRPPARVQHPSPPVSTPVTSGALRGTAPHRMEIRPSAPPSAFPIFHRGPGERHPQPRGGGRHSSHRTSDGVSGARRAPGGSARMSNRRVSNDPMGGFASRFRSMGGNNPVRPQPGGSAREGTRVPAGQANAPASVVRAPATNHRPQVPERRQPRTDGQPLPRPRASRTREQAALARERELLVDLTRAVDNTQDLEEVASQIAAFFKGFGKQPVGGGASERPTTGDGRRRRGATTGRQRRPDSAGLDSIPSGADRVREATRLQRLFRENRRRAVQEVLTGPPVQCQVERGRVLQHFLDMYSPAGELQAAGPLGFPSEAPGSGSNEVLVRPFEVREVDRRIRRMSNSAPGPDGLSYRDLRKADPSCLVLTALFNMCRKLESVPASWKESNTVLIHKKGDREDLSNWRPLAMSDTTPKLFAAVLADRLVSWAVDNERLSPQQKGFLPCEGCFEHNFALQEVLNDARGGRRQVVVAWLDLTNAFGSIPHATIYRAFAEAAVPQPFQNIVKELYRGCTTRVRTAQGFTDPVPILSGVKQGCPLSPVAFNLALEPVLRAVTATGVGYTLHGERYSVLAYADDLALIADTPEGMETLLKTVEAVANGVGLRFNPSKCATLHQDSKGTRRVLPTRFSLQGQEIRALAAGQPYEHLGVPTGFQVRQTPLSSIEELVRDLRAVDQSLLAPWQKCEAVATFVLPRLDFMLRGASVEKGPLKVADKLLRKLAKSWLNLPQRASAEVVYLPPSRGGCGLLPLADLADALVVGHAFRLLTAPDPAISGLARASLREAVAKKIGREPSEDDLATYLSGSLEGEFARDGGTFSTLWSRARNAARRSGGMLQLRWQWSEARGEMAVGLRGSRGRTVVVPPSARHQILHRLRAAVVEYYTDRLSKKPDQGKVFEVSSRMKVSNHFLRGGSFTRFADWRFIHRARLNVLPLNGARRWGEGDKRCRRCGETLETLPHVMCHCTPHAAAWQLRHDAIVARISRACRLPGELRVNRRVEGLTGDLEALRPDIVVRHEPSKSVVIVDVTVAFENGAEAPKLARERKILKYLPLGAALEEQGYRVVIDAIVVGALGSWDPDNEVTLKLLRIGRTYAALMRRLIVSDTIRWGRDIYVEHVSGVRQYQVAPPPRASVPDPVTPGENNGGAVPRMDGPPLAHDAFAPRRSSMGNEGHEALSLTQGPSGPEY

SEQ ID NO: 230 - protein, 1992 aa, Lasioglossum morio
MAGPTSSPITIYIEFPFPGDFRCPECFGKPGIKLSGVYKTHSDLIKHAKKHHPGHIVIHRCGVCGEHGTGAFPLRYVKAHHTAAHTDRPRPNRCGRGGAYVIPLTTAAPTTVRSPSSTTSTNFSGRGRPESILRDANGAGTTIVTTTSTTTPTTTTPTTTTTADGLRPAATTVTSGGAHPPSPSGPAAVPTTRTAATSTTSTNTTTTTSTTTRRTASSSLRQQKLSFGPAAAGRGVTTETNTATETRQTLPPTSTATSRARAVVATSRTSTTPPPPRVMTRTRSATALASAASLRKSTTPPPPPAPTRKRTTATRTSNTPPTSTATTRAAAASKAPLRKSTTPPPPPPPTRRRNEVGRPSTTPPPSTAASRPAAAAASGAPLRKSTTPPPPPAPTTRTRTATTSATVATTKKLPSPSTTSTRTTTTTTTKRGGATDKRLESVSGSTPPGTRAAPAANRRAGPGAVQRTSPSLPTRKSTPSSPPTLSNSGPARRTRGSTVSPKTKAPPTSPRGPITRSRGASVPVELESVKRRTAALTTTTTRRKAAPKPGTKRSPRGVGKREEACAPTNPSNPTLHPDSSPRLFTSVIRTAASPTYAAVTAGATVVTAAPPGDHTEGRRLRSMSRASSLPPESSTAMPSSPPLTAILRALSTSPCSPPTIHGEEEGARDGCVVPCVAPATLTTTTVTTTVSGGSIMTSRPLAGGERGAKRAWPVPAIPSLPPIEEVTVTPGPARAASSPSPPAIEEREEEGGEEEDDSPLPWQSAASRRRRRRQRALSSSPSSPSFSLPLSRSSIPETSPQDRTTPTRRPSAEDVRTPEPPRRPPARAQRPSTPPPAPAAPRASRGATTTTITATTTTTAAPRVRNQPPPSRQQRRGAQRGTTAGDGRNSHSVNSRAPGDAARVDRSRDLRDMLFRLGGFASRFRTMGGNNPGRPNQSGSTTGATVPAGRTNAPPGVVRVPMTPQLPRDSGHRRPTPVDQPNPRPRASLRREQAALATERGLLIDLAEAVDNTQDLEEVATQIAAFFKRFGSQPAGVGGRTGGRPTTNARERGRVVNTPVTGPSGRHEGVAPRGTDQVREATRIQRLFRQNRRRAVQEVLMGAPAQCQVPKDQVTEHFRNMYSPASTPPASGPLGFPSEAPTASSDAALVQPFGVSEVDRRLRRMSNSAPGPDGLSYRDLRKADPSCSILTAYFNMIRRLESVPSSWKSSNTVLIHKKGDRMDLSNWRPLAMSDTTPKLFAAVLADRLVSWALHNGRLSPQQKGFLPCEGCYEHNYTLQEILNDARRGRSQVVVAWLDLSNAFGSIPHSTIYHAFAEAQVPLPFRNIVEGLYDGCTTRVRTSQGFTDPVPILSGVKQGCPLSPVAFNLALEPVLRAASGTSVGYTLHGRRYNILAYADDLVLIADTPGGMDTLLSTVEAAAGGVGLRFNPAKCATLHQDSRGSRRAVPTCFSLQGQALKSLAAGVPYEHLGVPTGFQVKQTPLLSIEELIRDLHAVDRSLLAPWQKCETVGSFILPRLDFLLRGAHVEKGPLKTADKLVRKLAKSWLNLPERASAEVVYLPPSRGGCGLLPLADLADALVIGHAYRLLTAPDPAISGLARDSLREAVARKIGRPPTDLDLATYLSGSLEGEFARTSWDFSTLWSRARNAARRSSNSLQLRWEWCAERQELGIRLRGSRGRTTVVTPVARSQVLHRLRSAVTEFYSHRLGSKPDQGKVFGVSSRTKVSNHFLRGGSFTRFADWRFVHRARLDVLPLNGARRWGEGDKRCRRCGENMETLPHVLCHCRPHSAAWQLRHDAVVSRIARACRLPGTLRVNQRVEGLTGDLEALRPDIVVRHEPSKSVVIIDVTVTFENGIEAFHAARDRKISKYLPIGAALEEQGYRVVTDAIVVGALGSWDRANEPVLKLLRIGKKYAGLMRRLIVSETIRWGRDIYVEHVSGVRQYAAAPAAVPPVDSTLPPLAVNVASPLALLPRSTESTIAPRVINHSDTQT

SEQ ID NO: 231 - protein, 2008 aa, Lasioglossum morio
MAGPTNSPITIYIEFPFPGEFRCPECFGKPGIKLSGVYKTHNDLIKHAKKHHPGHIVIHRCGVCGEHGTGAFPLRYVKAHHTAAHTDRPRPNRCGRGGAYVIPLTTAAPTIARSSLSTTSTDFSGRGRPESILRDASGAGPTIVITTSTTTPTTTTPTTTTTADGLRPAATTVTSGGAPSPPTSPAAVPTTRTAVTSTRSTTTTTTSTTTRRTASSSLTQQRLPFGPSTAGRGATTGTKQATKTRQTTLTTTTATSRARAAVATSRTSTTPPPSQATLRTRSATAAAPAASLRKSTTPPPPPAPTRTRTSVTRTSTTPPPSTATTRTRTAAAAASKAPLRKSTTPPPPPPPTRRRTEAGRPSTTPPTSKATSGTKPAAAAAPRAPPRKSTTPPPPPATSRMRTATPPATVATSKLPSPPTTTTRTTATTTTKRGGATRRSDEVVSGSTPPGTRAAPAASRRAGPGAVQRTSPSLPTRKSTPSSPPTLSNSGPARRTRGSTVSPKTKAPPTSPRGPVTRSRGASVPVELESVKRRTAALTTTTTRRKAAPKPGTKRSPRGVGKRDGPCAPTNPSNPTLHPDSSPRLFTSVIRTAASPTYAAVTAGATVVTAAPPGDHTEGRRLRSMSRASSLPPESSTAMPSSPPLTAILRALSTSPCSPPTIHGEEEGARDGCVVPCVAPATLTMTTVTTTVSGGSIMTSRPLAGGGERGAKKAWPVPAIPSLPPIEEVTVSPGPARTASSPSPPTIEEREEEGGEEEDDSSLPWQSAASRRRRRRQRALSSSPSSPSLSMPLSRSPNLETSLQRTTPTRRPSAEDVRTPEPPRRPPARAQRPPTPPPAPAAPRASRGATTTTITATTTTTAAPRVRNQPPPSRQQRRGAQRGTTAGDGRNSRSGSSRAPGDAARVDRSRDLRDLLFRMGGYASRFRSMGGNNPGRSNQGGSTTGATVPAGRTNAPPGVVRVPTTPQLPRDLEHRRPTPVGQPNPRPRASLRREQAALATERGLLIDLAEAVDNLQDLEEVATQIAAFFKRFGSQPAGVGGRTGGRPTTNARERGRVVNTPVTGPSGRHEGVTPRGTDQVREATRIQRLFRQNRRRAVQEVLMGAPAQCQVPKDQVTEHFRNMYSPASTPPASGPLGFPSEAPTASSDAALVQPFGVSEVDRRLRRMSNSAPGPDGLSYRDLRKADPSCSILTACFNMIRRLESVPSSWKSSNTVLIHKKGDRMDLSNWRPLAMSDTTPKLFAAVLADRLVSWALQNGRLSPQQKGFLPCEGCYEHNYTLQEILNDARRGKSQVVVAWLDLSNAFGSIPHSTIYHAFAEAQVPLPFRNIVEGLYDGCTTRVRTSQGFTDPVPILSGVKQGCPLSPVAFNLALEPVLRAASGTSVGYTLHGRRYNILAYADDLVLIADTPGGMDTLLNTVEAAAGGVGLRFNPAKCATLHQDSRGSRRAVPTCFSLQGQGLKSLAAGVPYEHLGVPTGFQVKQTPLLSIEELIRDLHAVDRSLLAPWQKCETVGSFILPRLDFLLRGAHVEKGPLKTADKLVRKLAKSWLNLAERASAEVVYLPPSRGGCGLLPLADLADALVIGHAFRLLTTPDPAISGLARDSLREAVARKIGRTPTDQDLATYLSGSLEGEFARTSWDFSTLWSRARNAARRSSESLQLRWEWCAARQELGIRLRGSRGRTTVVTPVARSQVLHRLRSAVTEFYSHRLGSKPDQGKVFGVSSRTKVSNHFLRGGSFTRFADWRFIHRARLDVLPLNGARRWGEGDKRCRRCGENMETLPHVLCHCRPHSAAWQLRHDAVVSRIARACRLPGTLRVNQRVEGLTGDLEALRPDIVVRHEPSKSVVIIDVTVTFENGIEAFHAARGRKISKYLPIGAALEEQGYRVVTDAIVVGALGSWDQDNESVLKLLRIGKKYAGLMRRLIVSETIRWGRDIYVEHVSGVRQYAAAPAAVPPVDSTLPPAVNVASPLAPLPRTDENCFAPREYIDSVTDIGHAARTMTQGPSGPV

SEQ ID NO: 232 - protein, 1997 aa, Lasioglossum morio
MAGPTSSPITIIIEFPFPGEFRCPECYGKPGTRTSGVYKTHNDLVKHAKKCHPGHIVVHRCGVCGEHGTGAFPLRYVRAHHLAAHTDGPRPSRCGRGGAYVIPLTTASTTVRSSLSTTSTNSSGRGRPESILRSANGAGPTVVPTIATTTTATTTTTTTTASGLRPPAVTTATSGGAPPPSTSPAAAPTTRAAATSTTTTTSTTTTRPTSSSLRQQRLPFGPATAGRGATTGTVTVTRTRQTPPTTATATSRAKAVVATSRTSTTPPPASATLRAGPATGAAPTASLRKSTTPPPPPATTRTRTTASRTSTTPPPSTATARTRTATAAASRASVRKSTTPPPPPPPTRRRTAAARTSTTPPPSSATSRTKQAAAAAPRAPLRKSTTPPPPPATSRTRKATTAAKVATRELPSPPTTTATATTTTRRGGVTGKSLETVSGSTPPGSRAAPAANKRAGSGAVQRASPSPPTRRSTPSSPPTQSNSGPARRTRGSTVSPRTKAPPTSPRGPITRSRGASVPVELESVKRRTAALNTTRRKAAPTSGSKRSPRGVGKRDGPCAPTNHSNPTLHPDSSPRLFTSVIRTAASPTYAAVTAGATVVTAAPPGDQTEVRRLRSMTRASSLPPESPIATPSSPTLNTILRALSTSPCSPPTTFGEQEGARGCCVVSCVALATLTTTTVTTTVSGGSIMTSRPLAGGGERGAKRAWPVPAIPSLPPIEEVTVSPGPARTASSPSPPAIEEREEEGGEEDDSPLPWQSAASRRRRRQLRVLSLSPTSPSVSLPPSRSSYPETSPQEARTSPRRPSTEDIRTPEPQRRPPARAQRPPTPPPAPAATRATRGVTTTTITATTTTTAAPRVRNQPPPSRQQRRGAQRGTTAGDGRSSRLVSNRAPGDAARVDRSRDLRDLLFRMGGYASRFRSMGGNNPGRSNQGGSTTGATVPAGRTNAPSGVVRVPTTPQLPRDPEHRRPTPVGQPNPRPRASLRREQAALATERSLLIDLAEAVDNLQDLEEVATQIAAFFKRFGSQPAGVGGRTGGRPTTNARERGRVVNTPVTGPSGRHEGVTPRGTDQVREATRIQRLFRQNRRRAVQEVLMGAPAQCQVPKDQVTEHFRNMYSPASTPPASGPLGFPSEAPTASSDAALVQPFGVSEVDRRLRRMSNSAPGPDGLSYRDLRKADPSCSILTALFNMIRRLESVPSSWKSSNTVLIHKKGDRMDLSNWRPLAMSDTTPKLFAAVLADRLVSWALQNGRLSPQQKGFLPCEGCYEHNYTLQEILNDARRGRSQVVVAWLDLSNAFGSIPHSTIYHAFAEAQVPLPFRNIVEGLYDGCTTRVRTSQGFTDPVPILSGVKQGCPLSPVAFNLALEPVLRAASGTSVGYTLHGRRYNILAYADDLVLIADTPGGMETLLNTVEAAAGGVGLRFNPAKCATLHQDSRGSRRAVPTCFSLQGQGLKSLAAGVPYEHLGVPTGFQVKQTPLLSIEELIRDLHAVDRSLLAPWQKCETVGSFILPRLDFLLRGAHVEKGPLKTADKLVRKLAKSWLNLPERASAEVVYLPPSRGGCGLLPLADLADALVIGHAFRLLTTPDPAISGLARDSLREAVARKIGRTPTDQDLATYLSGSLEGEFARTSWDFSTLWSRARNAARRSSESLQLRWEWCAARQELGIRLRGSRGRTTVVTPVARSQVLHRLRSAVTEYYSHRLDSKPDQGKVFGVSSRTKVSNHFLRGGSFTRFADWRFVHRARLNVLPLNGARRWGEGDKRCRRCGENLETLPHVICHCRPHSAAWQLRHDAVVSRIARACRLPGTLRVNQRVEGLTDDLEALRPDIVVRHEPSKSVVIIDVTVTFENGIEAFHAARGRKISKYLPIGAALEEQGYRVVTDAIVVGALGSWDQANEPVLKLLRIGKKYAGLMRRLIVSETIRWGRDIYVEHVSGVRQYAAAPAAVPPVDATFPPPAVTVTPLLAPLPRVIESIAPRTNSDNDIGHAARTLTQGPCGPI

SEQ ID NO: 233 - protein, 1896 aa, Lasioglossum lativentre
MAGPNSCPLTILIDFPFPAEFRCPECYGKPGIKLGGTYKSHTDLAKHAKKYHPGHSIVHRCGECGELGTGKYPLKTVKAHHTAKHSGIGAPGRSGTSRTTTGSTSTRTSGARSSLSATSTNVSGRGRPESILRFAAPTGPTRATIIATTTTTTTTTTTTVVTTAAAVPSRPPPMASPPGGAPSTTSSATRTTTTAATTTTAATRTTAPTTVTRPPPAAPLRLSAGATAGGRTATAAPSPPSAPSTTRATTTRAVPPPSKAPPRRATIAGAASRPAPRTSGTPPLPAPLRTRAAAATASAASIRKSLTPPTLRAVSRATTAAARPAPATRKPPTPPPSTANRASLPRRSGEAALAPTPPGTRTVPAAKTRAGTSAAPKKSPSQPGRRPPPSSVNTSGDEPVARRTRGATISPPKRSPTTTSRGLMTRSRRGASVPVELPGARRPTTTTTRRVAATKAGPKKRTTPPRKSGLGQGGASAPAPAPTSKPNPDSRTATPPRPFTSVVRTAASPSYAAVTAGTTVTTGTRGDCGERRQLRSATRAASVPPELMAGAISSPQLSGTTITTWSPPCSTPPTIRGVQGEAGGFAVSSAVPATLTTVTVTVTTSGGPIVTSRPFAGGVERVKRTRQVPEVLSLPPIMEVVTPGPARAATAAGTPTIIRRPQEEEEEEDDDASPMPWQLAASRSRRTRRGPLSPSSSSESSGEDSPPPPPRTQRRPPARVHHLSPPVSTPVTSGTLRGTAPHRMEARPSAPPSNFPIFQRGPGERHPQPRGGGRLSSHHTSDGMSGARRAPGGSARMSNRRVSNDPMGGFASRFRTMGGNNPVRPHPGGSAREGTRVPAGQANAPAGVVRAPATNRRPQVPEHRQPRTDGQPLPRPRASRAREQAALARERELLVGLTRAVDNTQDLEEVASQIATFFKGFGKQPAGGGASERPTTGDGRRRRGATTGRQRRPDNAGLDSVLSGADRVKEATRLQRLFRENRRRAVQEVLTGPPVQCQVERGRVLQHFLDMYSPAGELHAAGPLGFPSEAPGSGSNAALISPFEVREVDRRIRRMSNSAPGPDGLSYRDLRKADPDCIVLTAFFNMCRRLESVPASWKESNTVLIHKKGDREDLSNWRPLAMSDTTPKLFAAVLADRLVSWAVDNERLSPQQKGFLPCEGCFEHNFALQEVLDDARGGRRQVVVAWLDLTNAFGSIPHSTIYRAFAEAAVPLPFQNIVKELYRGCTTRVRTAQGFTDPVPILSGVKQGCPLSPVAFNLALEPVLRAVTASGVGYALHGQRYSVLAYADDLALIADTPEGMETLLKTVEAAANGVGLRFNPAKCATLHQDSKGTRRVLPTRFSLQGQEIRALAAGQPYEHLGVPTGFQVRQTPLSSIEELVRDLRAVDQSLLAPWQKCEAVATFVLPRLDFMLRGASVEKGPLKVADKLLRKFAKSWLNLPQRASAEVVYLPPSRGGCGLLPLADLADALVIGHAFRLLTAPDPMISGLAGASLRKAVAGKIKREPTNDDLATYLSGSLEGEFAKDSGGFSTLWSRARNAARRSGGMLQLRWLWSEARGEMAVGLRGSQGRTVVVPPNARHQILRRLRSAVVEYYADRLGNKPDQGKVFGVSSRMKVSNHFLRGGSFTRFADWRFIHRARLDVLPLNGARRWGEGDKRCRRCGEALETLPHVMCHCTPHAAAWQLRHDAIVARVSRACRLPGELRVNRRVEGLTGDLEALRPDIVVRHEPSKSVVIVDVTVAFENGAEAPKLARERKILKYLPLGAALEEQGYRVVIDAIVVGALGSWDPDNEVTLKLLRIGRTYAALMRRLIVSETIRWGRDIYVEHVSGVRQYQVAPPPRVSVPDPVTPRENYRGAVPQLDVPPSANDAVAPRRGASNVGHEALLLNQGPSGPTD

SEQ ID NO: 234 - protein, 1080 aa, Lasioglossum morio
MGGNNPGRSNQGGRTTGATVPAGRTNAPSGVVRVPATPQLTRDSEHRRPTPVGQPNPRPRASLRREQAALATERGLLIDLAEAVDNPQDLEEVATQIATFFKRFGSQPAGVGGRTGGRPTTNAREGGRVVNTPVTGPSGRHEGVTPRGTDQVREATRIQRLFRQNRRRAVQEVLMGAPAQCQVPKDQVTEHFRNMYSPASTPPASGPLGFPSEAPTASSDAALVQPFGVSEVDRRLRRMSNSAPGPDGLSYRDLRKADPSCSILTAYFNMIRRLESVPSSWKSSNTVLIHKKGDRMDLSNWRPLAMSDTTPKLFAAVLADRLVSWALQNGRLSPQQKGFLPCEGCYEHNYTLQEILNDARRGKSQVVVAWLDLSNAFGSIPHSTIYHAFAEAQVPLPFRNIVEGLYDGCTTRVRTSQGFTDPVPILSGVKQGCPLSPVAFNLALEPVLRAASGTSVGYTLHGRRYNILAYADDLVLIADTPGGMDTLLNTVEAAAGGVGLRFNPAKCATLHQDGRGSRRAVPTCFSLQGQGLKSLAAGVPYEHLGVPTGFQVKQTPLLSIEELIRDLHAVDRSLLAPWQKCETVGSFILPRLDFLLRGAHVEKGPLKVADKLVRKLAKSWLNLPERASAEVVYLPPSRGGCGLLPLADLADALVIGHAYRLLTAPDPAISGLARDSLREAVARKIGRPPTDLDLATYLSGSLEGEFARTSWDFSTLWSRARNAARRSSNSLQLRWEWCAERQELGIRLRGSRGRTTVVTPVARSQVLHRLRSAVTEFYSHRLGSKPDQGKVFGVSSRTKVSNHFLRGGSFTRFADWRFVHRARLDVLPLNGARRWGEGDKRCRRCGENMETLPHVLCHCRPHSAAWQLRHDAVVSRIARACRLPGTLRVNQRVEGLTGDLEALRPDIVVRHEPSKSVVIIDVTVTFENGIEAFHAARDRKISKYLPIGAALEEQGYRVVTDAIVVGALGSWDQANEPVLKLLRIGKKYAGLMHRLIVSETIRWGRDIYVEHVSGVRQYAAAPAAVPPVDTTLPPPAVIVASPLALLPRTSENNIAPRNITCDIDIGHAARTMTQGPSGPV

SEQ ID NO: 235 - protein, 2001 aa, Lasioglossum morio
MAGPSNSPITIYIEFPFPGEFRCPECFGKPGIKLSGVYKTHNDLVKHAKKHHPGHIVIHRCGVCGEHGTGAFPLRYVKAHHTAAHTDRPRPNRCGRGGAYVIPLTTAAPTTVRSSLSTTSTNFSGRGRPESILRDANGAGTTIVTTTSTTTPTTTTPTTTTTADGLRPAATTVTSGGAPPPPTSPAAVPTTRTAATSTISTTTTTTTSTTTRRTASSSLRQQKLSFGPAAAGRGVTTETNTATETRQTLPPTSTATSRARAVVATSRTSTTPPPPRVMTRTRSATALASAASLRKSTTPPPPPAPTRKRTTATRTSNTPPTSTATTRAAAASKAPLRKSTTPPPPPPPTRRRNEVGRPSTTPPPSTAASRPAAAAASGAPLRKSTTPPPPPAPTTRTRTATTTATVATTKKLPSPSTTSTKTTTTTTTTKRGGATDKRLESVSGSTPPGTRAAPAANRRAGPGAVQRTSPSLPTRKSTPSSPPTLSNSGPARRTRGSTVSPKTKAPPTSPRGPVTRSRGASVPVELESVKRRTAALTTTTTRRKAAPKPGTKRSPRGVGKREEACAPTNPSNPTLHPDSSPRLFTSVIRTAASPTYAAVTAGATVVSATPPGDQGALRRQRSMTPIPPESPAATPSSLALTTILRALSTSPCSPPTTFGEQAGARGCCVVSCVAVATLTTTTVTTTVSGGSIMTSRPLAGGERGAKRTWPVPAIPSLPPIEEVTVTPGPARAASSPSPPAIEEREEEGGEEDDDSPLPWQSAASRRRRRRQRALSSSPSSPSFSMPLSRSPNPETSLQRTTPTRRPSAEDVRTPEPIRRTPARAQRPHTPPPAPDANRATRGVTTTNTITATTTTAAPRVRNQPPPSRQQRRGAQRGTTAGDGRSSRPVSIRAPGDAARVVRSRDLRDLLFRMGGYASRFRSMGGNNPGRSSQGGSTTGATVPAGRTNAPSGVVRVPTTPQLPRDSEHRRPTPVGQPNPRPRASLRREQAALATERGLLIDLAEAVDNPQDLEEVATQIAAFFKRFGSQPAGVGGRTGGRPTTNARERGRVVNTPVTGPSGRHEGVTPRGTDQVREATRIQRLFRQNRRRAVQEVLMGAPAQCQVPKDQVTEHFRNMYSPASTPPASGPLGFPSEAPTASSDAALVQPFGVSEVDRRLRRMSNSAPGPDGLSYRDLRKADPSCSILTAYFNMIRRLESVPSSWKSSNTVLIHKKGDRMDLSNWRPLAMSDTTPKLFAAVLADRLVSWALQNGRLSPQQKGFLPCEGCYEHNYTLQEILNDARRGKSQVVVAWLDLSNAFGSIPHSTIYHAFAEAQVPLPFRNIVEGLYDGCTTRVRTSQGFTDPVPILSGVKQGCPLSPVAFNLALEPVLRAASGTSVGYTLHGRRYNILAYADDLVLIADTPGGMDTLLNTVEAAAGGVGLRFNPAKCATLHQDSRGSRRAVPTCFSLQGQGLKSLAAGVPYEHLGVPTGFQVKQTPLLSIEELIRDLHAVDRSLLAPWQKCETVGSFILPRLDFLLRGAHVEKGPLKTADKLVRKLAKSWLNLPERASAEVVYLPPSRGGCGLLPLADLADALVIGHAFRLLTTPDPAISGLARDSLREAVARKIGRPPTDEDLATYLSGSLEGEFARTSWDFSTLWSRARNAARRSSESLQLRWEWCAARQELGLRLRGSRGRTTVVTPVARSQVLHRLRSAVTEYYSHRLDSKPDQGKVFGVSSRTKVSNHFLRGGSFTRFADWRFVHRARLNVLPLNGARRWGEGDKRCRRCGENLETLPHVICHCRPHSAAWQLRHDAVVSRIARACRLPGTLRVNQRVEGLTDDLEALRPDIVVRHEPSKSVVIIDVTVTFENGIEAFHAARERKIMKYLPIGAALEEQGYRVVTDAIVVGALGSWDQDNESVLKLLRIGKKYAGLMRRLIVSETIRWGRDIYVEHVSGVRQYAAAPAAVPPADVTLPPPAVNVASPLALPHRSDESIAPRNENCDRDIGHTAHTLTQGPSGPI

SEQ ID NO: 236 - protein, 1895 aa, Lasioglossum lativentre
MAGPNSCPLTILIDFPFPAEFRCPECYGKPGIKLGGTYKSHTDLAKHAKKYHPGHSIVHRCGECGELGTGKYPLKTVKAHHTAKHSGSGAPGRSGTSRTTTGSATTRTSGARSSISATSTNVSGRGRPESILRFAAPTGPTRATIIATTTTTTTTTTTTIVTTAAAVPSRPSPTASPPCGAPTTTSSATRTTTTAATTTTAATRTTAPTTVTRPPPTAPPRLSAGATAGGRTATAAPSPPSAPSTTRATTTTKAVPPPSKAPPRRATIAGAASRPAPRTSGTPPLPAPLRTRAAAATASAASIRKSLTPPTLRAVSRTTTAAARPAPATRKPPTPPPSTANRASLPRRSGEAALAPTPPGTRTVPAAKTRAGTSAAPKRSPSQPGRRPPPSSVNTSGDEPVARRTRGATISPPKRSPTTTSRGLMTRSRRGASVPVELPGARRPTTTTTRRAAATKAGPKKRTTPPRKSGLGQGGVFAPAPAPTTKPNPDSRTATPPRPFTSVVRTAGSPSYAAVTAGTTVTTGTRGDCGERRQLRSATRAASVPPELMAGAVSSPQLSGTTIATWSPPCSTPPTIRGVQGEAGGFAVSSAVPATLTTVTVTVTTSGGPIVTSRPFAGGVERVKRTRQVPEVLSLPPIMEVVTPGPARAAAAAGTPTNTRRTQEEEEEDDASPMPWQLATSRSRRIRRGPLSPSSSSESSGEDTPPPPSRTHRRPPARVQHPSPPVSTPVTSGALRGTAPHRMETRPSAPPSAFPIFHRGPGERHPQPRGGGRHSSHRTSDGVSGARRAPGGSARMSNRRVSNDPMGGFASRFRSMGGNNPVRPQPGGSAREGTRVPAGQANAPASVVRAPATNRRPQVPERRQPRTDGQPLPRPRASRAREQAALARERELLVDLTRAVDNTQDLEEVASQIAAFFKGFGKQPVGGGASERPTTGDGRRRRGATTGRQRRPDSAGLDSIPSGADRVREATRLQRLFRENRRRAVQEVLTGPPVQCQVERGRVLQHFLDMYSPAGELQAAGPLGFPSEAPGSGSSEALVRPFEVREVDRRIRRMSNSAPGPDGLSYRDLRKADPSCFVLTALFNMCRRLESVPASWKESNTVLIHKKGDREDLSNWRPLAMSDTTPKLFAAVLADRLVSWAVENERLSPQQKGFLPCEGCFEHNFALQEVLNDARGGRRQVVVAWLDLTNAFGSIPHATIYRAFAEAAVPQPFQNIVKELYRGCTTRVRTAQGFTDPVPILSGVKQGCPLSPVAFNLALEPVLRAVTATGVGYALHGERYSVLAYADDLALIADTPEGMETLLKTVEAVANGVGLRFNPSKCATLHQDSRGTRRVLPTRFSLQGQEIRALAAGQPYEHLGVPTGFQVRQTPLSSIEELVRDLRAVDQSLLAPWQKCEAVATFVLPRLDFMLRGASVEKGPLKVADKLLRKLAKSWLNLPQRASAEVVYLPPSRGGCGLLPLADLADALVVGHAFRLLTAPDPAISGLARASLREAVAKKIGREPSEDDLATYLSGSLEGEFARDGGTFSTLWSRARNAARRSGGMLQLRWQWSEARGEMAVGLRGSRGRTVVVPPSARHQILHRLRAAVVEYYTDRLSKKPDQGKVFEVSSRMKMSNHFLRGGSFTRFADWRFIHRARLNVLPLNGARRWGEGDKRCRRCGETLETLPHVMCHCTPHAAAWQLRHDAIVARISRACRLPGELRVNRRVEGLTGDLEALRPDIVVRHEPSKSIVIVDVTVAFENGAEAPKLARERKISKYLPLGAALEGQGYRVVIDAIVVGALGSWDPDNEVTLKLLRIGRTYAALMRRLIVSETIRWGRDIYVEHVSGVRQYQVAPPPRVSVPDPVTPRESNGGAVPRMDVPPSANDAFTPRSSAENDGPEALILTQGPSGPAY

SEQ ID NO: 237 - protein, 2012 aa, Lasioglossum morio
MAGPTSSPLTIYIEFPFPGEFRCPECYGKPGTRTSGVYKTHNDLVKHAKKCHPGHIVVHRCGVCGEHGTGAFPLRYVKAHHLAAHTDGPRPSRCGRGGAYVIPLTTAAPTTVRSSLSTTSTNFSGRGRPESILRDASGAGPTIVTTTSTTTPTTTTPTTTTTADGLRPAATTPSISGGAHPPSPSGPAAVPTTRTAATSTTSTSTTTTTSTTTRRTASSSLTQQRLPFGPSTAGRGATTGTKQATKTRQTTLTTTTATSRARAVVATSRTSTTPPPSQATLRTRSATAAAPAASLRKSTTPPPPPAPTRTRTSATRTSTTPPPSTATTRTRTATAAASKAPLRKSTTPPPPPPPTRRRTEAGRPSTTPPSSKANPGTKPAAAAAPRAPPRKPTTPPPPPATSRTRTATPPATVATSKLPSPPTTTTRTTATTTTKRGGATRRSDEVVSGSPPSGTRAAPAANRRAGPGAVQRTSPSLPTRKSNPSSPPTMSTSGPARRTRGSTVSPKTRAPPTSPRGPVTRSRGASVPVELESVKRRTAALTTTTTRRKAAPKPGTKRSPRGVGKRDGPCAPTNPSNPTLHPDSSPRLFTSVIRTAASPTYAAVTAGATVVTAAPPGDHTEGRRLRSMSRASSLPPESSTAMPSSPPLTAILRALPTSPCSPPTIHGEEEGARDGCVVPCVAPATLTTTTVTTTVSGGSIMTSRPLAGGERGAKRAWPVPAIPSLPPIEEVTVTPGPARAASSPSPPAIEEREEEGGEEEDDSPLPWQSAASRRRRRRQRALSSSPSSPSFSLPLSRSSMPETSPQDRTTPTRRPSAEDVRTPEPQRRPPARAQRPPTPPPAPAATRASRGATTTTITATTTTTAAPRVRDQPPSSRQQRRGAQRGTTAGDGRSSRPVNSRAPGGAARVDRSRDLRDLLFRMGGYASRFRSMGGNNPGRLNQSGSATGATVPAGRTNAPPGVVRVPATPQLPRDSEHRRPTPVGQPNPRPRASLRREQAALATERGLLIDLAEAVDNPQDLEEVATQIAAFFKRFGSQPAGVGGRTGGRPTTNAGRRGRVVNTPVTGPSERHEGVTPRRTDQVKEATRIQRLFRQNRRRAVQEVLMGAPAQCQVPKDQVLEHFLNMYSPASTPTAAGPLGFPSEAPTAASDAALVEPFGVSEVDRRLRRMSNSAPGPDGLSYRDLRKADPSCGILTAYFNMVRRLESVPSSWKSSNTVLIHKRGDRMDLSNWRPLAMSDTTPKLFAAVLADRLVSWALHNGRLSPQQKGFLPCEGCYEHNYTLQEILNDARRGRSQVVVAWLDLSNAFGSIPHSTIYHAFAEAQVPLPFRNIVEGLYDGCTTRVRTSQGFTDPVPILSGVKQGCPLSPVAFNLALEPVLRAASGTSVGYTLHGRRYNILAYADDLVLIADTPGGMDTLLSTVEAAAGGVGLRFNPAKCATLHQDSRGSRRAVPTCFSLQGQALKSLAAGVPYEHLGVPTGFQVKQTPLLSIEELIRDLHAVDRSLLAPWQKCETVGSFILPRLDFLLRGAHVEKGPLKVADKLVRKLAKSWLNLPERASAEVVYLPPSRGGCGLLPLADLADALVIGHAYRLLTAPDPAISGLARDSLREAVARKIGRPPTDLDLATYLSGSLEGEFARTSWDFSTLWSRARNAARRSSNSLQLRWEWCAERQELGIRLRGSRGRTTVVTPVARSQVLHRLRSAVTEFYSHRLGSKPDQGKVFGVSSRTKVSNHFLRGGSFTRFADWRFVHRARLDVLPLNGARRWGEGDKRCRRCGENMETLPHVLCHCRPHSAAWQLRHDAVVSRIARACRLPGTLRVNQRVEGLTGDLEALRPDIVVRHEPSKSVVIIDVTVTFENGIEAFHAARDRKISKYLPIGAALEEQGYRVVTDAIVVGALGSWDRANEPVLKLLRIGKKYAGLMRRLIVSETIRWGRDIYVEHVSGVRQYAAAPAAVPPVDSTLPPPAVNVASPLALLPRTDENCFAPREYIDSVTDIGHAARTMTQGPSGPV

SEQ ID NO: 238 - protein, 2008 aa, Lasioglossum morio
MAGPTSSPITIYIEFPFPGDFRCPECFGKPGIKLSGVYKTHNDLVKHAKKHHPGHIVIHRCGVCGEHGTGAFPLRYVKAHHTAAHTDRPRPNRCGRGGAYVIPLTTAAPTTVRSPSSTTSTNFSGRGRPESILRDANGAGTTIVTTTSTTTPTTTTPTTTTTADGLRPAATTVTSGGAHPPSPSGPAAVPTTRTAATSTTSTSTTTTTSTTTRRTASSSLRQQKLSFGPAAAGRGVTTETNTATETRQTLPPTSTATSRARAVVATSRTSTTPPPPRVMTRTRSATALASAASLRKSTTPPPPPAPTRKRTTATRTSNTPPTSTATTRAAAASKAPLRKSTTPPPPPPPTRRRNEVGRPSTTPPPSTAASRPAAAAASRAPLRKSTTPPPPPAPTTRTRTATTTATVATTKKLPSPSTTSTKTKTTTTTTKRGGATDKRLESVSGSTPPGTRAAPAANRRAGPGAVQRTSPSLPTRKSTPSSPPTLSNSGPARRTRGSTVSPKTKAPPTSPRGPVTRSRGASVPVELESVKRRTAALTTTTTRRKAAPKPGTKRSPRRVGKREEACAPTNPSNPTLHPDSSPRLFTSVIRTAASPTYAAVTAGATVVTAAPPGDHTEGRRLRSMSRASSLPPESSTAMPSSPPLTAILRALSTSPCSPPTIHGEDEGARDGCVVPCVAPATLTTTTVTTTVSGGSIMTSRPLAGGERGAKRAWPVPAIPSLPPIEEVTVTPGPARAASSPSPPAIEEREEEGGEEEDDSPLPWMSAASRRRRRRQRALSSSPTSPSVSLPLSRSPNPETSLQRTTPTRRPSAEDVRTPEPPRRPPARAQRPPTPPPAPAVTRASRGATTTNTITATTTTTAAPRVREQPPSSRQQRRGAQRRTTAGDGRNSRSGSSRAPGDAARVDRSRDLRDLLFRMGGYASRFRSMGGNNPGRSNQSGSTTGATVPAGRTNAPPGVVRVPATPQLPRDSEHRRPTPVGQPNPRPRASLRREQAALATERGLLIDLAEAVDNPQDLEEVATQIAAFFKRFGSQPAGVGGRTGGRPTTNAGRRGRVVNTPVTGPSERHEGVTPRRTDQVKEATRIQRLFRQNRRRAVQEVLMGAPAQCQVPKDQVLEHFRNMYSPASTPTAAGPLGFPSEAPTAASDAALVQPFGVSEVDRRLRRMSNSAPSPDGLSYRDLRKADPSCGILTAYFNMVRRLESVPSSWKSSNTVLIHKKGDRMDLSNWRPLAMSDTTPKLFAAVLADRLVSWALHNGRLSPQQKGFLPCEGCYEHNYTLQEILNDARRGRSQVVVAWLDLSNAFGSIPHSTIYHAFAEAQVPLPFRNIVEGLYDGCTTRVRTSQGFTDPVPILSGVKQGCPLSPVAFNLALEPVLRAASGTSVGYTLHGRRYNILAYADDLVLIADTPGGMETLLNTVEAAAGGVGLRFNPAKCATLHQDSRGSRRAVPTCFSLQGQGLKSLAAGVPYEHLGVPTGFQVKQTPLLSIEELIRDLHAVDRSLLAPWQKCETVGSFILPRLDFLLRGAHVEKGPLKVADKLVRKLAKSWLNLPERASAEVVYLPPSRGGCGLLPLADLADALVIGHAYRLLTAPDPAISGLARDSLREAVARKIGRPPTDLDLATYLSGSLEGEFARTSWDFSTLWSRARNAARRSSNSLQLRWEWCAERQELGIRLRGSRGRTTVVTPVARSQVLHRLRSAVTEFYSHRLGSKPDQGKVFGVSSRTKVSNHFLRGGSFTRFADWRFVHRARLDVLPLNGARRWGEGDKRCRRCGENMETLPHVLCHCRPHSAAWQLRHDAVVSRIARACRLPGTLRVNQRVEGLTGDLEALRPDIVVRHEPSKSVVIIDVTVTFENGIEAFHAARDRKISKYLPIGAALEEQGYRVVTDAIVVGALGSWDQANEPVLKLLRIGKKYAGLMRRLIVSETIRWGRDIYVEHVSGVRQYAAAPAAVPPVDSTLPPPAVNVASPLAPLPRTDENCFAPREYIDSVTDIGHAARTMTQGPSGPV

SEQ ID NO: 239 - protein, 1995 aa, Lasioglossum morio
MAGRTNSPTTIVIEFPFPGEFRCPECFGKPGIKLSGVYKTHNDLIKHAKKHHPGHVVVHRCGVCGEHGTGAFPLRYVKAHHTAAHTDRPRPNRCGRGGAYVIPLTTAAPTTLRSSLSTTSSNFSGRGRPESILRDANGAGTTIVTTTSTTTPTTTTPTTTTTADGLRPAATMTSISGGAHPPSPSGPAAVPTTRTAATSTTSTSTTTTTSTTTRRTASSSLTQQRLPFGPSAAGRGATTGTKQATKTRQTTLTTSTATSRARAAVATSRTSTTPPPSQVTLRTRSATAAAPAASLRKSTTPPPPPAPTRTRTSATRTSTTPPPSTATTRTRTAAAAASKAPLRKSTTPPPPPPPTRRRTEAGRPSTTPPPSKATSGTKPAAAAAPRAPPRKSTTPPPPPATSWMRTATPPATVATSKLPSPPTTRTTATTTTKRGGATRRSDEVVSGSTPPGTRAAPAANRRAGPGAVQRTSPSLPTRKSTPSSPPTLSNSGPARRTRGSTVSPKTKAPPTSPRGPVTRSRGASVPVELESVKRRTAALTITTTRRKAAPKPGTKRSPRGVGKRDGPCAPTNPSNPTLHPDSSPRLFTSVIRTAASPTYAAVTAGATVVTAAPPGDHTEGRRLRSMSRASSLPPESSTAMPSSPPLTAILRALSASPCSPPTIHGEEEGARDGCVVPCVAPATLTTTTVTTTVSGGSIMTSRPLAGGGERGAKKAWPVPAIPSLPPIEEVMVSPGPARTASSPSPPTIEEREEEGGEEEDDSPLPWQSAASRRRRRRQRALSSSPSSPSLSMPLSRSPNLETSLQRTTPTRRPSAEDVRTLEPPRRPPARAQRPPTPPPAPAAPRASRGATTTTITATTTTTAAPRVRNQPPPSRQQHRGAQRGATAGDGRSSRPVSSRAPGDAARVDRSRDLRDLLFRMGGYASRFRSMGGNNPGRSSQGGSTTGATVTAGRTNAPSGVVRVPATPQLPRDPEHRRPTPVGQPNPRPRASLRREQAALATERGLLIDLAEAVDNPQDLEEVATQIAAFFKRFGSQPAGVGGRTGGRPTTNARERGRVVNTPVTGPSGRHEGVTPGGTDQVREATRIQRLFRQNRRRAVQEVLMGAPAQCQVPKDQVTEHFRNMYSPASTPPASGPLGFPSEDPTASSDAALIQPFGVSEVDRRLRRMSNSAPGPDGLSYRDLRKADPSCSILTALFNMIRRLESVPSSWKSSNTVLIHKKGDRMDLSNWRPLAMSDTTPKLFAAVLADRLVSWALQNGRLSPQQKGFLPCEGCYEHNYTLQEILNDARRGKSQVVVAWLDLSNAFGSIPHSTIYHAFAEAQVPLPFRNIVEGLYDGCTTRVRTSQGFTDPVPILSGVKQGCPLSPVAFNLALEPVLRAASGTSVGYTLHGRRYNILAYADDLVLIADTPGGKDTLLNTVEAAAGGVGLRFNPAKCATLHQDSRGSRRAVPTCFSLQGQGLKSLAAGVPYEHLGVPTGFQVKQTPLLSIEELIRDLHAVDRSLLAPWQKCETVGSFILPRLDFLLRGAHVEKGPLKVADKLVRKLAKSWLNLPERASAEVVYLPPSRGGCGLLPLADLADALVIGHAYRLLTAPDPAISGLARDSLREAVARKIGRTPTDLDLATYLSGSLEGEFARTSWDFSTLWSRARNAARRSSNSLQLRWEWCAERQELGIRLRGSRGRTTVVTPVARSQVLHRLRSAVTEFYSHRLGSKPDQGKVFGVSSRTKVSNHFLRGGSFTRFADWRFVHRARLDVLPLNGARRWGEGDKRCRRCGENMETLPHVLCHCRPHSAAWQLRHDAVVSRIARACRLPGTLRVNQRVEGLTGDLEALRPDIVVRHEPSKSVVIIDVTVTFENGIEAFHAARDRKISKYLPIGAALEEQGYRVVTDAIVVGALGSWDQANEPVLKLLRIGKKYAGLMRRLIVSETIRWGRDIYVEHVSGVRQYAAAPAAVPPVDSTLPPLAVNVASPLALLPRSTESTIAPRVINHSDTQT

SEQ ID NO: 240 - protein, 1898 aa, Lasioglossum lativentre
MAGPSNSPLIITIDFPFPAEFRCPECYGKPGIKLGGTYKSHTDLAKHAKKYHAGHTIVHRCGECGELGTGKYPLKTVKAHHTAKHSGSGAPGRSGTSRTTTGSATTRTSGARSSFSATSTNVSGRGRPESILRFAAPTGLTRAPTIATTTTTTTTTTTTVITTAAAVPSRPPPTASPPCGAPTTTSSATRTTTTAATTTTAATRTTAPTTVTRPPPTAPLRLSAGATAGGRTATAAPSPPSAPSTTRATTTTRAVPPPSKAPQRRATIAGATSRPAPRTSGTPPLPAPLRTRAAAATASAASIRKSLTPPTLRAGLRTTTAAARPAPATRKPPTPPPSTANRASLPRRSGEAALAPTPPGTRTVPAAKTRAGTSAATRKSPSQPGRRPPPSSVNTSGDEPVARWTRGATISPPKRSPTTTSRGLMTRSRRGASVPVELPGARRPTTTTTTTTRKAAASKAGPKKRTTPPRKSGLGQGGASAPTPAPTSKPNPDSRAATPPRPFTSVVRTAASPSYAAVTAGTTVTTGTRGDCGERRQLRSATRAASVPPELMAGAVSSPQLSGTTNATWSPPCTTPPTIRGVQGEAGGFAVSSAVPATLTTVTVTVTTSGGPIVTSRPFAGGVERVKRTRQVPEVLSLPPIMEVVTPGPTRAAAAAGTPIVSRRPQEEDEEDDVSPMPWQLAASRSRRIRRGPLSPSSSSESSGEDTPPPPSRTHRRPPARVQHPSPPVSTPVTSGALRGTAPHRMEVRPSAPPSAFPIFQRGPGERHPQPRGGGRHSSHRTSDGVSGARRAPGGSARMSNRRVSNDPMGGFASRFRSMGGNNPVRPHPGGSAREGTRVPAGQADAPAGVVRAPATNRRPQVPEHRQPRTDGQPLPRPRASRAREQAALARERELLVGLTRAVDNTQDLEEVASQIAAFFKGFGKQPAGGGASERPTTGDGRRRRGATTGRQRRPDNAGLDSVLSGADRVKEATRLQRLFRENRRRAVQEVLTGPPVQCQVERGRVLQHFLDMYSPAGELHAAGPLGFPSEAPGSGSNAALISPFEVREVDRRIRRMSNSAPGPDGLSYRDLRKADPDCIVLTAFFNMCRRLESVPASWKESNTVLIHKKGDREDLSNWRPLAMSDTTPKLFAAVLADRLVSWAVDNERLSPQQKGFLPCEGCFEHNFALQEVLDDARGGRRQVVVAWLDLTNAFGSIPHSTIYRAFAEAAVPLPFQNIVKELYRGCTTRVRTAQGFTDPVPILSGVKQGCPLSPVAFNLALEPVLRAVTASGVGYTLHGQRYSVLAYADDLALIADTPEGMETLLKTVEAAANGVGLRFNPAKCATLHQDSRGTRRVLPTRFSLQGQEIRALAAGQPYEHLGVPTGFQVRQTPLSSIEELVRDLRAVDQSLLAPWQKCEAVATFVLPRLDFMLRGASVEKGPLKIADKLLRKFAKSWLNLPRRASAEVVYLPPSRGGCGLLPLADLADALVIGHAFRLLTAPDPMISGLAGASLRKAVAGKIKREPTNDDLATYLSGSLEGEFAKDSGGFSTLWSRARNAARRSGGMLQLRWLWSEARGEMAVGLRGSQGRTVVVPPNARHQILRRLRSAVVEYYTDRLGNKPDQGKVFGVSSRMKVSNHFLRGGSFTRFADWRFIHRARLDVLPLNGARRWGEGDKRCRRCGEALETLPHVMCHCTPHAAAWQLRHDAIVTRVSRACRLPGELRVNRRVEGLTGDLEALRPDIVVRHEPSKSVVIVDVTVAFENGAEAPKLARERKILKYLPLGAALEGQGYRVVIDAIVVGALGSWDPDNEVTMKLLRIGRTYAALMRRLIVSETIRWGRDIYVEHVSGVRQYQVAPPSRVSVPDPDTPRESNGGAVPRLDGPPLANDAFAPRRSATIDGHVAPTLTQGPSGPVD

SEQ ID NO: 241 - protein, 1315 aa, Lasioglossum morio
MTSRPLAGGVERGSKRTRQEPAVLSLPPIAEVTVSPGPAWTARSPSPPTIEEREEVEREEEEDDSPLPWQSAASRRRRRRQLLSLSLSPVTPPSSSVPPSRSSIPETSPQRTTPPRRPPAGDIRTPELHRRPPARPQRPPTPPPAPEASRAMRRVNDTTITAATTTQAPRTGAQPPPSLQPRRSAQRGTTAGGEDNTRRVSSRAPGGAARVDRSRDLRDMLFRMGGFASRFRSMGGNNPGRSNQGDSTTGATVPVGRTNAPPGVVRVPATPQLPRDSEHRRPTPVGQPNPRPRASLRREQAALATERGLLIDLAEAVDNPQDLEEVATQIAAFFKRFGSQPAGVGGRTGGRPTTNARERGRVVNTPVTGPSGRHEGVTPRGTDQVREATRIQRLFRQNRRRAVQEVLMGAPAQCQVPKDQVTEHFRNMYSPASTPPASGPLGFPSEAPTAASDAALVEPFGVSEIDRRLRRMSNSAPGPDGLSYRDLRKADPSCGILTAYFNMVRRLESVPSSWKSSNTVLIHKKGDRMDLSNWRPLAMSDTTPKLFAAVLADRLVSWALHNGRLSPQQKGFLPCEGCYEHNYTLQEILNDARRGRSQVVVAWLDLSNAFGSIPHPTIYHAFAEAQVPLPFRNIVEGLYDGCTTRVRTSQGFTDPVPIRSGVKQGCPLSPVAFNLALEPVLRAASGTSVGYTLHGRRYNILAYADDLVLIADTPGGMDTLLSTVEAAAGGVGLRFNPAKCATLHQDSRGSRRAVPTCFSLQGQGLKSLAAGVPYEHLGVPTGFQVKQTPLLSIEELIRDLHAVDRSLLAPWQKCETVGSFILPRLDFLLRGAHVEKGPLKLADKLVRKLAKSWLNLPERASAEVVYLPPSRGGCGLLPLADLADALVIGHAFRLLTTPDPAISGLARDSLREAVARKIGRTPTDQDLATYLSGSLEGEFARTSWDFSTLWSRARNAARRSSESLQLRWEWCAARQELGIRLRGSRGRTTVVTPVARSQVLHRLRSAVTEYYSHRLDSKPDQGKVFGVSSRTRVSNHFLRGGSFTRFADWRFVHRARLNVLPLNGARRWGEGDKRCRRCGENLETLPHVMCHCRPHSAAWQLRHDAVVSRIARACRLPGTLRVNQRVEGLTGDLEALRPDIVVRHEPSKSVVIIDVTVTFENGIEAFHAARERKISKYLPIGAVLEEQGYRVVTDAIVVGALGSWDQANEPVLKLLRIGKKYAGLMRRLIVSETIRWGRDIYVEHVSGVRQYAAAPAAVPPVDATPPPPAVMVTPPLAPPPRADSVAPRTANSNIRDTTTMGHEAPVMTQGPSGPV

SEQ ID NO: 242 - protein, 1463 aa, Lasioglossum morio
MAGPTNSPITIYIEFPFPGEFRCPECFGKPGIKLSGVYKTHNDLIKHAKKHHPGHVVVHRCGVCGEHGTGAFPLRYVKAHHTAAHTDRPRPNRCGRGGAYVIPLTIAAPTTVRSSLSTTSTNFSGRGRPESILRDASGAGPTIVTTTVSGGSIMTSRPLAGGERGAKRAWPVPAIPSLPPIEEVTVSPGPARTASSPSPPAIEEREEEGGEEEDDSPLPWMSAASRRRRRRQRALSSSPSSPSFSMPLSRSPNPETSLQRTTPTRRPSAEDVRTPEPQRRPPARAQRPLTPPPAPAAPRASRGATTITITATTTTTAAPRVRNQPPPSRQQRRGAQRGTTAGDGRNSRSGSSRAPGDAAWVDRSRDLRDLLFRMGGFASRFRSMGGNNPGRSNQGGSTTGATVPAGRTNAPSGVVRVPATPQLPRDSEHRRPTPVGQPNPRPRASLRREQAALATERGLLIDLAEAVDNPQDLEEVATQIAAFFKRFGSQPAGVGGRTGGRPTTNAGRRGRVVNTPVTGPSERHEGVTPRRTDQVKEATRIQRLFRQNRRRAVQEVLMGAPAQCQVPKDQVLEHFLNMYSPASTPTAAGPLGFPSEAPTAASDAALVEPFGVSEVDRRLRRMSNSAPGPDGLSYRDLRKADPSCSILTACFNMIRRLESVPSSWKSSNTVLIHKKGDRMDLSNWRPLAMSDTTPKLFAAVLADRLVSWALHNGRLSPQQKGFLPCEGCYEHNYTLQEILNDARRGKSQVVVAWLDLSNAFGSIPHSTIYHAFAEAQVPLPFRNIVEGLYDGCTTRVRTSQGFTDPVPILSGVKQGCPLSPVAFNLALEPVLRAASGTSVGYTLHGRRYNILAYADDLVLIADTPGGMDTLLSTVEAAAGGVGLRFNPAKCATLHQDSRGSRRAVPTCFSLQGQGLKSLAAGVPYEHLGVPTGFQVKQTPLLSIEELIRDLHAVDRSLLAPWQKCETVGSFILPRLDFLLRGAHVEKGPLKTADKLVRKLAKSWLNLPERASAEVVYLPPSRGGCGLLPLADLADALVIGHAFRLLTTPDPAISGLARDSLREAVARKIGRPPTDEDLATYLSGSLEGEFARTSWDFSTLWSRARNAARRSSNSLQLRWEWCAERQELGIRLRGSRGRTTVVTPVARSQVLHRLRSAVTEFYSHRLGSKPDQGKVFGVSSRTKVSNHFLRGGSFTRFADWRFIHRARLDVLPLNGARRWGEGDKRCRRCGENMETLPHVLCHCRPHSAAWQLRHDAVVSRIARACRLPGTLRVNQRVEGLTGDLEALRPDIVVRHEPSKSVVIIDVTVTFENGIEAFHAARGRKISKYLPIGAALEEQGYRVVTDAIVVGALGSWDRDNESVLKLLRIGKKYAGLMRRLIVSETIRWGRDIYVEHVSGVRQYAAAPAAVPPVDTTLPPPAVIVASPLALLPRTSESNIAPRNNTCDVDIGHEARTSTQGPSGPV

SEQ ID NO: 243 - protein, 1314 aa, Lasioglossum morio
MTSRPLAGGVERGSKRTRQEPAVLSLPPIAEVTVSPGPAWTARSPSPPTIEEREEVEREEEEDDSPLPWQSAASRRRRRRQLLSLSLSPVTPPSSSVPPSRSSIPETSPQRTTPPRRPPAGDIRTPELHRRPPARPQRPPTPPPAPEASRAMRRVNDTTITAATTTQAPRTGAQPPPSLQPRRSAQRGTTAGGEDNTRRVSSRAPGGAARVDRSRDLRDMLFRMGGFASRFRSMGGNNPGRSNQGGSTTGATVPAGRTNAPPGVVRVPATLQLPRDSEHRRPTPVDRPNPRPRASLRREQAALATERGLLIDLAEAVDNTQDLEEVATQIAAFFKRFGSQSAGVGGRTGGRPTTNARERGRVVNTPVTGPSGRHEGVTPRGTDQVREATRIQRLFRQNRRRAVQEVLMGAPAQCQVPKDQVTEHFRNMYSPASTPPASGPLGFPSEAPTASSDAALVQPFGVSEIDRRLRRMSNSAPGPDGLSYRDLRKADPSCSILTALFNMIRRLESVPSSWKSSNTVLIHKKGDRMDLSNWRPLAMSDTTPKLFAAVLADRLVSWALHNGRLSPQQKGFLPCEGCYEHNYTLQEILNDARRGRSQVVVAWLDLSNAFGSIPHSTIYHAFAEAQVPLPFRNIVEGLYDGCTTRVRTSQGFTDPVPILSGVKQGCPLSPVAFNLALEPVLRAASGTSVGYTLHGRRYNILAYADDLVLIADTPGGMDTLLNTVEAAAGGVGLRFNPAKCATLHQDSRGSRRAVPTCFSLQGQGLKSLAAGVPYEHLGVPTGFQVKQTPLLSIEELIRDLHAVDRSLLAPWQKCETVGSFILPRLDFLLRGAHVEKGPLKTADKLVRKLAKSWLNLPERASAEVVHLPPSRGGCGLLPLADLADALVIGHAFRLLTTPDPAISGLARDSLREAVARKIGRTPTDQDLATYLSGSLEGEFARTSWDFSTLWSRARNAARRSSNSLQLRWEWCAERLELGIRLRGSRGRTTVVTPVARSQVLHRLRSAVTEFYSHRLGSKPDQGKVFGVSSRTKVSNHFLRGGSFTRFADWRFVHRARLDVLPLNGARRWGDGDKRCRRCGENMETLPHVLCHCRPHSAAWQLRHDAVVSRIARACRLPGTLRVNQRVEGLTGDLEALRPDIVVRHEPSKSVVIIDVTVTFENGIEAFHAARGRKISKYLPIGAALEEQGYRVVTDAIVVGALGSWDQDNESVLKLLRIGKKYAGLMRRLIVSETIRWGRDIYVEHVSGVRQYAAAPAAVSPVDSTIPLQAVTVTPSLAPLPRAISIAPRITYNANRDTTMGHEAPILTQGPSGSG

SEQ ID NO: 244 - protein, 1898 aa, Lasioglossum lativentre
MAGPSNSPLIITIDFPFPAEFRCPECYGKPGIKLGGTYKSHTDLAKHAKKYHAGHTIVHRCGECGELGTGKYPLKTVKAHHTAKHSGSGAPGRSGTSRTTTGSATTRTSGARSSFSATSTNVSGRGRPESILRFAAPTGLTRAPTIATTTTTTTTTTTTVITTAAAVPSRPPPTASPPCGAPTTTSSATRTTTTAATTTTAATRTTAPTTVTRPPPTAPLRLSAGATAGGRTATAAPSPPSAPSTTRATTTTRAVPPPSKAPQRRATIAGATSRPAPRTSGTPPLPAPLRTRAAAATASAASIRKSLTPPTLRAGLRTTTAAARPAPATRKPPTPPPSTANRASLPRRSGEAALAPTPPGTRTVPAAKTRAGTSAATRKSPSQPGRRPPPSSVNTSGDEPVARRTRGATISPPKRSPTTTSRGLMTRSRRGASVPVELPGARRRTTTTTTTTRKAAASKAGPKKRTTPPRKSGLGQGGASAPTPAPTSKPNPDSRTATPPRPFTSVVRTAASPSYAAVTAGTTVTTGTRGDCGERRQLRSATRAASVPPELMAGAVSSPQLSGTTNATWSPPCTTPPTIRGVQGEAGGFAVSSAVPATLTTVTVTVTTSGGPIVTSRPFAGGVERVKRTRQVPEVLSLPPIMEVVTPGPTRAAAAAGTPIVSRRPQEEDEEDDVSPMPWQLAASRSRRIRRGPLSPSSSSESSGEDTPPPPSRTHRRPPARVQHPSPPVSTPVTSGTLRGTAPHRMEVRPSAPPSAFPIFQRGPGERHPQPRGGGRHSSHRTSDGVSGARRAPGGSARMSNRRVSNDPMGGFASRFRSMGGNNPVRPHPGGSAREGTRVPAGQANAPAGVVRAPATNRRPQVPEHRQPRTDGQPLPRPRASRAREQAALARERELLVDLTRAVDNTQDLEEVASQIAAFFKGFGKQPAGGGASERPTTGDGRRRRGATTGRQRRPDNAGLDSVLSGADRVKEATRLQRLFRENRRRAVQEVLTGPPVQCQVERGRVLQHFLDMYSPAGELHAAGPLGFPSEAPGSGSNAALISPFEVREVDRRIRRMSNSAPGPDGLSYRDLRKADPDCIVLTAFFNMCRRLESVPASWKESNTVLIHKKGDREDLSNWRPLAMSDTTPKLFAAVLADRLVSWAVDNERLSPQQKGFLPCEGCFEHNFALQEVLDDARGGRRQVVVAWLDLTNAFGSIPHSTIYRAFAEAAVPLPFQNIVKELYRGCTTRVRTAQGFTDPVPILSGVKQGCPLSPVAFNLALEPVLRAVTASGVGYALHDQRYSVLAYADDLALIADTPEGMETLLKTVEAAANGVGLRFNPAKCATLHQDSKGTRRVLPTRFSLQGQEIRALAAGQPYEHLGVPTGFQVRQTPLSSIEELVRDLRAVDQSLLAPWQKCEAVATFVLPRLDFMLRGASVEKGPLKVADKLLRKFAKSWLNLPQRASAEVVYLPPSRGGCGLLPLADLADALVVGHAFRLLTAPDPMISGLAGASLRKAVAGKIKREPTNDDLATYLSGSLEGEFAKDSGGFSTLWSRARNAARRSGGMLQLRWLWSEARGEMAVGLRGSQGRTVVVPPNARHQILRRLRSAVVEYYADRLGNKPDQGKVFGVSSRMKVSNHFLRGGSFTRFADWRFIHRARLDVLPLNGARRWGEGDKRCRRCGEALETLPHVMCHCTPHAAAWQLRHDAIVARVSRACRLPGELRVNRRVGGLAGDLEALRPDIVVRHEPSKSVVIVDVTVAFENGAEAPKLARERKILKYLPLGAALEEQGYRVVIDAIVVGALGSWDPDNEVTLKLLRIGRTYAALMRRLIVSETIRWGRDIYVEHVSGVRQYQVAPPPRVSVPDPVTPRESNGGAVPRLDVPPSAHDVFAPRSSAENDGPEALILTQGPSGPAY

SEQ ID NO: 245 - protein, 1977 aa, Lasioglossum morio
MAGPSTSPLTIYIEFPFPGEFRCPECFGKPGIKLSGVYKTHNDLVKHAKKHHPGHIVIHRCGVCGEHGTGAFPLRYVKAHHTAAHTDRPRPNRCGRGGAYVIPLTTAAPTIVRSSLSTTSTNFSGRGRPESILRDASGAGPTIVTTTSTTTPTTTTPTTTTTADGLRPAATTVTSGGAPPPPTSPAAVPTTRTAATSTSTTTTTTTSTTTRRTASSSLRQQKLSFGPAAAGRGVTTGTKTVTKTRQTPPTTSTATSGTRAVVATSRSSTTPPPPRAMTRTRSATALAATASLRKSTTPPPPPAPSRTRASVTRTSTTPPPSTATMRTRTAAAAASKAPLRKSTTPPPPPPPTRRRTEAGRPSTTPPTSKATSGTKPAAAAAPRAPPRKSTTPPATSRTRTATSTAKVATAKKLPSPPPTSTRTATTTTTKRGGVTNRSLESVPGSPPPGTRAAPAANRRAGSGAAQRASTSPPTRKSTSSPPPTLSNSGPARRTRGSTVSPRTKAPPTSPRGPITRSRGASVPVELEDVKRRTAALTTTRRKAAPRSGTKRSPRGVGKRDGPCAPTNPSNPTLHPDSSPRSFTSVIRTAASPTYAAVTAGATVVTAAPPGDQTTLNTILRALSTSPCSPPTTFGEQEGVRGCSVVSCVAPATLTTTTVTTTVSGGSIMTSRPLAGGERGAKRAWPVPAIPSLPPIEEVTVSPGPARAVSNPSPPTIEEREEEGGEEEDDSPLPWMSAASRRRRRRQRALSSSPTSPSVSLPLSRSPNPETSLQRTTPTRRPSAEDVRTPEPPRRPPARAQRPLTPPPAPAAPRALRGATTITITATTTTTAAPRVRNQPPPSRQQRRGAQRGTTAGDGRNSRSGSSRAPGDAARVDRSRDLRDLLFRMGGYASRFRSMGGNNPGRSNQGGSTTGATVPAGRTNAPSGVVRVPTTPQLTRDSEHRRPTPVDQPNPRPRASLRREQAALATERGLLIDLAEAVDNLQDLEEVATQIAAFFKRFGSQPAGVGGRTGGRPTTNARERGRVVNTPVTGPSGRHEGATPRGTDQVREATRIQRLFRQNRRRAVQEVLMGAPAQCQVPKDQVTEHFRNMYSPASTPPASGPLGFPSEAPTASSDAALVQPFGVSEVDRRLRRMSNSAPGPDGLSYRDLRKADPSCSILTAYFNMIRRLESVPSSWKSSNTVLIHKKGDRMDLSNWRPLAMSDTTPKLFAAVLADRLVSWALQNGRLSPQQKGFLPCEGCYEHNYTLQEILSDARRGRSQVVVAWLDLSNAFGSIPHSTIYHAFAEAQVPLPFRNIVEGLYDGCTTRVRTSQGFTDPVPILSGVKQGCPLSPVAFNLALEPVLRAASGTSVGYTLHGRRYNILAYADDLVLIADTPGGMDTLLNTVEAAAGGVGLRFNPAKCATLHQDSRGSRRAVPTCFSLQGQGLKSLAAGVPYEHLGVPTGFQVKQTPLLSIEELIRDLHAVDRSLLAPWQKCETVGSFILPRLDFLLRGAHVEKGPLKTADKLVRKLAKSWLNLPERASAEVVYLPPSRGGCGLLPLADLADALVIGHAFRLLTTPDPAISGLARDSLREAVARKIGRTPTDQDLATYLSGSLEGEFARTSWDFSTLWSRARNAARRSSESLQLRWEWCAARQELGIRLRGSRGRTTVVTPVARSQVLHRLRSAVTEYYSHRLDSKPDQGKVFGVSSRTKVSNHFLRGGSFTRFADWRFVHRARLNVLPLNGARRWGEGDKRCRRCGENLETLPHVICHCRPHSAAWQLRHDAVVSRIARACRLPGTLRVNQRVEGLTDDLEALRPDIVVRHEPSKSVVIIDVTVTFENGIEAFHAARERKISKYLPIGAALEEQGYRVVTDAIVVGALGSWDRANEPVLKLLRIGKKYAGLMRRLVVSETIRWGRDIYVEHVSGVRQYAAAPAAVPPADLALPPPAVMVTSPLAPPPRTDVNCFAPRNNTCDAPTGHEALILTQGSSSPA

SEQ ID NO: 246 - protein, 2002 aa, Lasioglossum morio
MAGPTSSPITIYIEFPFPGEFRCPECFGKPGIKLSGVYKTHNDLIKHAKKHHPGHIVIHRCGVCGEHGTGAFPLRYVKAHHTAAHTDRPRPNRCGRGGAYVIPLTTAAPTTVRSPSSTTSTNFSGRGRPESILRSANGAGHTVVPTIATTTTATTTTTTTTASGLRPPAVTTATSGGAPPPSTSPAAAPTTRAAATSTTTTTSTTTTRPTSSSLRQQRLPFGPATAGRGATTGTVTMTRTRQTPPTTATATSRAKAVVATSRTSTTPPPASATLRAGPRTAAAPTTSLRKSTTPPPPPATTRTRTTASRTSTTPPPSTATARTRTATAAASKASVRKSTTPPPPPPPTRRRTAAARTSTTPPPSSATSRTKQAAAAASRAPLRKSTTPPPPPATSRTRKATTAAKVATRELPSPPTTTATATTTTRRGGVTGKSLETVSGSTPPGSRAAPAANKRAGSGAVQRASPSPPTRRSTPSSPPTQSNSGPARRTRGSTVSPRTKAPPTSPRGPITRSRGASVPVELESTKKRTAALNATRRKTAPTSGSKRSPRGVGKRDGPCAPTNPSNPTLHPDSSPRLLTSVIRTAASPTYAAVTAGATVVTAAPPGDQTEVRRLRSMTRASSLPPESPIATPSSPTLNTILRALSTSPCSPPTTLGEQEGARGCCVVSCVALATLTTTTVTTTVSGGSIMTSRPLAGGGERGAKRAWPVPAIPSLPPIEEVTVSPGPARTASSPSPPAIEEREEEGGEEDDSPLPWQSAASRRRRRQLRVLSLSPTSPSVSLPPSRSSYPETSPQEARTSPRRPSTEDVRTPEPPRRPPARAQRPLTPPPAPAATRASRGATTTTTITATTTTTAAPRTRVQPPSSRQQRRGAQRGTTAGDDRNSRSGSSRAPGDAARVDRSRDLRDMLFRLGGFDSRFRSMGGNNPGRSNQSGSTTGATVPAGRTNAPSGVVRVPATPQLPRDSGHRRPTPVDQPNPRPRASLRRDQAALATERGLLIDLAEAVDNTQDLEEVATQIAAFFKRFGSQPAGVGGRTGGRPTTDARERGRVVNTPVTGPSGRHEGVTPRGTDQVREATRIQRLFRQNRRRAVQEVLMGAPAQCQVPKDQVTEHFRNMYSPASTPPASGPLGFPSEAPTASSDAALVQPFGVSEVDRRLRRMSNSAPGPDGLSYRDLRKADPSCSILTALFNMIRRLESVPSSWKSSNTVLIHKKGDRMDLSNWRPLAMSDTTPKLFAAVLADRLVSWALHNGRLSPQQKGFLPCEGCYEHNYTLQEILNDARRGRSQVVVAWLDLSNAFGSIPHSTIYHAFAEAQVPLPFRNIVEGLYDGCTTRVRTSQGFTDPVPILSGVKQGCPLSPVAFNLALEPVLRAASGTSVGYTLHGRRYNILAYADDLVLIADTPGGMETLLNTVEAAAGGVGLRFNPAKCATLHQDSRGSRRAVPTCFSLQGQGLKSLAAGVPYEHLGVPTGFQVKQTPLLSIEELIRDLHAVDRSLLAPWQKCETVGSFILPRLDFLLRGAHVEKGPLKLADKLVRKLAKSWLNLPERASAEVVYLPPSRGGCGLLPLADLADALVIGHAYRLLTAPDPAISGLARDSLREAVARKIGRPPTDLDLATYLSGSLEGEFARTSWDFSTLWSRARNAARRSSNSLQLRWEWCAERQELGIRLRGSRGRTTVVTPVARSQVLHRLRSAVTEFYSHRLGSKPDQGKVFGVSSRTKVSNHFLRGGSFTRFADWRFIHRARLDVLPLNGARRWGEGDKRCRRCGENMETLPHVLCHCRPHSAAWQLRHDAVVSRIARACRLPGTLRVNQRVEGLTGDLEALRPDIVVRHEPSKSVVIIDVTVTFENGIEAFHAARGRKISKYLPIGAALEEQGYRVVTDAIVVGALGSWDQDNESVLKLLRIGKKYAGLMRRLIVSETIRWGRDIYVEHVSGVRQYAAAPAAVPPVDLAIPPPTVMVTPPLALLPRYTESTIAPRVITDSDTDLGHAARIMTQGPSGPV

SEQ ID NO: 247 - protein, 1934 aa, Lasioglossum morio
MAGPSTSPLTIYIEFPFPGEFRCPECYGKPGTRTSGVYKTHNDLVKHAKKCHPGHIVVHRCGVCGEHGTGAFPLRYVKAHHLAAHTDGPRPSRCGRGGAYVIPLTTAAPTTVRSSLSTTSTNFSGRGRPESILRDANGAGTTIVTTTSTTTPTTTTPTTMTTADGLRPAATTVTSGGAPPPPTSPAAVPTTRTAATSTISTTTTTTTSTTTRRTASSSLRQQKLSFGPAAAGRGVTTGTKTVTKTRQTPPTTSTATSGTRAVVATSRSSTTPPPPRAMTRTRSATALASTASLRKSTTPPPPSAPSRTRTSVTRTSTTPPPSTATSRTKPAAAAAPRAPSRKSTTPPPPPATSRTRTATSTAKVATAKKLPSPPPTSTRTATTTTTKRGGVTRKSLETVSGSTPPGTRAAPAADRRAGSGAAQRASTSPPTRKSTPSSPPTLSNSGPARRTRGSTVSPRTKAPPTSPRGPITRSRGASVPVELESVKRRTAALNTTRRKAAPTSGSKRSPRGVGKRDGPCAPTNHSNPTLHPDSSPRSFTSVIRTAASPTYAAVTAGATVVTAAPPGDQTTLNTILRALSTSPCSPPTTSGEQAGARGCCVVSCVAVATLTTTTVTTTVSGGSIMTSRPLAGGGERGAKRAWPVPAIPSLPPIEEVTVSPGPARTASSPSPPAIEEREEEGGEEEDDSPLPWMSAASRRRRRRQRALSSSPTSPSVSLPLSRSPNPETSLQRTTPTRRPSAEDVRTPEPPRRPPARAQRPPTPPPAPAVTRASRGATTTNTITATTTTTAAPRVREQPPSSRQQRRGAQRGTTAGDGRNSRSGSSRAPGDAARVDRSRDLRDLLFRMGGYASRFRSMGGNNPGRSNQSGSTTGATVPAGRTNAPPGVVRVPATPQLPRDSEHRRPTPVGQPNPRPRASLRREQAALATERGLLIDLAEAVDNPQDLEEVATQIAAFFKRFGSQPAGVGGRTGGRPTTNAGRRGRVVNTPVTGPSERHEGVTPRRTDQVKEATRIQRLFRQNRRRAVQEVLMGAPAQCQVPKDQVLEHFRNMYSPASTPTAAGPLGFPSEAPTAASDAALVEPFGVSEVDRRLRRMSNSAPGPDGLSYRDLRKADPSCGILTAYFNMVRRLESVPSSWKSSNTVLIHKKGDRMDLSNWRPLAMSDTTPKLFAAVLADRLVSWALHNGRLSPQQKGFLPCEGCYEHNYTLQEILNDARRGRSQVVVAWLDLSNAFGSIPHSTIYHAFAEAQVPLPFRNIVEGLYDGCTTRVRTSQGFTDPVPILSGVKQGCPLSPVAFNLALEPVLRAASGTSVGYTLHGRRYNILAYADDLVLIADTPGGMETLLNTVEAAAGGVGLRFNPAKCATLHQDSRGSRRAVPTCFSLQGQGLKSLAAGVPYEHLGVPTGFQVKQTPLLSIEELIRDLHAVDRSLLAPWQKCETVGSFILPRLDFLLRGAHVEKGPLKLADKLVRKLAKSWLNLPERASAEVVYLPPSRGGCGLLPLADLADALVIGHAYRLLTAPDPAISGLARDSLREAVARKIGRPPTDLDLATYLSGSLEGEFARTSWDFSTLWSRARNAARRSSNSLQLRWEWCAERQELGIRLRGSRGRTTVVTPVARSQVLHRLRSAVTEFYSHRLGSKPDQGKVFGVSSRTKVSNHFLRGGSFTRFADWRFIHRARLDVLPLNGARRWGEGDKRCRRCGENMETLPHVLCHCRPHSAAWQLRHDAVVSRIARACRLPGTLRVNQRVEGLTGDLEALRPDIVVRHEPSKSVVIIDVTVTFENGIEAFHAARGRKISKYLPIGAALEEQGYRVVTDAIVVGALGSWDQDNESVLKLLRIGKKYAGLMRRLIVSETIRWGRDIYVEHVSGVRQYAAAPAAVPPVDTTLPPTAVTVTPPLAPLPRVIESIAPRAHSDSDIGHAARTLTQGPSGPI

SEQ ID NO: 248 - protein, 1895 aa, Lasioglossum lativentre
MAGPNSCPLTILIDFPFPAEFRCPECYGKPGIKLGGTYKSHTDLAKHAKKYHPGHSIVHRCGECGEHGTGKYPLKTVKAHHTAKHSGIGAPGRSGTSRTTTGSTSTRTSSARSSFSATSTNVSGRGRPESILRFAAPTGLTRAPTIATTTTTTTTTTTTVITTAAAVPSRPPPTASPPCGAPTTTSSATRTTTTAATTTTAATRTTAPTTVTRPPPTAPLRLSAGATAGGRTATAAPSPPSAPSTTRATTTTRAVPPPSKAPQRRATIAGATSRPAPRTSGTPPLPAPLRTRAAAATASAASIRKSLTPPTLRAGLRTTTAAARPAPATRKPPTPPPSTANRASLPRRSGEAALAPTPPGTRTVPAAKTRAGTSAAPKRSPSQPGRRPPPSSVNTSGEEPVARRTRGATISPPKRSPTTTSRGLMTRSRRGASVPVELPGARRPTTTTTRRVAATKAGPKKRTTPPRKSGLGQGGVFAPAPAPTTKPNPDSRTATPPRPFTSVVRTAGSPSYAAVTAGTTVTTGTRGDCGERRQLRSATRAASVPPELMAGAVSSPQLSGTTIATWSPPCSTPPTIRGVQGEAGGFAVSSAVPATLTTVTVTVTTSGGPIVTSRPFAGGVERVKRTRQVPEVLSLPPIMEVVTPGPTRAAAAAGTPIVSRRPQEEDEEDDVSPMPWQLAAPRSRRTRRGPLSPSSSSESSGEDSPPPPTRTHRRPPARVNHQSPPVSTPVTSGTLRGTAPHRMESGPSAPPSAFPIFHRGPGERHPQPRGGGRHSSHRTSDGVSGARRAPGGSARMSNRRVSNDPMGGSASRFRSMGGNNPVRPHPGGSAREGTRVPAGQANAPASVVRAPATNRRPQVPEHRQPRTDGQPLPRPRASRAREQAALARERELLVGLTRAVDNTQDLEEVASQIAAFFKGFGKQPAGGGASERPTTGNGRRGRGATTGRQRRPDSAGLDSVPSGADRVREATRLQRLFRENRRRAVQEVLTGPPVQCQVERGRVLQHFLDMYSPAGELHAAGPLGFPSEAPGSGSNAALISPFEVREVDRRIRRMSNSAPGPDGLSYRDLRKADPDCIVLTAFFNMCRRLESVPASWKESNTVLIHKKGDREDLSNWRPLAMSDTTPKLFAAVLADRLVSWAVDNERLSPQQKGFLPCEGCFEHNFALQEVLDDARGGRRQVVVAWLDLTNAFGSIPHSTIYRAFAEAAVPLPFQAIVKELYRGCTTRVRTAQGFTDPVPILSGVKQGCPLSPVAFNLALEPVLRAVTASGVGYTLHSQRYSVLAYADDLALIADTPEGMETLLKTVEAAANGVGLRFNPAKCATLHQDSKGTRRVLPTRFSLQGQEIRALAAGQPYEHLGVPTGFQVRQTPLSSIEELVRDLRAVDQSLLAPWQKCEAVATFVLPRLDFMLRGASVEKGPLKVADKLLRKFAKSWLNLPQRASAEVVYLPPSRGGCGLLPLADLADALVIGHAFRLLTAPDPMISGLAGASLRKAVAGKIKREPTNDDLATYLSGSLEGEFAKDSGGFSTLWSRARNAARRSGGMLQLRWLWSEARGEMAVGLRGSQGRTVVVPPNARHQILRRLRSAVVEYYADRLGNKPDQGKVFGVSSRMKVSNHFLRGGSFTRFADWRFIHRARLDVLPLNGARRWGEGDKRCRRCGEALETLPHVMCHCTPHAAAWQLRHDAIVARVSRACRLPGELRVNRRVEGLTGDLEALRPDIVVRHEPSKSVVIVDVTVAFENGAEAPKLARERKILKYLPLGAALEEQGYRVVIDAIVVGALGSWDPDNEVTLKLLRIGRTYAALMRRLIVSETIRWGRDIYVEHVSGVRQYQVAPPPRVSVPDPVTPRENYRGAVPQLDVPPSANDAVAPRRGASNVGHEALLLNQGPSGPTD

SEQ ID NO: 249 - protein, 1079 aa, Lasioglossum morio
MGGNNPGSSRPSGSTTGATVPAGRTNAPPGVVRVPTTPQLPRDSGHRRPTPVGQPNPRPRASLRREQAALATERGLLIDLAEAVDNLQDLEEVATQIAAFFKRFGSQPAGVGGRTGGRPTTNARERGRVVNTPVTGPSGRHEGVTPRGTDQVREATRIQRLFRQNRRRAVQEVLMGAPAQCQVPKDQVTEHFRNMYSPASTPPASGPLGFPSEAPTASSDAALVQPFGVSEVDRRLRRMSNSAPGPDGLSYRDLRKADPSCSILTAYFNMIRRLESVPSSWKSSNTVLIHKKGDRMDLSNWRPLAMSDTTPKLFAAVLADRLVSWALHNGRLSPQQKGFLPCEGCYEHNYTLQEILNDARRGRSQVVVAWLDLSNAFDSIPHSTIYHAFAEAQVPLPFRNIVEGLYDGCTTRVRTSQGFTDPVPILSGVKQGCPLSPVAFNLALEPVLRAASGTSVGYTLHGRRYNILAYADDLVLIADTPGGMDTLLSTVEAAAGGVGLRFNPAKCATLHQDSRGSRRAVPTCFSLQGQALKSLAAGVPYEHLGVPTGFQVKQTPLLSIEELIRDLHAVDRSLLAPWQKCETVGSFILPRLDFLLRGAHVEKGPLKVADKLVRKLAKSWLNLPERASAEVVYLPPSRGGCGLLPLADLADALVIGHAYRLLTAPDPAISGLARDSLREAVARKIGRTPTDLDLATYLSGSLEGEFARTSWDFSTLCSRARNAARRSSNSLQLRWEWCAERQEMGIRLRGSRGRTTVVTPVARSQVLHRLRSAVTEFYSHRLSSKPDQGKVFGVSSRTKVSNHFLRGGSFTRFADWRFIHRARLDVLPLNGARRWGEGDKRCRRCGENMETLPHVMCHCRPHSAAWQLRHDAVVSRIARACRLPGTLRVNQRVEGLTGDLEVLRPDIVVRHEPSKSVVIIDVTVTFENGIEAFHAARERKISKYLPIGAALEEQGYRVVTDAIVVGALGSWDQDNESVFKLLRIGKKYAGLMRRLIVSETIRWGRDIYVEHVSGVRQYAAAPAAVPPADVTLPPPAVNVDSPLALSPRSDESIAPRNENCDRDIGHTAHTLTQGPSGPI

SEQ ID NO: 250 - protein, 1984 aa, Lasioglossum morio
MAGPTNSPITIVIEFPFPGEFRCPECFGKPGIKLSGVYKTHNDLVKHAKKCHPGHIVVHRCGVCDEHGTGAFPLRYVKAHHLAAHTDGPRPSRCGRGGAYVIPLTTAAPTTVRSSLSTTSTNFSGRGRPESILRDANGAGTTIVTTTSTTTPTTTTPTTTTTADGLRPAATTVTSGGAPPPPTSPAAVPTTRTAATSTISTTTTTTTSTTTRRTASSSLRQQKLSFGPAAAGRGVTTGTKTVTKTRQTPPTTSTATSGTRAVVATSRSSTTPPPPRAMTRTRSATALASTASLRKSTTPPPPSAPSRTRTSVTRTSTTPPPSTATTRARTAAAAASKAPLRKSTTPPPPPPPTRRRTEAGRPSTTPPTSKATSRTKPAAAAAPRAPSRKSTTPPPPPATSRTRTATSTAKVATAKKLPSPPPTSTRTATTTTTKRGGVTRKSLETVSGSTPPGTRAAPAADRRAGSGAAQRASTSPPTRKSTPSSPPTLSNSGPARRTRGSTVSPRTKAPPTSPRGPITRSRGASVPVELESVKRRTAALNTTRRKAAPTSGSKRSPRGVGKRDGPCAPTNHSNPTLHPDSSPRSFTSVIRTAASPTYAAVTAGATVVTAAPPGDQTTLNTILRALSTSPCSPPTTSGEQAGARGCCVVSCVAVATLTTTTVTTTVSGGSIMTSRPLAGGGERGAKRAWPVPAIPSLPPIEEVTVSPGPARTASSPSPPAIEEREEEGGEEEDDSPLPWMSAASRRRRRRQRALSSSPTSPSVSLPLSRSPNPETSLQRTTPTRRPSAEDVRTPEPPRRPPARAQRPPTPPPAPAVTRASRGATTTNTITATTATTAAPRVREQPPSSRQQRRGAQRGTTAGDGRNSRSGSSRAPGDAARVDRSRDLRDLLFRMGGYASRFRSMGGNNPGRSNQSGSTTGATVPAGRTNAPPGVVRVPTTPQLPRDSGHRRPTPVGQPNPRPRASLRREQAALATERGLLIDLAEAVDNLQDLEEVATQIAAFFKRFGSQPAGVGGRTGGRPTTNARERGRVVNTPVTGPSGRHEGVTPRGTDQVREATRIQRLFRQNRRRAVQEVLMGAPAQCQVPKDQVTEHFRNMYSPASTPPASGPLGFPSEAPTASSDAALVQPFGVSEVDRRLRRMSNSAPGPDGLSYRDLRKADPSCSILTAYFNMIRRLESVPSSWKSSNTVLIHKKGDRMDLSNWRPLAMSDTTPKLFAAVLADRLVSWALQNGRLSPQQKGFLPCEGCYEHNYTLQEILNDARRGKSQVVVAWLDLSNAFGSIPHSTIYHAFAEAQVPLPFRNIVEGLYDGCTTRVRTSQGFTDPVPILSGVKQGCPLSPVAFNLALEPVLRAASGTSVGYTLHGRRYNILAYADDLVLIADTPGGMDTLLNTVEAAAGGVGLRFNPAKCATLHQDSRGSRRAVPTCFSLQGQGLKSLAAGVPYEHLGVPTGFQVKQTPLLSIEELIRDLHAVDRSLLAPWQKCETVGSFILPRLDFLLRGAHVEKGPLKVADKLVRKLAKSWLNLPERASAEVVYLPPSRGGCGLLPLADLADALVIGHAYRLLTAPDPAISGLARDSLREAVARKIGRPPTDLDLATYLSGSLEGEFARTSWDFSTLWSRARNAARRSSNSLQLRWEWCAARQELGIRLRGSRGRTTVVTPVARSQVLHRLRSAVTEYYSHRLDSKPDQGKVFGVSSRTKVSNHFLRGGSFTRFADWRFVHRARLNVLPLNGTRRWGEGDKRCRRCGENLETLPHVMCHCRPHSAAWQLRHDAVVSRIARACRLPGTLRVNQRVEGLTGDLEALRPDIVVRHEPSKSVVIIDVTVTFENGIEAFHAARERKIMKYLPIGAALDEQGYRVVTDAIVVGALGSWDQDNESVLKLLRIGKKYAGLMRRLIVSETIRWGRDIYVEHVSGVRQYAAAPAAVPPVDLTLPPPAVNVASPLALLPRTSESTIAPRAINDSVIDRGHAARTMTQGPSGPV

SEQ ID NO: 251 - protein, 2012 aa, Lasioglossum morio
MAGPTSSPLTIYIEFPFPGEFRCPECYGKPGTRTSGVYKTHNDLVKHAKKCHPGHIVVHRCGVCGEHGTGAFPLRYVKAHHLAAHTDGPRPSRCGRGGAYVIPLTTAAPTTVRSSLSTTSTNFSGRGRPESILRDASGAGPTIVTTTSTTTPTTTTPTTTTTADGLRPAATTPSISGGAHPPSPSGPAAVPTTRTAATSTTSTSTTTTTSTTTRRTASSSLTQQRLPFGPSTAGRGATTGTKQATKTRQTTLTTTTATSRARAVVATSRTSTTPPPSQATLRTRSATAAAPAASLRKSTTPPPPPAPTRTRTSATRTSTTPPPSTATTRTRTATAAASKAPLRKSTTPPPPPPPTRRRTEAGRPSTTPPSSKANPGTKPAAAAAPRAPPRKPTTPPPPPATSRTRTATPPATVATSKLPSPPTTTTRTTATTTTKRGGATRRSDEVVSGSPPSGTRAAPAANRRAGPGAVQRTSPSLPTRKSNPSSPPTMSTSGPARRTRGSTVSPKTRAPPTSPRGPVTRSRGASVPVELESVKRRTAALTTTTTRRKAAPKPGTKRSPRGVGKRDGPCAPTNPSNPTLHPDSSPRLFTSVIRTAASPTYAAVTAGATVVTAAPPGDHTEGRRLRSMSRASSLPPESSTAMPSSPPLTAILRALPTSPCSPPTIHGEEEGARDGCVVPCVAPATLTTTTVTTTVSGGSIMTSRPLAGGERGAKRAWPVPAIPSLPPIEEVTVTPGPARAASSPSPPAIEEREEEGGEEEDDSPLPWQSAASRRRRRRQRALSSSPSSPSFSLPLSRSSMPETSPQDRTTPTRRPSAEDVRTPEPQRRPPARAQRPPTPPPAPAATRASRGATTTTITATTTTTAAPRVRDQPPSSRQQRRGAQRGTTAGDGRSSRPVNSRAPGGAARVDRSRDLRDLLFRMGGYASRFRSMGGNNPGRLNQSGSATGATVPAGRTNAPPGVVRVPATPQLPRDSEHRRPTPVGQPNPRPRASLRREQAALATERGLLIDLAEAVDNPQDLEEVATQIAAFFKRFGSQPAGVGGRTGGRPTTNAGRRGRVVNTPVTGPSERHEGVTPRRTDQVKEATRIQRLFRQNRRRAVQEVLMGAPAQCQVPKDQVLEHFLNMYSPASTPTAAGPLGFPSEAPTAASDAALVEPFGVSEVDRRLRRMSNSAPGPDGLSYRDLRKADPSCGILTAYFNMVQRLESVPSSWKSSNTVLIHKRGDRMDLSNWRPLAMSDTTPKLFAAVLADRLVSWALHNGRLSPQQKGFLPCEGCYEHNYTLQEILNDARRGRSQVVVAWLDLSNAFGSIPHSTIYHAFAEAQVPLPFRNIVEGLYDGCTTRVRTSQGFTDPVPILSGVKQGCPLSPVAFNLALEPVLRAASGTSVGYTLHGRRYNILAYADDLVLIADTPGGMDTLLSTVEAAAGGVGLRFNPAKCATLHQDSRGSRRAVPTCFSLQGQALKSLAAGVPYEHLGVPTGFQVKQTPLLSIEELIRDLHAVDRSLLAPWQKCETVGSFILPRLDFLLRGAHVEKGPLKVADKLVRKLAKSWLNLPERASAEVVYLPPSRGGCGLLPLADLADALVIGHAYRLLTAPDPAISGLARDSLREAVARKIGRPPTDLDLATYLSGSLEGEFARTSWDFSTLWSRARNAARRSSNSLQLRWEWCAERQELGIRLRGSRGRTTVVTPVARSQVLHRLRSAVTEFYSHRLGSKPDQGKVFGVSSRTKVSNHFLRGGSFTRFADWRFIHRARLDVLPLNGARRWGEGDKRCRRCGENMETLPHVLCHCRPHSAAWQLRHDAVVSRIARACRLPGTLRVNQRVEGLTGDLEALRPDIVVRHEPSKSVVIIDVTVTFENGIEAFHAARGRKISKYLPIGAALEEQGYRVVTDAIVVGALGSWDQGNESVLKLLRIGKKYAGLMRRLIVSETIRWGRDIYVEHVSGVRQYAAAPAAVPPVDSTLPPPAVNVASPLALLPRTDENCFAPREYIDSVTDIGHAARTMTQGPSGPV

SEQ ID NO: 252 - protein, 1091 aa, Lasioglossum morio
MGGYASRFRSMGGNNPGSSRPSGSTTGATVPAGRTNAPPGVVRVPTTPQLPRDSGHRRPTPVDQPKPRPRASLRREQAALATERGLLIDLAEAVDNTQDLEEVATQIAAFFKRFGSQPAGVGGRTGGRPTTNARERGRVVNTPVTGPSGRHEGVTPRGTDQVREATRIQRLFRQNRRRAVQEVLMGAPAQCQVPKDQVTEHFRNMYSPASTPPASGPLGFPSEAPTASSDAALVQPFGVSEVDRRLRRMSNSAPGPDGLSYRDLRKADPSCSILTAYFNMIRRLESVPSSWKSSNTVLIHKKGDRMDLSNWRPLAMSDTTPKLFAAVLADRLVSWALHNGRLSPQQKGFLPCEGCYEHNYTLQEILNDARRGRSQVVVAWLDLSNAFGSIPHSTIYHAFAEAQVPLPFRNIVEGLYDGCTTRVRTSQGFTDPVPILSGVKQGCPLSPVAFNLALEPVLRAASGTSVGYTLHGRRYNILAYADDLVLIADTPGGMDTLLNTVEAAAGGVGLRFNPAKCATLHQDSRGSRRAVPTCFSLQGQALKSLAAGVPYEHLGVPTGFQVKQTPLLSIEELIRDLHAVDRSLLAPWQKCETVGSFILPRLDFLLRGAHVEKGPLKVADKLVRKLAKSWLNLPERASAEVVYLPPSRGGCGLLPLADLADALVIGHAYRLLTAPDPAISGLARDSLREAVARKIGRTPTDLDLATYLSGSLEGEFARTSWDFSTLWSRARNAARRSSNSLQLRWEWCAERQELGIRLRGSRGRTTVVTPVARSQVLHRLRSAVTEFYSHRLGSKPDQGKVFGVSSRTKVSNHFLRGGSFTRFADWRFIHRARLDVLPLNGARRWGEGDKRCRRCGENMETLPHVLCHCRPHSAAWQLRHDAVVSRIARACRLPGTLRVNQRVEGLTDDLEALRPDIVVRHEPSKSVVIIDVTVTFENGIEAFHAAREGKIMKYLPIGAVLEEQGYRVVTDAIVVGALGSWDQANEPVLKLLRIGKKYAGLMRRLIVSETIRWGRDIYVEHVSGVRQYTTAPAAVPPADVTLPPSAVNVASPLAPLPRTDENCFAPREISNCDRDIGYIAQTLTQCPSGPL

SEQ ID NO: 253 - protein, 2006 aa, Lasioglossum morio
MAGPSNSPITIYIEFPFPGEFRCPECFGKPGIKLSGVYKTHNDLIKHAKKHHPGHIVIHRCGVCGEHGTGAFPLRYVKAHHLAAHTDGPRPNRCGRGGAYVIPLTTAAPTTVRSSLSTTSTNFSGRGRPESILRDANGAGTTIVTTTSTTMPTTTTPKTTTTADGLRPAATMTSISGGAHPPSPSGPAAAPTTRAAATSTTSTSTTTTTSTTTRRTASSSLTQQRLPFGPSAAGRGATTGTKQATKTRQTTLTTSTATSRARAAVATSRTSTTPPPSQATLRTRSATAAAPAASLRKSTTPPPPPAPTRTRTSVTRTSTTPPPSTATTRTRTAAAAASKAPLRKSTTPPPPPPPTRRRTEAGRPSTTPPPSKATSGTKPAAAAAPGAPPRKSTTPPATSRMRTATPPATVATSKLPSPPTTRTTATTTTKRGGATRRSDEVVSGSTPPGTRAAPAANRRAGPGAVQRTSPSLPTRKSTPSSPPTLSNSGPARRTRGSTVSPKTKAPPTSPRGPVTRSRGASVPVELESVKRRTAALTTTTTRRKAAPKPGTKRSPRGVGKRDGPCAPTNPSNPTLHPDSSPRLFTSVIRTAASPTYAAVTAGATVVTAAPPGDHTEGRRLRSMSRASSLPPESSTAMPSSPPLTAILRALSTSPCSPPTIHGEEEGARDGCVVSCVAPATLTTTTVTTTVSGGSIMTSRPLAGGARGAKRAWPVPAIPSLPPIEEVTVTPGPARAASSPSPPTIEEREEEGGEEEDDSPLPWQSAASRRRRRRQRALSSSPSSPSFSMPLSRSPNPETSLQRTTPTRRPSAEDVRTPEPPRRPPARAQRPPTPPPAPIAPRASRGATTTTTITAITTTAAPRVREQPPSSRQQRRGAQRGTSAGDGRSSRPVSSRAPGDAARVDRSRDLRDLLFRMGGYASRFRSMGGNNPGRSNQGGSTTGAMVPAGRTNAPSGVVRVSTTPQLTRDSEHRRPTPVDQPNPRPRASLRREQAALATERGLLIDLAEAVDNPQDLEEVATQIATFFKRFGSQPAGVGGRTGGRPTTNARERGRVVNTPVTGPSGRHEGVTPRGTDQVREATRIQRLFRQNRRRAVQEVLMGAPAQCQVPKDQVTEHFRNMYSPASTPPASGPLGFPSEAPTASSDAALVQPFGVSEVDRRLRRMSNSAPGPDGLSYRDLRKADPSCSILTAYFNMIRRLESVPSSWKSSNTVLIHKKGDRMDLSNWRPLAMSDTTPKLFAAVLADRLVSWALQNGRLSPQQKGFLPCEGCYEHNYTLQEILNDARRGRSQVVVAWLDLSNAFGSIPHSTIYHAFAEAQVPLPFRNIVEGLYDGCTTRVRTSQGFTDPVPILSGVKQGCPLSPVAFNLALEPVLRAASGTSVGYTLHGRRYNILAYADDLVLIADTPGGMDTLLSTVEAAAGGVGLRFNPAKCATLHQESRGTRRAVPTCFSLQGQGLKSLAAGVPYEHLGVPTGFQVKQTPLLSIEELIRDLHAVDRSLLAPWQKCETVGSFILPRLDFLLRGAHVEKGPLKVADKLVRKLAKSWLNLPERASAEVVYLPPSRGGCGLLPLADLADALVIGHAYRLLTAPDPAISGLARDSLREAVARKIGRPPTDLDLATYLSGSLEGEFARTSWDFSTLWSRARNAARRSSNSLQLRWEWCAERQELGIRLRGSRGRTTVVTPVARSQVLHRLRSAVTEFYSHRLGSKPDQGKVFGVSSRTKVSNHFLRGGSFTRFTDWRFVHRARLDVLPLNGARRWGEGDKRCRRCGENMETLPHVLCHCRPHSAAWQLRHDAVVSRIARACRLPGTLRVNQRVEGLTGDLEALRPDIVVRHEPSKSVVIIDVTVTFENGIEAFHAARDRKISKYLPIGVALEEQGYRVVTDAIVVGALGSWDQANEPVLKLLRIGKKYAGLMRRLIVSETIRWGRDIYVEHVSGVRQYAAAPAAVPPMDSTLPPLAVNVASPLALLPRTSESTIAPRTTTDSATDIEHAARTMTQGPSGPV

SEQ ID NO: 254 - protein, 1998 aa, Lasioglossum morio
MAGPTSSPITIYIEFPFPGDFRCPECFGKPGIKLSGVYKTHNDLVKHAKKHHPGHIVIHRCGVCGEHGTGAFPLRYVKAHHLAAHTDGPRPNRCGRGGAYVIPLTTAAPTTVRSSGSTTSTNSSGRGRPESILRSANGAGPTVVPTIATTTTATTTTTTTTASGLRPPAVTTATSGGAPPPSTSPAAAPTTRAAATSTTTTTSTTATRPTSSSLRQQRLPFGPATAGRGATTGTVTMTRTRQTPPTTATATSRAKAVVATSRTSTTPPPTSATSRAGPRTAAAPTASLRKSTAPPPPPATTRTRTTASRTSTTPPPSTATARTGTATAAASRASVRKSTTPPPPPPPTRRRTTAARTSTTPPPSSATSRAKQAAAAAPRAPLRKSTTPPPPPATSRTRKATTAAKVATRELPSPPTTTATATTTTRRGGVTGKSLETVSGSTPPGSRAAPAANKRAGSGAVQRASPSPPTRRSTPSSPPTQSNSGPARRTRGSTVSPRMKAPPTSPRGPITRSRGASVPVELESAKKRTAALNATRRKTAPTSGSKRSPRGVGKRDGPCAPTNPSNPTLHPDSSPRLFTSVIRTAASPTYAAVTAGATVVTAAPPGDQTEVRRLRSMTRASSLPPESPIATPSSPTLNTILRALSTSPCSPPSTLGEQEGARGCCVVSCVAPATLTTTTVTTTVSGGSIMTSRPLAGGGERGAKRAWLVPAIPSLPPIEEVTVSPGPARTASSPSPPAIEEREEEGGEEDDSPLPWQSAASRRRRRQLRVLSLSPTSPSVSLPPSRSSYPETSPQEARTSPRRPSTEDVRTPEPIRRTPARAQRPHTPPPAPDANRATRGVTTINTITATTTSVAPRVRNQPPPSRQQRRGAQRGTTAGDGRSSRPVSSRAPGDAARVDRSRDLRDLLFRMGGYASRFRSMGGNNPGRSSQGGSTTGATVPAGRTNAPSGVVRVPTTPQLPRDSEHRRPTPVGQPNPRPRASLRREQAALATERGLLIDLAEAVDNPQDLEEVATQIAAFFKRFGSQPAGVGGRTGGRPTTNARERGRVVNTPVTGPSGRHEGVTPRGTDQVREATRIQRLFRQNRRRAVQEVLMGAPAQCQVPKDQVTEHFRNMYSPASTPPASGPLGFPSEAPTASSDAALIQPFGVSEVDRRLRRMSNSAPGPDGLSYRDLRKADPSCSILTALFNMIRRLESVPSSWKSSNTVLIHKKGDRMDLSNWRPLAMSDTTPKLFAAVLADRLVSWALQNGRLSPQQKGFLPCEGCYEHNYTLQEILNDARRGRSQVVVAWLDLSNAFGSIPHSTIYHAFAEAQVPLPFRSIVEGLYDGCTTRVRTSQGFTDPVPILSGVKQGCPLSPVAFNLALEPVLRAASGTSVGYTLHGRRYNILAYADDLVLIADTPGGMETLLNTVEAAAGGVGLRFNPAKCATLHQDSRGSRRAVPTCFSLQGQGLKSLAAGVPYEHLGVPTGFQVKQTPLLSIEELIRDLHAVDRSLLAPWQKCETVGSFILPRLDFLLRGAHVEKGPLKTADKLVRKLAKSWLNLPERASAEVVYLPPSRGGCGLLPLADLADALVIGHAYRLLTAPDPAISGLARDSLREAVARKIGRPPTDLDLATYLSGSLEGEFARTSWDFSTLWSRARNAARRSSESLQLRWEWCAARQELGIRLRGSRGRTTVVTPVARSQVLHRLRSAVTEFYSHRLVSKPDQGKVFGVSSRTRVSNHFLRGGSFTRFADWRFVHRARLNVLPLNGARRWGEGDKRCRRCGENLETLPHVICHCRPHSAAWQLRHDAVVSRIARACRLPGTLRVNQRVEGLTDDLEALRPDIVVRHEPSKSVVIIDVTVTFENGIEAFHAARGRKISKYLPIGAALEEQGYRVVTDAIVVGALGSWDQANEPVLKLLRIGKKYAGLMRRLIVSETIRWGRDIYVEHVSGVRQYAAAPAAVPPVDATFPPPAVTVTPLLAPLPRVIESIAPRTNSDNDIGHAAHTLTQGPSGPI

SEQ ID NO: 255 - protein, 2010 aa, Lasioglossum morio
MAGPSNSPLTIYIEFPFPGDFRCPECFGKPGIKLSGVYKTHNDLVKHAKKHHPGHIVIHRCGVCGEHGTGSFPLRYVKAHHLAAHTDGPRPNRCGRGGAYVIPLTTAAPTTVRSSLSTTSTNFSGRGRPESILRDASGAGTTIVTTTSTTTPTTTTPTTTTTADGLRPAATTSPISGGAHIPPPSGPAAVPTTRTAATSTTSTNTTTTTSTTTRRTASSSLTQQRLPFGPSTAGRGATTGTKQTTKTRQTTLTTTTATSRARAVVATSRTSTTPPPSQATLRTRSATAAAPAASLRKSTTPPPPPAPTRTRTSATRTSTTPPPSTATTRTRTAAAAASKAPLRKSTTPPPPPPPTRRRTEAGRPSTTPPPSKATSGTKPAAAAAPRAPPRKSTTPPPPPATSRTRTATPPATVATSKLPSPPTTRTTATTTTKRGGATRRSDEVVSGSTPPGTRAAPAASRRAGPGAVQRTSPSLPTRKSTPSSPPTLSNSGPARRTRGSTVSPKTKAPPTSPRGPVTRSRGASVPVELESVKRRTAALTTTTTRRKAAPKPGTKRSPRGVGKREEACAPTNPSNPTLHPDSSPRLFTSVIRTAASPTYAAVTAGATVVTAAPPGDHNEGRRLRSMARASSLPPESSAAMPSSPPLTAILRALSASPCSPPTIHGEEEGARDGCVVPCVAPATLTTTTVTTTVSGGSIMTSRPLAGGGERGAKKAWPVPAIPSLPPIEEVTVSPGPARTASSPSPPTIEEREEEGGEEEDDSPLPWQSAASRRRRRRQRALSSSPSSPSLSMPLSRSPNPETSLQRTTPTRRPSAEDVRTPEPPRRPPARAQRPLTPPPAPAVTRASRGATTTNTITATTTTAAPRVRDQPPSSRQQRRGAQRGTTAGDGRSSRPVNSRAPGDAARVDRSRDLRDLLFRMGGYASRFRSMGGNNPGRLNQSGSATGATVPAGRTNAPPGVVRVPTTPQLPRDSEHRRPTPVGQPNPRPRASLRREQAALATERGLLIDLAEAVDNPQDLEEVATQIAAFFKRFGSQPAGVGGRTGGRPTTNAGRRGRVVNTPVTGPSERHEGVTPRRTDQVKEATRIQRLFRQNRRRAAQEVLMGAPAQCQVPKDQVLEHFLNMYSPASAPTAAGPLGFPSEAPTAASDAALVEPFGVSEVDRRLRRMSNSAPGPDGLSYRDLRKADPSCGILTAYFNMVRRLESVPSSWKSSNTVLIHKKGDRMDLSNWRPLAMSDTTPKLFAAVLADRLVSWALHNGRLSPQQKGFLPCEGCYEHNYTLQEILNDARRGKSQVVVAWLDLSNAFGSIPHSTIYHAFAEAQVPLPFRNIVEGLYDGCTTRVRTSQGFTDPVPILSGVKQGCPLSPVAFNLALEPVLRAASGTSVGYTLHGRRYNILAYADDLVLIADTPGGMDTLLSTVEAAAGGVGLRFNPAKCATLHQDSRGSRRAVPTCFSLQGQGLKSLAAGVPYEHLGVPTGFQVKQTPLLSIEELIRDLHAVDRSLLAPWQKCETVGSFILPRLDFLLRGAHVEKGPLKVADKLVRKLAKSWLNLPERASAEVVYLPPSRGGCGLLPLADLADALVIGHAYRLLTAPDPAISGLARDSLREAVARKIGRPPTDLDLATYLSGSLEGEFARTSWDFSTLWSRARNAARRSSNSLQLRWEWCAERQELGIRLRGSRGRTTVVTPVARSQVLHRLRSAVTEFYSHRLGSKPDQGKVFGVSSRTKVSNHFLRGGSFTRFADWRFIHRARLDVLPLNGARRWGEGDKRCRRCGENMETLPHVLCHCRPHSAAWQLRHDAVVSRIARACRLPGTLRVNQRVEGLTGDLEALRPDIVVRHEPSKSVVIIDVTVTFENGIEAFHAARGRKISKYLPIGAALEEQGYRVVTDAIVVGALGSWDQDNESVLKLLRIGKKYAGLMRRLIVSETIRWGRDIYVEHVSGVRQYAAAPAAVPPVDSTLPPPAVNVASPLAPLPRTDENCFAPREYIDSVTDIGHAARTMTQGPSGPV

SEQ ID NO: 256 - protein, 1196 aa, Lasioglossum morio
MPLSRSPNPETSLQRTTPTRRPLAEDVRTPEPQRRPPARAQRPLTPPPAPAAPRASRGATTTTTITAITTTAAPRVRNQPPPSRQQRRGVQRGTTAGDGRSSRPVSSRAPGDAARVDRSRDLRDMLFRLGGYASRFRSMGGNNPGSSRPSGSTTGATVPAGRTNAPPGVVRVPTTPQLPRDSEHRRPTPVGQPNPRPRASLRREQAALATERGLLIDLAEAVDNPQDLEEVATQIAAFFKRFGSQPAGVGGRTGGRPTTNARERGRVVNTPVTGPSGRHEGVTPRGTDQVREATRIQRLFRQNRRRAVQEVLMGAPAQCQVPKDQVTEHFRNMYSPASTPPASGPLGFPSEAPTASSDAALVEPFGVSEVDRRLRRMSNSAPGPDGLSYRDLRKADPSCSILTAYFNMIRRLESVPSSWKSSNTVLIHKKGDRMDLSNWRPLAMSDTTPKLFAAVLADRLVSWALQNGRLSPQQKGFLPCEGCYEHNYTLQEILNDARRGKSQVVVAWLDLSNAFGSIPHSTIYHAFAEAQVPLPFRNIVEGLYDGCTTRVRTSQGFTDPVPILSGVKQGCPLSPVAFNLALEPVLRAASGTSVGCTLHGRRYNILAYADDLVLIADTPGGMDTLLNTVEAAAGGVGLRFNPAKCATLHQDSRGSRRAVPTCFSLQGQGLKSLAAGVPYEHLGVPTGFQVKQTPLLSIEELIRDLHAVDRSLLAPWQKCETVGSFILPRLDFLLRGAHVEKGPLKLADKLVRKLAKSWLNLPERASAEVVYLPPSRGGCGLLPLADLADALVIGHAYRLLTAPDPAISGLARDSLREAVARKIGRPPTDLDLATYLSGSLEGEFARTSWDFSTLWSRARNAARRSSNSLQLRWEWCAERQELGIRLRGSRGRTTVVTPVARSQVLHRLRSAVTEFYSHRLGSKPDQGKVFGVSSRTKVSNHFLRGGSFTRFADWRFIHRARLDVLPLNGARHWGEGDKRCRRCGENMETLPHVLCHCRPHSAAWQLRHDAVVSRIARACRLPGTLRVNQRVEGLTGDLEALRPDIVVRHEPSKSVVIIDVTVTFENGIEAFHAARGRKISKYLPIGAALEEQGYRVVTDAIVVGALGSWDQANESVLKLLRIGKKYAGLMRRLIVSETIRWGRDIYVEHVSGVRQYAAAPAAVSPVDATVPPPAVNVASPLAPLPRTYESNSAPRN

SEQ ID NO: 257 - protein, 2000 aa, Lasioglossum morio
MAGPTSSPITIYIEFPFPGDFRCPECFGKPGIKLSGVYKTHNDLVKHAKKHHPGHIVIHRCGVCGEHGTGAFPLRYVKAHHLAAHTDGPRPNRCGRGGAYVIPLTTAAPTTVRSSGSTTSTNSSGRGRPESILRSANGAGPTVVPTIATTTTATTTTTTTTASGLRPPAVTTATSGGAPPPSTSPAAAPTTRAAATSTTTTTSTTATRPTSSSLRQQRLPFGPATAGRGATTGTVTMTRTRQTPPTTATATSRAKAVVATSRTSTTPPPTSATSRAGPRTAAAPTASLRKSTTPPPPPATTRTRTTASRTSTTPPPSTATARTGTATAAASRASVRKSTTPPPPPPPTRRRTTAARTSTTPPPSSATSRAKQAAAAAPRAPLRKSTTPPPPPATSRTRKATTAAKVATRELPSPPTTTATATTTTRRGGVTGKSLETVSGSTPPGSRAAPAANKRAGSGAVQRASPSPPTRRSTPSSPPTQSNSGPARRTRGSTVSPRTKAPPTSPRGPITRSRGASVPVELESAKKRTAALNATRRKTAPTSGSKRSPRGVGKRDGPCAPTNPSNPTLHPDSSPRLFTSVIRTAASPTYAAVTAGATVVTAAPPGDQTEVRRLRSMTRASSLPPESPIATPSSPTLNTILRALSTSPCSPPSTLGEQEGARGCCVVSCVAPATLTTTTVTTTVSGGSIMTSRPLAGGGERGAKRAWLVPAIPSLPPIEEVTVSPGPARTASSPSPPAIEEREEEGGEEDDSPLPWQSAASRRRRRQLRVLSLSPTSPSVSLPPSRSSYPETSPQEARTSPRRPSTEDVRTPEPIRRTPARAQRPHTPPPAPDANRATRGVTTINTITATTTSVAPRVRNQPPPSRQQRRGAQRGTTAGDGRSSRPVSSRAPGDAARVDRSRDLRDLLFRMGGYASRFRSMGGNNPGRSSQGGSTTGATVPAGRTNAPSGVVRVPTTPQLPRDSEHRRPTPVGQPNPRPRASLRREQAALATERGLLIDLAEAVDNPQDLEEVATQIAAFFKRFGSQPAGVGGRTGGRPTTNARERGRVVNTPVTGPSGRHEGVTPRGTDQVREATRIQRLFRQNRRRAVQEVLMGAPAQCQVPKDQVTEHFRNMYSPASTPPASGPLGFPSEAPTASSDAALIQPFGVSEVDRRLRRMSNSAPGPDGLSYRDLRKADPSCSILTALFNMIRRLESVPSSWKSSNTVLIHKKGDRMDLSNWRPLAMSDTTPKLFAAVLADRLVSWALQNGRLSPQQKGFLPCEGCYEHNYTLQEILNDARRGRSQVVVAWLDLSNAFGSIPHSTIYHAFAEAQVPLPFRSIVEGLYDGCTTRVRTSQGFTDPVPILSGVKQGCPLSPVAFNLALEPVLRAASGTSVGYTLHGRRYNILAYADDLVLIADTPGGMETLLNTVEAAAGGVGLRFNPAKCATLHQDSRGSRRAVPTCFSLQGQGLKSLAAGVPYEHLGVPTGFQVKQTPLLSIEELIRDLHAVDRSLLAPWQKCETVGSFILPRLDFLLRGAHVEKGPLKTADKLVRKLAKSWLNLPERASAEVVYLPPSRGGCGLLPLADLADALVIGHAYRLLTAPDPAISGLARDSLREAVARKIGRPPTDLDLATYLSGSLEGEFARTSWDFSTLWSRARNAARRSSESLQLRWEWCAARQELGIRLRGSRGRTTVVTPVARSQVLHRLRSAVTEFYSHRLVSKPDQGKVFGVSSRTRVSNHFLRGGSFTRFADWRFVHRARLNVLPLNGARRWGEGDKRCRRCGENLETLPHVICHCRPHSAAWQLRHDAVVSRIARACRLPGTLRVNQRVEGLTDDLEALRPDIVVRHEPSKSVVIIDVTVTFENGIEAFHAARERKISKYLPIGAALEEQGYRVVTDAIVVGALGSWDRANEPVLKLLRIGKKYAGLMRRLVVSETIRWGRDIYVEHVSGVRQYAAAPAAVPPADLALPPPAVMVTPPLAPPPRTDVNCFAPRNNTCDAPTGHEALILTQGSSSPA

SEQ ID NO: 258 - protein, 2009 aa, Lasioglossum morio
MAGPSNSPLTIYIEFPFPGDFRCPECFGKPGIKLSGVYKTHNDLVKHAKKHHPGHIVIHRCGVCGEHGTGSFPLRYVKAHHLAAHTDGPRPNRCGRGGAYVIPLTTAAPTTVRSSLSTTSTNFSGRGRPESILRDASGAGTTIVTTTSTTTPTTTTPTTTTTADGLRPAATTSPISGGAHIPPPSGPAAVPTTRTAATSTTSTNTTTTTSTTTRRTASSSLTQQRLPFGPSTAGRGATTGTKQTTKTRQTTLTTTTATSRARAVVATSRTSTTPPPSQATLRTRSATAAAPAASLRKSTTPPPPPAPTRTRTSATRTSTTPPPSTATTRTRTAAAAASKAPLRKSTTPPPPPPPTRRRTEAGRPSTTPPPSKATSGTKPAAAAAPRAPPRKSTTPPPPPATSRTRTATPPATVATSKLPSPPTTRTTATTTTKRGGATRRSDEVVSGSTPPGTRAAPAASRRAGPGAVQRTSPSLPTRKSTPSSPPTLSNSGPARRTRGSTVSPKTKAPPTSPRGPVTRSRGASVPVELESVKRRTAALTTTTTRRKAAPKPGTKRSPRGVGKREEACAPTNPSNPTLHPDSSPRLFTSVIRTAASPTYAAVTAGATVVTAAPPGDHNEGRRLRSMARASSLPPESSAAMPSSPPLTAILRALSASPCSPPTIHGEEEGARDGCVVPCVAPATLTTTTVTTTVSGGSIMTSRPLAGGGERGAKKAWPVPAIPSLPPIEEVTVSPGPARTASSPSPPTIEEREEEGGEEEDDSPLPWQSAASRRRRRRQRALSSSPSSPSLSMPLSRSPNPETSLQRTTPTRRPSAEDVRTPEPPRRPPARAQRPLTPPPAPAVTRASRGATTTNTITATTTTAAPRVRDQPPSSRQQRRGAQRGTTAGDGRSSRPVNSRAPGDAARVDRSRDLRDLLFRMGGYASRFRSMGGNNPGRLNQSGSATGATVPAGRTNAPPGVVRVPTTPQLPRDSEHRRPTPVGQPNPRPRASLRREQAALATERGLLIDLAEAVDNPQDLEEVATQIAAFFKRFGSQPAGVGGRTGGRPTTNAGRRGRVVNTPVTGPSERHEGVTPRRTDQVKEATRIQRLFRQNRRRAAQEVLMGAPAQCQVPKDQVLEHFLNMYSPASTPTAAGPLGFPSEAPTAASDAALVEPFGVSEVDRRLRRMSNSAPGPDGLSYRDLRKADPSCGILTAYFNMVRRLESVPSSWKSSNTVLIHKKGDRMDLSNWRPLAMSDTTPKLFAAVLADRLVSWALHNGRLSPQQKGFLPCEGCYEHNYTLQEILNDARRGKSQVVVAWLDLSNAFGSIPHSTIYHAFAEAQVPLPFRNIVEGLYDGCTTRVRTSQGFTDPVPILSGVKQGCPLSPVAFNLALEPVLRAASGTSVGYTLHGRRYNILAYADDLVLIADTPGGMDTLLSTVEAAAGGVGLRFNPAKCATLHQDSRGSRRAVPTCFSLQGQGLKSLAAGVPYEHLGVPTGFQVKQTPLLSIEELIRDLHAVDRSLLAPWQKCETVGSFILPRLDFLLRGAHVEKGPLKVADKLVRKLAKSWLNLPERASAEVVYLPPSRGGCGLLPLADLADALVIGHAYRLLTAPDPAISGLARDSLREAVARKIGRPPTDLDLATYLSGSLEGEFARTSWDFSTLWSRARNAARRSSNSLQLRWEWCAERQELGIRLRGSRGRTTVVTPVARSQVLHRLRSAVTEFYSHRLGSKPDQGKVFGVSSRTKVSNDFLRGGSFTRFADWRFIHRARLDVLPLNGARRWGEGDKRCRRCGENMETLPHVLCHCRPHSAAWQLRHDAVVSRIARACRLPGTLRVNQRVEGLTGDLEALRPDIVVRHEPSKSVVIIDVTVTFENGIEAFHAARGRKISKYLPIGAALEEQGYRVVTDAIVVGALGSWDQDNESVLKLLRIGKKYAGLMRRLVVSETIRWGRDIYVEHVSGVRQYAAAPAAVPPVDSTLPPLAVNVASPLALLPRSCENNIAPRNHIVDEAIGHEARTSTQGPSGPV

SEQ ID NO: 259 - protein, 1310 aa, Lasioglossum morio
MTSRPLAGGGERGAKRAWPVPAIPSLPPIEEVTVSPGPARTASSPSPPAIEEREEEGGEEDDSPLPWQSAASRRRRRQLRVLSLSPTSPSVSLPPSRSSYPETSPQEARTSPRRPSTEDVRTPEPTRRTPARAQRPHTPPPAPDANQATRGVTTTIITANTTTAAPRVRDQRPSSRQQRRGAQRGATAGDGRSSRPVSGRAPGDAARVDRSRDLRELLFRMGGYASRFRSMGGNNPGSSRPSGSTTGATVPAGRTNAPPGVVRVPTTPQLPRDSEHRRPTPVGQPNPRPRASLRREQAALATERGLLIDLAEAVDNPQDLEEVATQIATFFKRFGSQPAGVGGRTGGRPTTNARERGRVVNTPVTGPSGRHEGVTPRGTDQVRDSTRIQRLFRQNRRRAVQEVLMGAPAQCQVPKDQVTEHFRNMYSPASTPPASGPLGFPSEAPTASSDAALVQPFGVSEVDRRLRRMSNSAPGPDGLSYRDLRKADPSCSILTALFNMIRRLESVPSSWKSSNTVLIHKKGDRMDLSNWRPLAMSDTTPKLFAAVLADRLVSWALQNGRLSPQQKGFLPCEGCYEHNYTLQEILNDARRGKSQVVVAWLDLSNAFGSIPHSTIYHAFAEAQVPLPFRNIVEGLYDGCTTRVRTSQGFTDPVPILSGVKQGCPLSPVAFNLALEPVLRAASGTSVGCTLHGRRYNILAYADDLVLIADTPGGMETLLNTVEAAAGGVGLRFNPAKCATLHQDSRGSRRAVPTCFSLQGQGLKSLAAGVPYEHLGVPTGFQVKQTPLLSIEELIRDLHAVDRSLLAPWQKCETVGSFILPRLDFLLRGAHVEKGPLKVADKLVRKLAKSWLNLPERASAEVVYLPPSRGGCGLLPLADLADALVIGHAFRLLTTPDPAISGLARDSLREAVARKIGRPPTDLDLATYLSGSLEGEFARTSWDFSTLWSRARNAARRSSNSLQLRWEWCAERQELGIRLRGSRGRTTVVTPVARSQVLHRLRSAVTEFYSHRLGSKPDQGKVFGVSSRTKVSNHFLRGGSFTRFADWRFIHRARLDVLPLNGARRWGEGDKRCRRCGENMETLPHVLCHCRPHSAAWQLRHDAVVSRIARACRLPGTLRVNQRVEGLTGDLEALRPDIVVRHEPSKSVVIIDVTVTFENGIEAFHAARERKISKYLPIGAVLEEQGYRVVTDAIVVGALGSWDQANESVLKLLRIGKKYAGLMRRLIVSETIRWGRDIYVEHVSGVRQYAAAPAAVSPVDATVPPPAVNVASLLAPLPRTYESNSAPRNITCDVDIGHEARTLTQGPPGPI

SEQ ID NO: 260 - protein, 2002 aa, Lasioglossum morio
MAGPSNSPITIYIEFPFPGEFRCPECFGKPGIKLSGVYKTHNDLVKHAKKHHPGHIVIHRCGVCGEHGTGAFPLRYVKAHHTAAHTDRPRPNRCGRGGAYVIPLTTAAPTTVRSSLSTTSTNFSGRGRPESILRDANGAGTTIVTTTSTTTPTTTTPTTTTTADGLRPAATTVTSGGAPPPPTSPAAVPTTRTAATSTISTTTTTTTSTTTRRTASSSLRQQKLSFGPAAAGRGVTTETNTATETRQTLPPTSTATSRARAVVATSRTSTTPPPPRVMTRTRSATALASAASLRKSTTPPPPPAPTRKRTTATRTSNTPPTSTATTRAAAASKAPLRKSTTPPPPPPPTRRRNEVGRPSTTPPPSTAASRPAAAAASGAPLRKSTTPPPPPAPTTRTRTATTTATVATTKKLPSPSTTSTKTTTTTTTTKRGGATDKRLESVSGSTPPGTRAAPAANRRAGPGAVQRTSPSLPTRKSTPSSPPTLSNSGPARRTRGSTVSPKTKAPPTSPRGPVTRSRGASVPVELESVKRRTAALTTTTTRRKAAPKPGTKRSPRGVGKREEACAPTNPSNPTLHPDSSPRLFTSVIRTAASPTYAAVTAGATVVSATPPGDQGALRRQRSMTPIPPESPAATPSSLALTTILRALSTSPCSPPTTFGEQAGARGCCVVSCVAVATLTTTTVTTTVSGGSIMTSRPLAGGERGAKRTWPVPAIPSLPPIEEVTVTPGPARAASSPSPPAIEEREEEGGEEDDDSPLPWQSAASRRRRRRQRALSSSPSSPSFSMPLSRSPNPETSLQRTTPTRRPSAEDVRTPEPPRRPPARAQRPLTPPPAPAVTRASRGATTTNTITATTTTAAPRVRDQPPSSRQQRRGAQRGTTAGDGRSSRPVSSRAPGDAARVDRSRDLRDLLFRMGGYASRFRSMGGNNPGRLNQSGSATGATVPAGRTNAPPGVVRVPTTPQLPRDSGHRRPTPVDQPNPRPRASLRREQAALATERGLLIDLAEAVDNSQDLEEVATQIAAFFKRFGSQPAGVGGRTGGRPTTNARERGRVVNTPVTGPSERHEGVTPRRTDQVKEATRIQRLFRQNRRRAVQEVLMGAPAQCQVPKDQVLEHFRNMYSPASTPTAAGPLGFPSEAPTAASDAALVEPFGVSEVDRRLRRMSNSAPGPDGLSYRDLRKADPSCGILTAYFNMVRRLESVPSSWKSSNTVLIHKKGDRMDLSNWRPLAMSDTTPKLFAAVLADRLVSWALHNGRLSPQQKGFLPCEGCYEHNYTLQEILNDARRGRSQVVVAWLDLSNAFGSIPHSTIYHAFAEAQVPLPFRSIVEGLYDGCTTRVRTSQGFTDPVPILSGVKQGCPLSPVAFNLALEPVLRAASGTSVGYTLHGRRYNILAYADDLVLIADTPGGMETLLNTVEAAAGGVGLRFNPAKCATLHQDSRGSRRAVPTCFSLQGQGLKSLAAGVPYEHLGVPTGFQVKQTPLLSIEELIRDLHAVDRSLLAPWQKCETVGSFILPRLDFLLRGAHVEKGPLKTADKLVRKLAKSWLNLPERASAEVVYLPPSRGGCGLLPLADLADALVIGHAYRLLTAPDPAISGLARDSLREAVARKIGRPPTDLDLATYLSGSLEGEFARTSWDFSTLWSRARNAARRSSESLQLRWEWCAARQEMGLRLRGSRGRTTVVTPVARSQVLHRLRSAVTEFYSQRLVSKPDQGKVFGVSSRTKVSNHFLRGGSFTRFADWRFVHRARLNVLPLNGARRWGEGDKRCRRCGENLETLPHVICHCRPHSAAWQLRHDAVVSRIARACRLPGTLRVNQRVEGLTDDLEALRPDIVVRHEPSKSVVIIDVTVTFENGIEAFHAARERKIMKYLPIGAVLEEQGYRVVTDAIVVGALGSWDQANEPVLKLLRIGKKYAGLMRRLIVSETIRWGRDIYVEHVSGVRQYAAAPAAVPPVDSTLPPPAVIVASPFALLPRSGESNIASRNNNCDIAIGHEAHTLTQGSSGPV

SEQ ID NO: 261 - protein, 1977 aa, Lasioglossum morio
MAGPSTSPLTIYIEFPFPGEFRCPECFGKPGIKLSGVYKTHNDLVKHAKKHHPGHIVIHRCGVCGEHGTGAFPLRYVKAHHTAAHTDRPRPNRCGRGGAYVIPLTTAAPTIVRSSLSTTSTNFSGRGRPESILRDASGAGPTIVTTTSTTTPTTTTPTTTTTADGLRPAATTVTSGGAPPPPTSPAAVPTTRTAATSTSTTTTTTTSTTTRRTASSSLRQQKLSFGPAAAGRGVTTGTKTVTKTRQTPPTTSTATSGTRAVVATSRSSTTPPPPRAMTRTRSATALAATASLRKSTTPPPPPAPSRTRASVTRTSTTPPPSTATMRTRTAAAAASKAPLRKSTTPPPPPPPTRRRTEAGRPSTTPPTSKATSGTKPAAAAAPRAPPRKSTTPPATSRTRTATSTAKVATAKKLPSPPPTSTRTATTTTTKRGGVTNRSLESVPGSPPPGTRAAPAANRRAGSGAAQRASTSPPTRKSTSSPPPTLSNSGPARRTRGSTVSPRTKAPPTSPRGPITRSRGASVPVELEDVKRRTAALTTTRRKAAPRSGTKRSPRGVGKRDGPCAPTNPSNPTLHPDSSPRSFTSVIRTAASPTYAAVTAGATVVTAAPPGDQTTLNTILRALSTSPCSPPTTFGEQEGVRGCSVVSCVAPATLTTTTVTTTVSGGSIMTSRPLAGGERGAKRAWPVPAIPSLPPIEEVTVSPGPARAVSNPSPPTIEEREEEGGEEEDDSPLPWMSAASRRRRRRQRALSSSPTSPSVSLPLSRSPNPETSLQRTTPTRRPSAEDVRTPEPPRRPPARAQRPLTPPPAPAAPRALRGATTITITATTTTTAAPRVRNQPPPSRQQRRGAQRGTTAGDGRNSRSGSSRAPGDAARVDRSRDLRDLLFRMGGYASRFRSMGGNNPGRSNQGGSTTGATVPAGRTNAPSGVVRVPTTPQLTRDSEHRRPTPVDQPNPRPRASLRREQAALATERGLLIDLAEAVDNLQDLEEVATQIAAFFKRFGSQPAGVGGRTGGRPTTNARERGRVVNTPVTGPSGRHEGATPRGTDQVREATRIQRLFRQNRRRAVQEVLMGAPAQCQVPKDQVTEHFRNMYSPASTPPASGPLGFPSEAPTASSDAALVQPFGVSEVDRRLRRMSNSAPGPDGLSYRDLRKADPSCSILTALFNMIRRLESVPSSWKSSNTVLIHKKGDRMDLSNWRPLAMSDTTPKLFAAVLADRLVSWALQNGRLSPQQKGFLPCEGCYEHNYTLQEILNDARRGRSQVVVAWLDLSNAFGSIPHSTIYHAFAEAQVPLPFRNIVEGLYDGCTTRVRTSQGFTDPVPILSGVKQGCPLSPVAFNLALEPVLRAASGTSVGYTLHGRRYNILAYADDLVLIADTPGGMDTLLNTVEAAAGGVGLRFNPAKCATLHQDSRGSRRAVPTCFSLQGQGLKSLAAGVPYEHLGVPTGFQVKQTPLLSIEELIRDLHAVDRSLLAPWQKCETVGSFILPRLDFLLRGAHVEKGPLKTADKLVRKLAKSWLNLPERASAEVVYLPPSRGGCGLLPLADLADALVIGHAFRLLTTPDPAISGLARDSLREAVARKIGRTPTDQDLATYLSGSLEGEFARTSWDFSTLWSRARNAARRSSESLQLRWEWCAARQELGIRLRGSRGRTTVVTPVARSQVLHRLRSAVTEYYSHRLDSKPDQGKVFGVSSRTKVSNHFLRGGSFTRFADWRFVHRARLNVLPLNGARRWGEGDKRCRRCGENLETLPHVICHCRPHSAAWQLRHDAVVSRIARACRLPGTLRVNQRVEGLTDDLEALRPDIVVRHEPSKSVVIIDVTVTFENGIEAFHAARERKISKYLPIGAALEEQGYRVVTDAIVVGALGSWDRANEPVLKLLRIGKKYAGLMRRLVVSETIRWGRDIYVEHVSGVRQYAAAPAAVPPADLALPPPAVMVTPPLAPPPRTDVNCFAPRNNTCDAPTGHEALILTQGSSSPA

SEQ ID NO: 262 - protein, 1977 aa, Lasioglossum morio
MAGPTSSPLTIYIEFPFPGEFRCPECYGKPGTRTSGVYKTHNDLVKHAKKHHPGHIVIHRCGVCGEHGTGAFPLRYVKAHHTAAHTDRPRQNRCGRGGAYVIPPTTAAPTTVRSSLSTTSTNFSGRGRPESILRDASGAGPTIVTTTSTTTPTTTPTTTTTADGLRPAATTVTSGGAHPPSPSGPAAAPTTRAAATSTSTTTTTTTSTTTRRTASSSLRQQKLSFGPAAAGRGVTTGTKTVTKTRQTPPTTSTATSGTRAVVATSRSSTTPPPPRATTRTRSATALAATASLRKSTTPPPPPAPSRTRTSVTRTSTTPPPSTATMRTRTAAAAASKAPLRKSTTPPPPPPPTRRRTEAGRPSTTPPTSKATSGTKPAAAAAPRAPPRKSTTPPATSRTRTATSTAKVATAKKLPSPPPTSTRTATTTTTKRGGVTNRSLESVPGSPPPGTRAAPAANRRAGSGAAQRASTSPPTRKSTSSPPPTLSNSGPARRTRGSTVSPRTKAPPTSPRGPITRSRGASVPVELEDVKRRTAALTTTRRKAAPRSGTKRSPRGVGKRDGPCAPTNPSNPTLHPDSSPRSFTSVIRTAASPTYAAVTAGATVVTAAPPGDQTTLNTILRALSTSPCSPPTTFGEQEGVRGCSVVSCVAPATLTTTTVTTTVSGGSIMTSRPLAGGERGAKRAWPVPAIPSLPPIEEVTVSPGPARAVSNPSPPTIEEREEEGGEEEDDSPLPWMSAASRRRRRRQRALSSSPTSPSVSLPLSRSPNPETSLQRTTPTRRPSAEDVRTPEPPRRPPARAQRPLTPPPAPAAPRALRGATTITTTATTTTTAAPRVRNQPPPSRQQRRGAQRGTTAGDGRNSRSGSSRAPGDAARVDRSRDLRDLLFRMGGYASRFRSMGGNNPGRSNQGGSTTGATVPAGRTNAPSGVVRVPTTPQLTRDSEHRRPTPVDQPNPRPRASLRREQAALATERGLLIDLAEAVDNLQDLEEVATQIAAFFKRFGSQPAGVGGRTGGRPTTNARERGRVVNTPVTGPSGRHEGATPRGTDQVREATRIQRLFRQNRRRAVQEVLMGAPAQCQVPKDQVTEHFRNMYSPASTPPASGPLGFPSEAPTASSDAALVQPFGVSEVDRRLRRMSNSAPGPDGLSYRDLRKADPSCSILTAYFNMIRRLESVPSSWKSSNTVLIHKKGDRMDLSNWRPLAMSDTTPKLFAAVLADRLVSWALQNGRLSPQQKGFLPCEGCYEHNYTLQEILNDARRGKSQVVVAWLDLSNAFGSIPHSTIYHAFAEAQVPLPFRNIVEGLYDGCTTRVRTSQGFTDPVPILSGVKQGCPLSPVAFNLALEPVLRAASGTSVGYTLHGRRYNILAYADDLVLIADTPGGMDTLLNTVEAAAGGVGLRFNPAKCATLHQDSRGSRRAVPTCFSLQGQGLKSLAAGVPYEHLGVPTGFQVKQTPLLSIEELIRDLHAVDRSLLAPWQKCETVGSFILPRLDFLLRGAHVEKGPLKVADKLVRKLAKSWLNLPERASAEVVYLPPSRGGCGLLPLADLADALVIGHAYRLLTAPDPAISGLAGDSLREAVARKIGRPPTDLDLATYLSGSLEGEFARTSWDFSTLWSRARNAARRSSNSLQLRWEWCAERQELGIRLRGSRGRTTVVTPVARSQVLHRLRSAVTEFYSHRLGSKPDQGKVFGVSSRTKVSNHFLRGGSFTRFADWRFIHRARLDVLPLNGARRWGEGDKRCRRCGENMETLPHVLCHCRPHSAAWQLRHDAVVSRIARACRLPGTLRVNQRVEGLTGDLEALRPDIVVRHEPSKSVVIIDVTVTFENGIEAFHAARGRKISKYLPIGAALEEQGYRVVTDAIVVGALGSWDQDNESVLKLLRIGKKYAGLMRRLVVSETIRWGRDIYVEHVSGVRQYAAAPAAVPPVDSTLPPLAVNVASPLALLPRSCENNIAPRNHIVDEAIGHEARTSTQGPSGPV

SEQ ID NO: 263 - protein, 1902 aa, Lasioglossum morio
MAGPTNSPITIYIEFPFPGEFRCPECFGKPGIKLSGVYKTHNDLIKHAKKHHPGHIVIHRCGVCGEHATGAFPLRYVKAHHLAAHTDGPRPNRCGRGGAYVIPLTTVAPTTVRSSLSTTSTNFSGRGRPESILRDANGAGPTIVTTTSTTTPTTTTPTTTTTADGLRPAATTVTCGGAPPPPTSPAAVPTTRTAVTSTRSTTTTTTSTTTRRTASSSLRQQKLSFGPAAAGRGVTTETNTATETRQTLPPTSTATSRARAVVATSRTSTTPPPPRVMTRTRSATALASAASLRKSTTPPPPPAPTRKRTTATRTSNTPPTSTATTRAAAASKAPLRKSTTPPPPPAPTRRRNEVGRPSTTPPPSTAASRPAAAAASGAPLRKSTTPPPHPAQTTRTRTATTTATVATTKKLPSPSTTSTKTTTTTTTKRGGATDKRLESVSGSTPPGSRAAPAANRRAGSGAAQRASTSPPTRKSTPSSPPTLSNSGLARRTRGSTVSPRTKAPPTSPRGPITRSRGASVPVELESVKKRTAALTTTRRKAAPTPGTKRSPRGVGKRDGPCAPTNPSNPTLHPHRSPRLFTSVIRTAASPTYAAVTAGATLVSAAPPGDQGAIRRQRSMTPTSPESPAATPSSLALTTILRALSTSPCFPPTAFGEQAGARGCCVVSCVAPATLTTTTVTTTVSGGSIMTSRPLAGGGERGAKKAWPVPAIPSLPPIEEVTVTPGPARTASSPSPPAIEEREEEGGEEEDDSPLPWQSAASRRRRRRQRALSSSPSSPSLSMPLSRSPNPETSLQRTTPTRRPSAEDVRTPEPPRRPPARAQRPPTPPPAPAAPRSSRGAPTTTITATNTTTAAPRTRVQPPSSRQQRRGAQRGTTAGDGRSSRPVSSRAPGDSARVDRSRDLRDLLFRMGGYASRFRSMGGNNPGRSNQGGSMTGATVPAGRTNAPPGVVRVPTTPQLPRDSEHRRPTPVGQPNPRPRASLRREQAALATERGLLIDLAEAVDNSQDLEEVATQIAAFFKRFGSQSAGVGGRTGGRPTTNARERGRVVNTPVTGPSGRHEGVTPRGTDQVREATRIQRLFRQNRRRAVQEVLMGAPAQCQVPKDQVTEHLRNMYSPASTPPASGPLGFPSEAPTASSDAALVEPFGVSEVDRRLMRMSNSAPGPDGLSYRDLRKADPSCSILTAYFNMIRRLESVPSSWKSSNTLLIHKKGDRMDLSNWRPLAMSDTTPKLFAAVLADRLVSWALHNGRLSPQQKGFLPCEGCYEHNYTLQEILNDARRGRSQVVVAWLDLSNAFGSIPHSTIYHAFAEAQVLLPFRNIVEGLYDGCTTRVRTSQGFTDPVPILSGVKQGCPLSPVAFNLALEPVLRAASGTSVGCTLHGRRYNILAYADDLVLIADTPGGMDTLLNTVEAAAGGVGLRFNPAKCATLHQDSRGSRRAVPTCFSLQGQALKSLAAGVPYEHLGVPTGFQVKQTPLLSIEELIRDLHAVDRSLLAPWQKCETVGSFILPRLDFLLRGAHVEKGPLKVADKLVRKLAKSWLNLPERASAEVVYLPPSRGGCGLLPLADLADALVIGHAYRLLTAPDTAISGLARDSLREAVARKIGRPPTDLDLATYLSGSLEGEFARTSWDFSTLWSRARNAARRSSNSLQLRWEWCAERQELGIRLRGSRGRTTVVTPVARSQVLHRLRSAVTEFYSHRLGSKPDQGKVFGVSSRTKVSNHFLRGGSFTRFADWRFVHRARLDVLPLNGARRWGEGDKRCRRCGENMETLPHVLCHCRPHSAAWQLRHDAVVSRIARACRLPGTLRVNQRVEGLTDDLESLRPDIVVRHEPSKSVVIIDVTVTFENGIEAFHASRGRKISKYLPIGAALEEQGYRVVTDTIVVGPSARGIGPMSLCSSSCE

SEQ ID NO: 264 - protein, 1661 aa, Tenthredo notha
MSNSNDNNNNNANTDILIEFPFPEEFRCPFCYEQNHGRKTGGVFKGHGELVKHAKKYHPASRVIKKCAACCFVGEGVYALKLVKQHHAKQHPPVDPAPRAPRTTTTARASGANVTSCDRSSITVSNLTDTSSRGRLDNFILNRLPGPGRGTASISTGLPPATRSRRTAATTAAAATPSPRAAARCGDITILSPAAETTTSTPTTSQVSTPTPTPEVPRPDMATPTTTGSSPSSPRETLPSFYAGPTTRSRRASSVPVGDRPAAHRNTISRRVAVPRPAAATVRKIAPASTKGRSPVTTPSPTVTGSTRRPSAATTLRPIPPGPKRTSSSPTYAAVTAAGTSRSTQAARGPTTTRPGLRSATRAASLPPEAAETRRSPATRESRGPRVLPTIPEDLWTPVSGLSCPLTLPETPTTTTITTTTSGRPIMSSRLYRAGPEETRAATPPPAAPTLLPVAIVGVAGPSRATPGAETPTTPWQAATRRARRPHQSGPRSSGGSSSEEEPPSPPRAPPRTRLSPTTAQARRSKESNSNNTPNSSRHGLGAGPRESAGSDNNTFNIRQDSTYNRFNLLATNNTIAFSTGTPGTCSAREPGHGEVDVTVRVGFLNQSRGVGSRGGRGTRRGASGSGGGGGASASSGRATRPASSHGSTAVSRHPPAPERRPPTAVNQALRGRQNARPRAEEELPTTRDSLIDMAEAAVTIEDLEETATRVAAFFQSSGEAVGVLRSRVNGDRGGRGGGRRGGERGRGSGYRRDRQQSQHQRQQQPRPALPGRGDRVEEATRIQKLFRANRRRAVQEVLLGPSQHCQVPRERIQAHFEDMYAPSAPLGAQPPPPPYGPPDDASNDALTRPFAVSEVDQRLRRTSNSAPGPDGLTYDDLRRADPECRLLAALFNTCLRLERVPSGWKESNTVLVHKKGDRDDLSNWRPLALGDTTPKLFAALLADRLLTWSIRNKRLSNSQKGFLPCEGCYEHNFVLQEVLNDARRGGRQVVVAWLDLTNAFGSIPHAAIYRALEEAGAPSALQNIVESMYENCTTRVRTADGLTEPIKIQSGVKQGCPMSPVAFNLALEPVLRAVGDSPAGYTLHGHRHQILAYADDLALISDSTEGMGDLLRKVEAAAGGIGLRFNPAKCATLHQDCRGARRVLPTRFTLQGEEMRTLAAGEPYQHLGVPTGFQVRQTPLLTIDDLLRDLRAVDGSLLTPWQRAETVATFLVPRLEFLLRGALVEKGPLKEADKLIRKTVKSWLHLPQRASAELVYLPPSRGGCGLLPLADMADALSIAHAYRLLTVDDPVVRALAWASLRHAVAKKIGRAPSNEDLATYLSGSLEGEFARDGGDISSLWTRARNATRRSKDKIAAKWRWSEIREELVVTMRGSSERETTVSPESRGQVIRRLRAAVTEYYSTRLKRKPDQGKVFQVSARSNVSNHFLRGGSFTRFADWRFIHRARLDVLPLNGARRWGDGDKRCRRCGEPLESLPHVLCHCRPHSAAWQLRHDAVLKRIAKACRLPGEMRVNRRVEGVDGELGALRPDIVVRHEPSKSVVIVDITVPFENNYLAFEVARARKILKYKPLADELYRHGYRVTVSAIVVGALGSWDPANEPVLKQLRISPKYARLMRRLIVSETIRWGRDIYVEHVSGVRQYRVDDELPADDPGPPPDQRP

SEQ ID NO: 265 - protein, 2003 aa, Lasioglossum morio
MAGPTNSPLTIYIEFPFPGEFRCPECFGKPGIKLSGVYKTHSDLIKHAKKHHPGHIVVHRCGVCGEHGTGAFPLRYVKAHHTAAHTDRPRPNRCGRGGAYVIPLNTAAPTTVRSSLSTTSTNFSGRGRPESILRDANGAGTTIVTTTSTTTPTTTTPTTTTTADGLRPAATTVTSGGAPPPPTSPAAVPTTRTAATSTISTTTTTTTSTTTRRTASSSLRQQKLSFGPAAAGRGVTTETNTATETRQTLPPTSTATSRARAVVATSRTSTTPPPPRVMTRTRSATALASAASLRKSTTPPPPPAPTRKRTTATRTSNTPPTSTATTRAAAASKAPLRKSTTPPPPPPPTRRRNEVGRPSTTPPPSTAASRPAAAAASRAPLRKSTTPPPPPAPTTRTRTATTTATVATTKKLPSPSTTSTKTTTTTTTTKRGGATDKRLESVSGSTPPGTRAAPAANRRAGPGAVQRTSPSLPTRKSTPSSPPTLSNSGPARRTRGSTVSPKTKAPPTSPRGPVTRSRGASVPVELESVKRRTAALTTTTTRRKAAPKPGTKRSPRGVGKREEACAPTNPSNPTLHPDSSPRLFTSVIRTAASPTYAAVTAGATVVSATPPGDQGALRRQRSMTPISPESPAATPSSLALTTILRALSTSPCSPPTTFGEQAGARGCCVVSCVAVATLTTTTVTTTVSGGSIMTSRPLAGGERGAKRAWPVPAIPSLPPIEEVTVPPGPARTASSPSPPAIEEREEEGGEEDDDSPLPWQSAASRRRRRRQRALSSSPSSPSFSMPLSRSPNPETSLQRTTPTRRPSAEDVRTPEPPRRPPARAQRPPTPPPAPAAPGASRGATTTTITATTTTTAAPRVRNQPPPSRQQRRGAQRGTTAGDGRSSRPVSSRAPGDAARVDRSRDLRELLFRMGGYASRFRSMGGNNPGSSRPSGSTTGATVPAGRTNAPPGVVRVPTTPQLPRDSGHRRPTPVGQPNPRPRASLRREQAALATERGLLIDLAEAVDNLQDLEEVATQIAAFFKRFGSQPAGVGGRTGGRPTTNARERGRVVNTPVTGPSGRHEGVTPGGTDQVREATRIQRLFRQNRRRAVQEVLMGAPAQCQVPKDQVTEHFRNMYSPASTPPASGPLGFPSEAPTASSDAALIQPFGVSEVDRRLRRMSNSAPGPDGLSYRDLRKADPSCSILTALFNMIRRLESVPSSWKSSNTVLIHKKGDRMDLSNWRPLAMSDTTPKLFAAMLADRLVSWALQNGRLSPQQKGFLPCEGCYEHNYTLQEILNDARRGKSQVVVAWLDLSNAFGSIPHSTIYHAFAEAQVPLPFRNIVEGLYDGCTTRVRTSQGFTDPVPILSGVKQGCPLSPVAFNLALEPVLRAASGTSVGYTLHGRRYNILAYADDLVLIADTPGGMETLLNTVEAAAGGVGLRFNPAKCATLHQDSRGSRRAVPTCFSLQGQGLKSLAAGVPYEHLGVPTGFQVKQTPLLSIEELIRDLHAVDRSLLAPWQKCETVGSFILPRLDFLLRGAHVEKGPLKAADKLVRKLAKSWLNLPERASAEVVYLPPSRGGCGLLPLADLADALVIGHAFRLLTTPDPAISGLARDSLREAVARKIGRPPTDEDLATYLSGSLEGEFARTSWDFSTLWSRARNAARRSSESLQLRWEWCAARQELGLRLRGSRGRTTVVTPVARSQVLHRLRSAVTEFYSHRLVSKPDQGKVFGVSSRTKMSNHFLRGGSFTRFADWRFVHRARLNVLPLNGARRWGEGDKRCRRCGENLETLPHVICHCRPHSAAWQLRHDAVVSRIARACRLPGTLRVNQRVEGLTDDLEALRPDIVVRHEPSKSVVIIDVTVTFENGIEAFHAARERKIMKYLPIGAVLEEQGYRVVTDAIVVGALGSWDQANEPVLKLLRIGKKYAGLMRRLIVSETIRWGRDIYVEHVSGVRQYAAAPAAVPPVDSTLPPPAVIVASPLAPLPRTDENCFAPREYIDSVTDIGHAARTMTQGPSGPV

SEQ ID NO: 266 - protein, 1992 aa, Lasioglossum morio
MAGPTSSPITIYIEFPFPGDFRCPECFGKPGIKLSGVYKTHSDLIKHAKKHHPGHIVIHRCGVCGEHGTGAFPLRYVKAHHTAAHTDRPRPNRCGRGGAYVIPLTTAAPTTVRSPSSTTSTNFSGRGRPESILRDANGAGTTIVTTTSTTTPTTTTPTTTTTADGLRPAATTVTSGGAHPPSPSGPAAVPTTRTAATSTTSTNTTTTTSTTTRRTASSSLRQQKLSFGPAAAGRGVTTETNTATETRQTLPPTSTATSRARAVVATSRTSTTPPPPRVMTRTRSATALASAASLRKSTTPPPPPAPTRKRTTATRTSNTPPTSTATTRAAAASKAPLRKSTTPPPPPPPTRRRNEVGRPSTTPPPSTAASRPAAAAASGAPLRKSTTPPPPPAPTTRTRTATTSATVATTKKLPSPSTTSTRTTTTTTTKRGGATDKRLESVSGSTPPGTRAAPAANRRAGPGAVQRTSPSLPTRKSTPSSPPTLSNSGPARRTRGSTVSPKTKAPPTSPRGPITRSRGASVPVELESVKRRTAALTTTTTRRKAAPKPGTKRSPRGVGKREEACAPTNPSNPTLHPDSSPRLFTSVIRTAASPTYAAVTAGATVVTAAPPGDHTEGRRLRSMSRASSLPPESSTAMPSSPPLTAILRALSTSPCSPPTIHGEEEGARDGCVVPCVAPATLTTTTVTTTVSGGSIMTSRPLAGGERGAKRAWPVPAIPSLPPIEEVTVTPGPARAASSPSPPAIEEREEEGGEEEDDSPLPWQSAASRRRRRRQRALSSSPSSPSFSLPLSRSSIPETSPQDRTTPTRRPSAEDVRTPEPPRRPPARAQRPSTPPPAPAAPRASRGATTTTITATTTTTAAPRVRNQPPPSRQQRRGAQRGTTAGDGRNSHSVNSRAPGDAARVDRSRDLRDMLFRLGGFASRFRTMGGNNPGRPNQSGSTTGATVPAGRTNAPPGVVRVPMTPQLPRDSGHRRPTPVDQPNPRPRASLRREQAALATERGLLIDLAEAVDNTQDLEEVATQIAAFFKRFGSQPAGVGGRTGGRPTTNARERGRVVNTPVTGPSGRHEGVAPRGTDQVREATRIQRLFRQNRRRAVQEVLMGAPAQCQVPKDQVTEHFRNMYSPASTPPASGPLGFPSEAPTASSDAALVQPFGVSEVDRRLRRMSNSAPGPDGLSYRDLRKADPSCSILTAYFNMIRRLESVPSSWKSSNTVLIHKKGDRMDLSNWRPLAMSDTTPKLFAAVLADRLVSWALHNGRLSPQQKGFLPCEGCYEHNYTLQEILNDARRGRSQVVVAWLDLSNAFGSIPHSTIYHAFAEAQVPLPFRNIVEGLYDGCTTRVRTSQGFTDPVPILSGVKQGCPLSPVAFNLALEPVLRAASGTSVGYTLHGRRYNILAYADDLVLIADTPGGMDTLLSTVEAAAGGVGLRFNPAKCATLHQDSRGSRRAVPTCFSLQGQALKSLAAGVPYEHLGVPTGFQVKQTPLLSIEELIRDLHAVDRSLLAPWQKCETVGSFILPRLDFLLRGAHVEKGPLKTADKLVRKLAKSWLNLPERASAEVVYLPPSRGGCGLLPLADLADALVIGHAYRLLTAPDPAISGLARDSLGEAVARKIGRPPTDLDLATYLSGSLEGEFARTSWDFSTLWSRARNAARRSSNSLQLRWEWCAERQELGIRLRGSRGRTTVVTPVARSQVLHRLRSAVTEFYSHRLGSKPDQGKVFGVSSRTKVSNHFLRGGSFTRFADWRFVHRARLDVLPLNGARRWGEGDKRCRRCGESMETLPHVLCHCRPHSAAWQLRHDAVVSRIARACRLPGTLRVNQRVEGLTGDLEALRPDIVVRHEPSKSVVIIDVTVTFENGIEAFHAARDRKISKYLPIGAALEEQGYRVVTDAIVVGALGSWDRANEPVLKLLRIGKKYAGLMRRLIVSETIRWGRDIYVEHVSGVRQYAAAPAAVPPVDSTLPPLAVNVASPLALLPRSTESTIAPRVINHSDTQT

SEQ ID NO: 267 - protein, 1218 aa, Lasioglossum morio
MPLSRSPNPQTSLQRTTPTRRPSAEDVRTPEPPRRPPARAQRPPTPPPDPAATRASRGATTTTTITAITTTAAPRVRNQPPPSRQQRRGAQRGATAGDGRSSRPVSSRVPGDAARVDRSRDLRDLLFRMGGYASRFRSMGGNNPGRSNQSGSTTGATVPAGRTNAPSGVVRVPTTPQLTRDSEHRRPTPVGQPNPRPRASLRREQAALATERGLLIDLAEAVDNSQDLEEVATQIAAFFKRFGSQSAGVGGRTGGRPTTNARERGRVVNTPVTGPSGRHEGVTPRGTDQVREATRIQRLFRQNRRRAVQEVLMGAPAQCQVPKDQVTEHFRNMYSPASTPPASGPLGFPSEAPTASSDAALVQPFGVSEVDRRLRRMSNSAPGPDGLSYRDLRKADPSCSILTAYFNMIRRLESVPSSWKSSNTVLIHKKGDRMDLSNWRPLAMSDTTPKLFAAVLADRLVSWALQNGRLSPQQKGFLPCEGCYEHNYTLQEILNDARRGKSQVVVAWLDLSNAFGSIPHSTIYHAFAEAQVPLPFRNIVEGLYDGCTTRVRTSQGFTDPVPILSGVKQGCPLSPVAFNLALEPVLRAASVTSVGYTLHGRRYNILAYADDLVLIADTPGGMDTLLSTVEAAAGGLGLRFNPAKCATLHQDSRGSRRAVPTCFSLQGQGLKSLAAGVPYEHLGVPTGFQVKQTPLLSIEELIRDLHAVDRSLLAPWQKCETVGSFILPRLDFLLRGAHVEKGPLKTADKLVRKLAKSWLNLPERASAEVVYLPPSRGGCGLLPLADLADALVIGHAYRLLTAPDPAISGLARDSLREAVARKIGRTPTDQDLATYLSGSLEGEFARTSWDFSTLWSRARNAARRSSNSLQLRWEWCAERLELGIRLRGSRGRTTVVTPVARSQVLHRLRSAVTEFYSHRLVSKPDQGKVFGVSSRTKVSNHFLRGGSFTRFADWRFVHRARLNVLPLNGARRWGEGDKRCRRCGENLETLPHVICHCRPHSAAWQLRHDAVVSRIARACRLPGTLRVNQRVEGLTDDLEALRPDIVVRHEPSKSVVIIDVTVTFENGIEAFHAARERKISKYLPIGAVLEEQGYRVVTDAIVVGALGSWDQDNESVLKLLRIGKKYAGLMRRLIVSETIRWGRDIYVEHVSGVRQYAAAPAAVPSVDVTLPPPAVNVASPLALLPRTSESTIAPRNSTCDVDMRHEARTLTQGPSGPV

SEQ ID NO: 268 - protein, 1661 aa, Tenthredo notha
MSNSNDNNNNNANTDILIEFPFPEEFRCPFCYEQNHGRKTGGVFKGHGELVKHAKKYHPASKVIKKCAACCFVGEGVYALKLVKQHHAKQHPPVDPAPRAPRTTTTARASGANVTNCDRSSTTVSNLTDTSSRGRLDNFILNRLPGPGRGTASISTSLPPATRSRRTAATTAAAATPSPRAAARCGDITILSPAAETTTSTPTTSQVSTPTPTPEVPRPDMATPTTTGSSPSSPRETLPSFYAGPTTRSRRASSVPVGDRPAAHRNTISRRVAVPRPAAATVRKIAPASTKGRSPVTTPSPTVTGSTRRPSATTTLRPIPPGPKRTSSSPTYAAVTAAGTSRSTQAARGPTTTRPGLRSATRAASLPPEAAETRRSPATRESRGPRQLPTITEDLWTPVSGLSCPLTLPETPTTTTITTTTSGRPIMSSRLYRAGQEETRAATPPPAAPTLLPVAIVGVAGPSRATPGAETPTTPWQAATRRARRPHQSGPRSSGGSSSEEEPPSPPRAPPRTRLSPTTAQARRSKESNSNNTPNSSRHGLGAGPRESAGSDNNTFNIRQDSTYNRFNLLANNNTIAFSTGTPGTCSAREPGHGEDDDTVRVGFLNQSRGVGSRGGRGTRRGASGSGGGGGASASSGQATRPASSHGSAAVSRHPPAPERRPPTAVNQALRGRQNAWPRAEEELPTTRDSLIDMAEAAVTIEDLEETATQVAAFFQSSGEAVGVLRSRVNGGRGGRGGGRRGGERGRGSGYRRDRQQPQHQRQQQPRPALPGRGDRVEEATRIQKLFRANRRRAVQEVLLGPSQHCQVPRERIQAHFEDMYAPSAPLGAQPPPPPYGPPDDASNDALTRPFAVSEVDQRLRRTSNSAPGPDGLTYDDLRRADPECRLLAALFNTCLRLERVPSGWKESNTVLVHKKGDRDDLSNWRPLALGDTTPKLFAALLADRLLTWSIRNKRLSNSQKGFLPCEGCYEHNFVLQEVLNDARRGGRQVVVAWLDLTNAFGSIPHAAIYRALEEACAPSALQNIVESMYENCTTRVRTADGLTEPIKIQSGVKQGCPMSPVAFNLALEPVLRAVGDSPAGYTLHGHRHQILAYADDLALISDSTEGMGDLLRKVEAAAGGIGLRFNPAKCATLHQDCRGARRVLPTRFTLQGEEMRTLAAGEPYQHLGVPTGFQVRQTPLLTIDDLLRDLRAVDGSLLTPWQRAETVATFLVPRLEFLLRGALVEKGPLKEADKLIRKTVKSWLHLPQRASAELVYLPPSRGGCGLLPLADMADALSIAHAYRLLTVDDPVVRALAWASLRHAVAKKIGRAPSNEDLATYLSGSLEGEFARDGGDISSLWTRARNATRRSKDKIAAKWRWSEIREELVVTMRSSSERETTVSPESRGQVIRRLRAAVTEYYSTRLKRKPDQGKVFQVSARSNVSNHFLRGGSFTRFADWRFIHRARLDVLPLNGARRWGDGDKRCRRCGEPLESLPHVLCHCRPHSAAWQLRHDAVLKRIAKACRLPGEMRVNRRVEGVDGELGALRPDIVVRHEPSKSVVIVDITVPFENNYLAFEEARARKILKYKPLADELYRHGYRVTVSAIVVGALGSWDPANEPVLKQLRISPKYARLMRRLIVSETIRWGRDIYVEHVSGVRQYRVDDELPADDPGPPPDQRP

SEQ ID NO: 269 - protein, 1999 aa, Lasioglossum morio
MAGPSTCPITIYIEFPFPGDFRCPECYGKPGTRTSGVYKTHNDLVKHAKKCHPGHVVVHRCGVCGEHGTGAFPLRYVKAHHLAAHTDGPRPSRCGRGGAYVIPLTTAAPTTVRSSLSTNSTNSSGRGRPESILRSANGAGPTVVPTIATTTTATTTTTTTTASGLRPPVVTTATSGGAPPPSTSPAAAPTTRAAATSTTTTTSTTTTRPTSSSLRQQRLPFGPATAGRGATTGTVTVTRTRQTPPTTATATSRAKAVVATSRTSTTPPPSSATSRAGPATGAAPAASLRKSTTPPPPPATTRTRTTASRTSTTPPPSTATARTRTATAAASRASVRKSTTPPPPPPPTRRKTAAARTSTTPPPSSATSRAKQAAAAAPGAPLRKSATPPPPPATSRTRKATTAAKVATRELPSPPTTTATATTTTRRGGVTGKSLETVSGSTPPGSRAAPAANKRAGSGAVQRASPSPPTRRSTPSSPPTQSNSGPARRTRGSTVSPRTKAPPTSPRGPITRSRGASVPVELESVKRRTAALNTTRRKAAPTSGSKRSPRGVGKRDGPCAPTNHSNPTLHPDSSPRLFTSVIRTAASPTYAAVTAGATVVTAAPPGGQTEVRRLRSMTRASSLPPESPIATPSSPTLNTILRALSTSPCSPPTTFGEQEGARGCCVVSCVALATLTTTTVTTTVSGGSIMTSRPLAGGGERGAKRAWPVPAIPSLPPIEEVTVSPGPARTASSPSPPTIEEREEEGGEEDDSPLPWQSAASRRRRRQLRVLSLSPTSPSVSLPPSRSSYPETSPQEARTSPRRPSTEDVRTPEPIRRTPARAQRPHTPPPAPDANRATRGVTTTSITANTTTAAPRVRNQPPPSRQQRRGAQRGTTAGDGRSSRPVSSRAPEDAARVDRSRDLRDLLFRMGGYASRFRSMGGNNPGRLNQSGSATGATVPAGRTNAPSGVVRVPTTPQLPRDSGHRRPTPVGQPNPRPRASLRREQAALATERGLLIDLAEAVDNPQDLEEVATQIAAFFKRFGSQPAGVGGRTGGRPTTNAGRRGRVVNTPVTGPSERHEGVTPRRTDQVREATRIQRLFRQNRRRAVQEVLMGAPAQCQVPKDQVLEHFRNMYSPASTPTAAGPLGFPSEAPTAASDAALVEPFGVSEVDRRLRRMSNSAPGPDGLSYRDLRKADPSCGILTAYFNMVRRLESVPSSWKSSNTVLIHKKGDRMDLSNWRPLAMSDTTPKLFAAVLADRLVSWALHNGRLSPQQKGFLPCEGCYEHNYTLQEILNDARRGKSQVVVAWLDLSNAFGSIPHSTIYHAFAEAQVPLPFRNIVEGLYDGCTTRVRTSQGFTDPVPILSGVKQGCPLSPVAFNLALEPVLRAASGTSVGYTLHGRRYNILAYADDLVLIADTPGGMDTLLNTVEAAAGGVGLRFNPAKCATLHQDSRGSRRAVPTCFSLQGQGLKSLAAGVPYEHLGVPTGFQVKQTPLLSIEELIRDLHAVDRSLLAPWQKCETVGSFILPRLDFLLRGAHVEKGPLKTADKLVRKLAKSWLNLPERASAEVVYLPPSRGGCGLLPLADLADALVIGHAFRLLTTPDPAISGLARDSLREAVARKIGRPPTDLDLATYLSGSLEGEFARTSWDFSTLWSRARNAARRSSNSLQLRWEWCAERQELGIRLRGSRGRTTVVTPVARSQVLHRLRSAVTEFYSHRLGSKPDQGKVFGVSSRTKVSNHFLRGGSFTRFADWRFIHRARLDVLPLNGARRWGEGDKRCRRCGENMETLPHVLCHCRPHSAAWQLRHDAVVSRIARACRLPGTLRVNQRVEGLTGDLEALRPDIVVRHEPSKSVVIIDVTVTFENGIEAFHAARGRKISKYLPIGAALEEQGYRVVTDAIVVGALGSWDQDNESVLKLLRIGKKYAGLMRRLIVSETIRWGRDIYVEHVSGVRQYAAAPAAVPSVDVTLPPPAVNVVSPLALLPRTSESTIAPRNHIVDEAIGHEAHTWTQGPSDPV

SEQ ID NO: 270 - protein, 1969 aa, Lasioglossum morio
MAGPSTSPVTIYIEFPFPGEFRCPECFGKPGIKLSGVYKTHNDLIKHAKKHHPGHVVVHRCGVCGEHGTGAFPLRYVKAHHTAAHTDRPRPNRCGRGGAYVIPLTTAAPTIARSSLSTTSTDFSGRGRPESILRDASGAGPTIVITTSTTTPTTTTPTTTTTADGLRPAATTVTSGGAPPPPTSPAAVPTTRTAATSTISTTTTTTTSTTTRRTASSSLRQQKLSFGPAAAGRGVTTGTKTVTKTRQTPPTTSTATSGTRAVVATSRSSTTPPPPRAMTRTRSATALASTASLRKSTTPPPPSAPSRTRTSVTRTSTTPPPSTATTRARTAAAAASKAPLRKSTTPPPPPPPTRRRTEAGRPSTTPPTSKATSRTKPAAAAAPRAPSRKSTTPPPPPATSRTRTATSTAKVATAKKLPSPPPTSTRTATTTATKRGGVTRKSLETVSGSTPPGTRAAPAADRRAGSGAAQRASTSPPTRKSTPSSPPTLSNSGPARRTRGSTVSPRTKAPPTSPRGPITRSRGASVPVELESVKRRTAALNTTRRKAAPTSGSKRSPRGVGKRDGPCAPTNHSNPTLHPDSSPRSFTSVIRTAASPTYAAVTAGATVVTAAPPGDQTTLNTILRALSTSPCSPPTTFGEQAGARGCCVVSCVAVATLTTTTVTTTVSGGSIMTSRPLAGGGERGAKRAWPVPAIPSLPPIEEVTVSPGPARTASSPSPPAIEEREEEGGEEEDDSPLPWMSAASRRRRRRQRALSSSPTSPSVSLPLSRSPNPETSLQRTTPTRRPSAEDVRTPEPPRRPPARAQRPPTPPPAPAVTRASRGATTTNTITATTTTTAAPRVREQPPSSRQQRGGAQRGTTAGDGRNSRSGSSRAPGDAARVDRSRDLRDLLFRMGGYASRFRSMGGNNPGRSNQSGSTTGATVPAGRTNAPPGVVRVPTTPQLPRDSGHRRPTPVDQPNPRPRASLRREQAALATERGLLIDLAEAVDNPQDLEEVATQIAAFFKRFGSQPTGVGGRTGGRPTTNARERGRVVNTPVTGPSGRHEGVTPRGTDQVREATRIQRLFRQNRRRAVQEVLMGAPAQCQVPKDQVTEHFRNMYSPASTPPASGPLGFPSEAPTASSDAALVQPFGVSEVDRRLRRMSNSAPGPDGLSYRDLRKADPSCSILTAYFNMIRRLESVPSSWKSSNTVLIHKKGDRMDLSNWRPLAMSDTTPKLFAAVLADRLVSWALHNGRLSPQQKGFLPCEGCYEHNYTLQEILNDARRGRSQVVVAWLDLSNAFGSIPHSTIYHAFAEAQVPLPFRNIVEGLYDGCTTRVRTSQGFTDPVPILSGVKQGCPLSPVAFNLALEPVLRAASGTSVGYTLHGRRYNILAYADDLVLIADTPGGMDTLLSTVEAAAGGVGLRFNPAKCATLHQDSRGSRRAVPTCFSLQGQGLKSLAAGVPYEHLGVPTGFQVKQTPLLSIEELIRDLHAVDRSLLAPWQKCETVGSFILPRLDFLLRGAHVEKGPLKVADKLVRKLAKSWLNLPERASAEVVYLPPSRGGCGLLPLADLADALVIGHAYRLLTAPDPAISGLARDSLREAVARKIGRPPTDLDLATYLSGSLEGEFARTSWDFSTLWSRARNAARRSSNSLQLRWEWCAERQELGIRLRGSRGRTTVVTPVARSQVLHRLRSAVTEFYSHRLGSKPDQGKVFGVSSRTKVSNHFLRGGSFTRFADWRFVHRARLDVLPLNGARRWGEGDKRCRRCGENMETLPHVLCHCRPHSAAWQLRHDAVVSRIARACRLPGTLRVNQRVEGLTGDLEALRPDIVVRHEPSKSVVIIDVTVTFENGIEAFHAARDRKISKYLPIGAALEEQGYRVVTDAIVVGALGSWDQANEPVLKLLRIGKKYAGLMRRLIVSETIRWGRDIYVEHVSGVRQYAAAPAAVPPVDSTLPPLAVNVASPLALLPRSTECTIAPRVINHSDTQT

SEQ ID NO: 271 - protein, 1999 aa, Lasioglossum morio
MAGPTSSPITIYIEFPFPGDFRCPECFGKPGIKLSGVYKTHNDLIKHAKKHHPGHIVIHRCGVCGEHGTGAFPLRYVKAHHTAAHTDRPRPNRCGRGGAYVIPLTTAAPTTVRSSLSTTSTNFSGRGRPESILRSANGAGPTVVPTIATTTTATTTTTTTTASGLRPPAVTTATSGGAPPPSTSPAAAPTTRAAATSTTTTTSTTTTRPTSSSLRQQRLPFGPATAGRGATTGTVTVTRTRQTPPTTATATSRAKAVVATSRTSTTPPPSSATSRAGPATGAAPTASLRKSTTPPPPPATTRTRTTASRTSTTPPPSMATARTRTATAAASKASVRKSTTPPPPPPPTRRKTAAARTSTTPPPSSATSRAKQAAAAAPRAPLRKSTTPPPPPAPTRRKTATTAAKVATRELPSPPTTTATATTTTRRGGVTGKSLETVSGSTPPGPRAAPAANKRAGSGAVQRASPSPPTRRSTPSSPPTQSNSGPARRTRGSTVSPRTKAPPTSPRGPTTRSRGASVPVELESVKRRTAALNTTRRKAAPTSGSKRTPRGVGKRDGPCAPTNHSNPTLHPDSSPRLFTSVIRTAASPTYAAVTAGATVVTAAPPGDQTDVRRLRSMTRASSLPPESPIATPSSPTLNTILRALSTSPCSPPTTFGEQEGARGCCVVSCVALATLTTTTVTTTVSGGSIMTSRPLAGGGERGAKRAWPVPAIPSLPPIEEVTVSPGPARTASSPSPPTIEEREEEGGEEDDSPLPWQSAASRRRRRQLRVLSLSPTSPSVSLPPSRSSYPETSPQEARTSPRRPSTEDVRTPEPQRRPPARAQRPPTPPPAPAATRASRGATSTTTITATTTTTAAPRVRDQPPSSRQQRRGAQRGTTAGDGRSSRPVSSRAPGGAARVDRSRDLRDMLFRLGGFASRFRTMGGNNPGRSSQGGSTTGATVPAGRTNAPPGVVRVPTTPQLPRDSGHRRPTPVDQPNPRPRASLRREQAALATERGLLIDLAEAVDNLQDLEEVATQIAAFFKRFGSQPAGVGGRTGGRPTTNARERGRVVNTPVTGPSGRHEGVTPRGTDQVREATRIQRLFRQNRRRAVQEVLMGAPAQCQVPKDQVTEHFRNMYSPASTPPASGPLGFPSEAPTASSDAALVQPFGVSEVDRRLRRMSNSAPGPDGLSYRDLRKADPSCSILTAYFNLIRRLESVPSSWKSSNTVLIHKKGDRMDLSNWRPLAMSDTTPKLFAAVLADRLVSWALQNGRLSPQQKGFLPCEGCYEHNYTLQEILNDARRGKSQVVVAWLDLSNAFGSIPHSTIYHAFAEAQVPPPFRNIVEGLYDGCTTRVRTSQGFTDPVPILSGVKQGCPLSPVAFNLALEPVLRAASGTSVGYTLHGRRYNILAYADDLVLIADTPGGMDTLLNTVEAAAGGVGLRFNPAKCATLHQDSRGTRRAVPTSFSLQGQALKSLAAGVPYEHLGVPTGFQVKQTPLLSIEELIRDLHAVDRSLLAPWQKCETVGSFILPRLDFLLRGAHVEKGPLKVADKLVRKLAKSWLNLPERASAEVVYLPPSRGGCGLLPLADLADALVIGHAYRLLTAPDPAISGLARDSLREAVARKIGRPPTDLDLATYLSGSLEGEFARTSWDFSTLWSRARNAARRSSNSLQLRWEWCAERQELGIRLRGSRGRTTVVTPVARSQVLHRLRSAVTEFYSHRLGSKPDQGKVFGVSSRTKVSNHFLRGGSFTRFADWRFIHRARLDVLPLNGARRWGEGDKRCRRCGENMETLPHVLCHCRPHSAAWQLRHDAVVSRIARACRLPGTLRVNQRVEGLTGDLEALRPDIVVRHEPSKSVVIIDVTVTFENGIEAFHAARGRKISKYLPIGAALEEQGYRVVTDAIVVGALGSWDQDNESVLKLLRIGKKYAGLMRRLIVSETIRWGRDIYVEHVSGVRQYAAAPAAVPPVDTTLPPTAVTVTPPLAPLPRVIESIAPRAHSDSDIGHAARTLTQGPSGPI

SEQ ID NO: 272 - protein, 1799 aa, Lasioglossum morio
MAGPTTSPITIVIEFPLAAEFRCPECYGKPGLRTSGVYKTHNDLVKHAKKCHPGHIVVHRCGVCGEHGTGAFPLRYVKAHHLAAHTDRPRPSRSGRGGAYVIPLTTASTTTVLSSPSTAGNNLSGRGRPESFSSCATGAGLTVVPNIATTTTATTTTTTTTTGLRPTATTTVIPGGAPRPSKSPAAAPTTRAAATRTTTTTTSTTTTRPSSSSLRQQKLSFGPAAAGRGATTWTVTATETRQTPPPTATATSRAKAVVATSRTSITPPPPRTMTKTRSATALASRNPVRKSTTPPPPPAPPKKGTTAAARVARKNLPSPPTTTTRTTPTTTTTKRGGVTGTVPGTSTSGSGAAPAAIRRSGSGAVQRSSPSPPVRKSTSSSPPTLSPSGPARRTRGSTVSPKTNAPTTSPRGPITRSRGASVPVELECVRRRTAALKDIRRKAAPKPGSKRSPRGVGKRGAPSSAPTTSPNPPHHQSSRRRLITSVTRTAASPSYAAVTAGATVVSATPPGDQGAVRRQRSTTPISPESPAATPSSQALTTILRALSTSPCSPPTTTGEQEGVRGCCAVSCVAVATLTTTTVTTTVSGGPIMTSRPLAGGVERGSKKTRQEPAVLSLPPIAEVTVSPGPAWTAPSPSPPTIEEREEVEREEEEDDSPLPWQSAASRRRRRRQLLSLSLSPVTPPSASVPPSMSSIPETSPQRTTPPRRPPAGDTRTPEPHRRPPARPQRPPTPPPALEASRAMREVTDTTITAATTTLAPRSGAQPPPSLQPRRSAQRGTTAGGEGNTHRVSSRAPRGTARVDRSRDLRDLLFRMGGYASRFRSMGGNNPGRSNQGGSTTGATVPAWRTNAPSGVVRVPATPQAPRDSEHRRPTPVGQPNPRPRASLRREQAALATERGLLIDLAEAVDNSQDLEEVATQIAAFFKRFGSQSAGVGGRTGGRPTTNARERGRVVNTPVTGPSGRHEGVTPRGTDQVREATRIQRLFRQNRRRAVQEVLMGAPAQCQVPKDQVTEHFRNMYSPASTPPASGPLGFPSEAPTASSDAALVQPFGVSEVDRRLRRMSNSAPGPDGLSYRDLRKADPSCSILTAYFNMIRRLESVPSSWKSSNTVLIHKKGDRMDLSNWRPLAMSDTTPKLFAAVLADRLVSWALHNGRLSPQQKGFLLCEGCYEHNYTLQEILNDARRGRSQVVVAWLDLSNAFGSIPHSTIYHAFAEAQVPLPFRNIVEGLYDGCTTRVRTSQGFTDPVPILSGVKQGCPLSPVAFNLALEPVLRAASGTSVGYTLHGRRYNTFAYADDLVLIADTPGGMDTLLSTVEAAAGGVGLRFNPAKCATLHQDSRGSRRAVPTCFSLQGQGLKSLAAGVPYEHLGVPTGFQVKKTPLLSIEELIRDLHAVDRSLLAPWQKCETVGSFILPRLDFLLRGAHVEKGPLKLADKLVRKLAKSWLNLPERASAEVVYLPPSRGGCGLLPLADLADALVIGHAFRLLTTPDPAISGLARDSLREAVARKIGRTPTDQDLATYLSGSLEGEFARTSWDFSTLWSRARNAARRSSESLQLRWEWCAARQELGLRLRGFRGRTTVVTPVARSQVLHRLRSAVTEFYSHRLVSKADQGKVFGVSSRTKVSNHFLRGGSFTRFADWRFVHRARLNVLPLNGARRWGEGDKRCRRCGENLETLPHVMCHCRPHSAAWQLRHDAVVSRIARACRLPGTLRVNQRVEGLTGDLEALRPDIVVRHELSKSVVIIDVTVTFENCIEAFHAARERKISKYLPIGAVLEEQGYRVVTDAIVVGGPRLMGSGQ

SEQ ID NO: 273 - protein, 2003 aa, Lasioglossum morio
MAGPSNSPITIYIEFPFPGEFRCPECFGKPGIKLSGVYKTHNDLVKHAKKHHPGHIVIHRCGVCGEHGTGAFPLRYVKAHHTAAHTDRPRPNRCGRGGAYVIPLTTAAPTTVRSSLSTTSTNFSGRGRPESILRDANGAGTTIVTTTSTTTPTTTTPTTTTTADGLRPAATTVTSGGAPPPPTSPAAVPTTRTAATSTISTTTTTTTSTTTRRTASSSLRQQKLSFGPAAAGRGVTTETNTATETRQTLPPTSTATSRARAVVATSRTSTTPPPPRVMTRTRSATALASAASLRKSTTPPPPPAPTRKRTTATRTSNTPPTSTATTRAAAASKAPLRKSTTPPPPPPPTRRRNEVGRPSTTPPPSTAASRPAAAAASRAPLRKSTTPPPPPAPTTRTRTATTTATVATTKKLPSPSTTSTKTTTTTTTTKRGGATDKRLESVSGSTPPGTRAAPAANRRAGPGAVQRTSPSLPTRKSTPSSPPTLSNSGPARRTRGSTVSPKTKAPPTSPRGPVTRSRGASVPVELESVKRRTAALTTTTTRRKAAPKPGTKRSPRGVGKREEACAPTNPSNPTLHPDSSPRLFTSVIRTAASPTYAAVTAGATVVSATPPGDQGALRRQRSMTPISPESPAATPSSLALTTILRALSTSPCSPPTTFGEQAGARGCCVVSCVAVATLTTTTVTTTVSGGSIMTSRPLAGGERGAKRAWPVPAIPSLPPIEEVTVPPGPARTASSPSPPAIEEREEEGGEEDDDSPLPWQSAASRRRRRRQRALSSSPSSPSFSMPLSRSPNPETSLQRTTPTRRPSAEDVRTPEPPRRPPARAQRPPTPPPAPAAPGASRGATTTTITATTTTTAAPRVRNQPPPSRQQRRGAQRGTTAGDGRSSRPVSSRAPGDAARVDRSRDLRELLFRMGGYASRFRSMGGNNPGSSRPSGSTTGATVPAGRTNAPPGVVRVPTTPQLPRDSGHRRPTPVGQPNPRPRASLRREQAALATERGLLIDLAEAVDNLQDLEEVATQIAAFFKRFGSQPAGVGGRTGGRPTTNARERGRVVNTPVTGPSGRHEGVTPGGTDQVREATRIQRLFRQNRRRAVQEVLMGAPAQCQVPKDQVTEHFRNMYSPASTPPASGPLGFPSEAPTASSDAALIQPFGVSEVDRRLRRMSNSAPGPDGLSYRDLRKADPSCSILTALFNMIRRLESVPSSWKSSNTVLIHKKGDRMDLSNWRPLAMSDTTPKLFAAMLADRLVSWALQNGRLSPQQKGFLPCEGCYEHNYTLQEILNDARRGKSQVVVAWLDLSNAFGSIPHSTIYHAFAEAQVPLPFRNIVEGLYDGCTTRVRTSQGFTDPVPILSGVKQGCPLSPVAFNLALEPVLRAASGTSVGYTLHGRRYNILAYADDLVLIADTPGGMETLLNTVEAAAGGVGLRFNPAKCATLHQDSRGSRRAVPTCFSLQGQGLKSLAAGVPYEHLGVPTGFQVKQTPLLSIEELIRDLHAVDRSLLAPWQKCETVGSFILPRLDFLLRGAHVEKGPLKAADKLVRKLAKSWLNLPERASAEVVYLPPSRGGCGLLPLADLADALVIGHAFRLLTTPDPAISGLARDSLREAVARKIGRPPTDEDLATYLSGSLEGEFARTSWDFSTLWSRARNAARRSSESLQLRWEWCAARQELGLRLRGSRGRTTVVTPVARSQVLHRLRSAVTEFYSHRLVSKPDQGKVFGVSSRTKMSNHFLRGGSFTRFADWRFVHRARLNVLPLNGARRWGEGDKRCRRCGENLETLPHVICHCRPHSAAWQLRHDAVVSRIARACRLPGTLRVNQRVEGLTDDLEALRPDIVVRHEPSKSVVIIDVTVTFENGIEAFHAARERKIMKYLPIGAVLEEQGYRVVTDAIVVGALGSWDQANEPVLKLLRIGKKYAGLMRRLIVSETIRWGRDIYVEHVSGVRQYAAAPAAVPPVDSTLPPPAVIVASPLAPLPRTDENCFAPREYIDSVTDIGHAARTMTQGPSGPV

SEQ ID NO: 274 - protein, 1998 aa, Lasioglossum morio
MAGPTSSPLTIYIEFPFPGEFRCPECYGKPGTRTSGVYKTHNDLVKHAKKCHPGHIVVHRCGVCGEHGTGAFPLRYVKAHHLAAHTDGPRPSRCGRGGAYVIPLTSASTTVRSSLSTTSTNFSGRGRPESILRSANGAGPTVVPTIATTTTATTTTTTTTASGLRPPTVTTATSGGAPPPSTSPAAAPTTRAAATSTTTTTSTTTTRPTSSSLRQQRLPFGPATAGRGATTGTVTVTRTRQTPPTTATATSRAKAVVATSRTSTTPPPSSATSRAGPATGAAPAASLRKSTTPPPPPATTRTRTMASRTSTTPPPSTATARTRTATAAASKASVRKSTTPPPPPPPTRRKTAAARTSTTPPPSSATSRAKQAAAAAPRAPLRKSTTPPPPPATSRTRKATTAAKVATRELPSPPTTTATATTTTRRGGVTGKSLETVSGSTPPGSRAAPAANKRAGSGAVQRASPSPPTRRSTPSSPPTQSNSGPARRTRGSTVSPRTKAPPTSPRGPITRSRGASVPVELESTKKRTAALNATRRKTAPTSGSKRSPRGVGKRDGPCAPTNPSNPTLHPDSSPRLFTSVIRTAASPTYAAVTAGATVVTAAPPGDQTEVRRLRSMTRASSLPPESPIATPSSPTLNIILRALSTSPCSPPTTFGEQEGARGCCVVSCVALATLTTTTVTTTVSGGPIMTSRPLAGGGERGAKRAWPVPAIPSLPPIEEVTVSPGPARTASSPSPPAIEEREEEGGEEDDSPLPWQSAASRRRRRQLRVLSLSPTSPSVSLPPSRSSYPETSPQEARTSPRRPSTEDVRTPEPIRRTPARAQRPHTPPPAPDANRATRGVTTTIITATTTTAAPRVRNQPPPSRQQRRGAQRGTTAGDGRNSRSGSSRAPGDAARVDRSRDLRDLLFRMGGYASRFRSMGGNNPGRSNQGGSTTGATVTAGRTNAPSGVVRVPATPQLPRDPEHRRPTPVGQPNPRPRASLRREQAALATERGLLIDLAEAVDNPQDLEEVATQIAAFFKRFGSQPAGVGGRTGGRPTTNARERGRVVNTPVTGPSGRHEGVTPRGTDQVREATRIQRLFRQNRRRAAQEVLMGAPAQCQVPKDQVTEHFRNMYSPASTPPASGPLGFPSEAPTASSDAALVQPFGVSEVDRRLRRMSNSAPGPDGLSYRDLRKADPSCSILTAYFNMIRRLESVPSSWKSSNTVLIHKKGDRMDLSNWRPLAMSDTTPKLFAAVLADRLVSWALQNGRLSPQQKGFLPCEGCYEHNYTLQEILNDARRGKSQVVVAWLDLSNAFGSIPHSTIYHAFAEAQVPLPFRNIVEGLYDGCTTRVRTSQGFTDPVPILSGVKQGCPLSPVAFNLALEPVLRAASGTSVGYTLHGRRYNILAYADDLVLIADTPGGMDTLLNTVEAAAGGVGLRFNPAKCATLHQDSRGSRRAVPTCFSLQGQGLKSLAAGVPYEHLGVPTGFQVKQTPLLSIEELIRDLHAVDRSLLAPWQKCETVGSFILPRLDFLLRGAHVEKGPLKTADKLVRKLAKSWLNLPERASAEVVYLPPSRGGCGLLPLADLADALVIGHAFRLLTTPDPAISGLARDSLREAVARKIGRTPTDQDLATYLSGSLEGEFARTSWDFSTLWSRARNAARRSSESLQLRWEWCAARQELGIRLRGSRGRTTVVTPVARSQVLHRLRSAVTEYYSHRLDSKPDQGKVFGVSSRTKVSNHFLRGGSFTRFADWRFVHRARLNVLPLNGARRWGEGDKRCRRCGENLETLPHVICHCRPHSAAWQLRHDAVVSRIARACRLPGTLRVNQRVEGLTDDLEALRPDIVVRHEPSKSVVIIDVTVTFENGIEAFHAARERKISKYLPIGAALEEQGYRVVTDAIVVGALGSWDRANEPVLKLLRIGKKYAGLMRRLIVSETIRWGRDIYVEHVSGVRQYAAAPAAVPPADLALPPPAVMVTPPLAPPPRTDVNCFAPRNNTCDAPTGHEALILTQGSSSPA

SEQ ID NO: 275 - protein, 1977 aa, Lasioglossum morio
MAGPSTSPLTIYIEFPFPGEFRCPECFGKPGIKLSGVYKTHNDLVKHAKKHHPGHIVIHRCGVCGEHGTGAFPLRYVKAHHTAAHTDRPRPNRCGRGGAYVIPLTTAAPTIVRSSLSTTSTNFSGRGRPESILRDASGAGPTIVTTTSTTTPTTTTPTTTTTADGLRPAATTVTSGGAPPPPTSPAAVPTTRTAATSTSTTTTTTTSTTTRRTASSSLRQQKLSFGPAAAGRGVTTGTKTVTKTRQTPPTTSTATSRARAVVATSRTSTTPPPSQATLRTRSATALAATASLRKSTTPPPPPAPSRTRASVTRTSTTPPPSTATMRTRTAAAAASKAPLRKSTTPPPPPPPTRRRTEAGRPSTTPPTSKATSGTKPAAAAAPRAPPRKSTTPPATSRTRTATSTAKVATAKKLPSPPPTSTRTATTTTTKRGGVTNRSLESVPGSPPPGTRAAPAANRRAGSGAAQRASTSPPTRKSTSSPPPTLSNSGPARRTRGSTVSPRTKAPPTSPRGPITRSRGASVPVELEDVKRRTAALTTTRRKAAPRSGTKRSPRGVGKRDGPCAPTNPSNPTLHPDSSPRSFTSVIRTAASPTYAAVTAGATVVTAAPPGDQTTLNTILRALSTSPCSPPTTFGEQEGVRGCSVVSCVAPATLTTTTVTTTVSGGSIMTSRPLAGGERGAKRAWPVPAIPSLPPIEEVTVSPGPARAVSNPSPPTIEEREEEGGEEEDDSPLPWMSAASRRRRRRQRALSSSPTSPSVSLPLSRSPNPETSLQRTTPTRRPSAEDVRTPEPPRRPPARAQRPLTPPPAPAAPRALRGATTITITATTTTTAAPRVRNQPPPSRQQRRGAQRGTTAGDGRNSRSGSSRAPGDAARVDRSRDLRDLLFRMGGYASRFRSMGGNNPGRSNQGGSTTGATVPAGRTNAPSGVVRVPTTPQLTRDSEHRRPTPVDQPNPRPRASLRREQAALATERGLLIDLAEAVDNLQDLEEVATQIAAFFKRFGSQPAGVGGRTGGRPTTNARERGRVVNTPVTGPSGRHEGATPRGTDQVREATRIQRLFRQNRRRAVQEVLMGAPAQCQVPKDQVTEHFRNMYSPASTPPASGPLGFPSEAPTASSDAALVQPFGVSEVDRRLRRMSNSAPGPDGLSYRDLRKADPSCSILTALFNMIRRLESVPSSWKSSNTVLIHKKGDRMDLSNWRPLAMSDTTPKLFAAVLADRLVSWALQNGRLSPQQKGFLPCEGCYEHNYTLQEILNGARRGRSQVVVAWLDLSNAFGSIPHSTIYHAFAEAQVPLPFRNIVEGLYDGCTTRVRTSQGFTDPVPILSGVKQGCPLSPVAFNLALEPVLRAASGTSVGYTLHGRRYNILAYADDLVLIADTPGGMDTLLNTVEAAAGGVGLRFNPAKCATLHQDSRGSRRAVPTCFSLQGQGLKSLAAGVPYEHLGVPTGFQVKQTPLLSIEELIRDLHAVDRSLLAPWQKCETVGSFILPRLDFLLRGAHVEKGPLKTADKLVRKLAKSWLNLPERASAEVVYLPPSRGGCGLLPLADLADALVIGHAFRLLTTPDPAISGLARDSLREAVARKIGRTPTDQDLATYLSGSLEGEFARTSWDFSTLWSRARNAARRSSESLQLRWEWCAARQELGIRLRGSRGRTTVVTPVARSQVLHRLRSAVTEYYSHRLDSKPDQGKVFGVSSRTKVSNHFLRGGSFTRFADWRFVHRARLNVLPLNGARRWGEGDKRCRRCGENLETLPHVICHCRPHSAAWQLRHDAVVSRIARACRLPGTLRVNQRVEGLTDDLEALRPDIVVRHEPSKSVVIIDVTVTFENGIEAFHAARERKISKYLPIGAALEEQGYRVVTDAIVVGALGSWDRANEPVLKLLRIGKKYAGLMRRLVVSETIRWGRDIYVEHVSGVRQYAAAPAAVPPADLALPPPAVMVTPPLAPPPRTDVNCFAPRNNTCDAPTGHEALILTQGSSSPA

SEQ ID NO: 276 - protein, 2009 aa, Lasioglossum morio
MAGPSNSPLTIYIEFPFPGDFRCPECFGKPGIKLSGVYKTHNDLVKHAKKHHPGHIVIHRCGVCGEHGTGSFPLRYVKAHHLAAHTDGPRPNRCGRGGAYVIPLTTAAPTTVRSSLSTTSTNFSGRGRPESILRDASGAGTTIVTTTSTTTPTTTTPTTTTTADGLRPAATTSPISGGAHIPPPSGPAAVPTTRTAATSTTSTNTTTTTSTTTRRTASSSLTQQRLPFGPSTAGRGATTGTKQTTKTRQTTLTTTTATSRARAVVATSRTSTTPPPSQATLRTRSATAAAPAASLRKSTTPPPPPAPTRTRTSATRTSTTPPPSTATTRTRTAAAAASKAPLRKSTTPPPPPPPTRRRTEAGRPSTTPPPSKATSGTKPAAAAAPRAPPRKSTTPPPPPATSRTRTATPPATVATSKLPSPPTTRTTATTTTKRGGATRRSDEVVSGSTPPGTRAAPAASRRAGPGAVQRTSPSLPTRKSTPSSPPTLSNSGPARRTRGSTVSPKTKAPPTSPRGPVTRSRGASVPVELESVKRRTAALTTTTTRRKAAPKPGTKRSPRGVGKREEACAPTNPSNPTLHPDSSPRLFTSVIRTAASPTYAAVTAGATVVTAAPPGDHNEGRRLRSMARASSLPPESSAAMPSSPPLTAILRALSASPCSPPTIHGEEEGARDGCVVPCVAPATLTTTTVTTTVSGGSIMTSRPLAGGGERGAKKAWPVPAIPSLPPIEEVTVSPGPARTASSPSPPTIEEREEEGGEEEDDSPLPWQSAASRRRRRRQRALSSSPSSPSFSMPLSRSPNPETSLQRTTPTRRPSAEDVRTPEPPRRPPARGQRPPTPPPAPAVTRATRGATTTNTITATTTTAAPRVRNQPPPSRQQRRGAQRGTTAGDGRNSRSGSSRAPGDAARVDRSRDLRDLLFRMGGYASRFRSMGGNNPGRSSQGGSTTGATVPAGQTSAPPGVVRVPTTPQLPRDSEHRRPTPVGQPNPRPRASLRREQAALATERGLLIDLAEAVDNLQDLEEVATQIAAFFKRFGSQPAGVGGRTGGRPTTNARERGRVVNTPVTGPSGRHEGVTPRGTDQVREATRIQRLFRQNRRRAVQEVLMGAPAQCQVPKDQVTEHFRNMYSPASTPPASGPLGFPSEAPTASSDAALVQPFGVSEVDRRLRRMSNSAPGPDGLSYRDLRKADPSCSILTAYFNMIRRLESVPSSWKSSNTVLIHKKGDRMDLSNWRPLAMSDTTPKLFAAVLADRLVSWALQNGRLSPQQKGFLPCEGCYEHNYTLQEILNDARRGKSQVVVAWLDLSNAFGSIPHSTIYHAFAEAQVPLPFRNIVEGLYDGCTTRVRTSQGFTDPVPILSGVKQGCPLSPVAFNLALEPVLRAASGTSVGYTLHGRRYNILAYADDLVLIADTPGGMDTLLSTVEAAAGGVGLRFNPAKCATLHQDSRGSRRAVPTCFSLQGQGLKSLAAGVPYEHLGVPTGFQVKQTPLLSIEELIRDLHAVDRSLLAPWQKCETVGSFILPRLDFLLRGAHVEKGPLKLADKLVRKLAKSWLNLPERASAEVVYLPPSRGGCGLLPLADLADALVIGHAFRLLTTPDPAISGLARDSLREAVARKIGRTPTDQDLATYLSGSLEGEFARTSWDFSTLWSRARNAARRSSESLQLRWEWCAARQELGIRLRGSRGRTTVVTPVARSQVLHRLRSAVTEFYSHRLVSKPDQGKVFGVSSRTKVSNHFLRGGSFTRFADWRFVHRARLNVLPLNGARRWGEGDKRCRRCGENLETLPHVICHCRPHSAAWQLRHDAVVSRIARACRLPGTLRVNQRVEGLTDDLEALRPDIVVRHEPSKSVVIIDVTVTFENGIEAFHAARERKIMKYLPIGAALEEQGYRVVTDAIVVGALGSWDQANEPVLKLLRIGKKYAGLMRRLIVSETIRWGRDIYVEHVSGVRQYAAAPAVVPPVDTTLPPPAVIVASPLALLPRTSENNIAPRNITCDIDIGHAARTMTQGPSGPV

SEQ ID NO: 277 - protein, 2001 aa, Lasioglossum morio
MAGPTSSPITIYIEFPFPGDFRCPECFGKPGIKLSGVYKTHNDLIKHAKKHHPGHIVIHRCGVCGEHGTGAFPLRYVKAHHTAAHTDRPRPNRCGRGGAYVIPLTTAAPTTVRSSLSTTSTNFSGRGRPESILRSANGAGPTVVPTIATTTTATTTTTTTTASGLRPPAVTTATSGGAPPPSTSPAAAPTTRAAATSTTTTTSTTTTRPTSSSLRQQRLPFGPATAGRGATTGTVTVTRTRQTPPTTATATSRAKAVVATSRTSTTPPPSSATSRAGPATGAAPTASLRKSTTPPPPPATTRTRTTASRTSTTPPPSMATARTRTATAAASKASVRKSTTPPPPPPPTRRKTAAARTSTTPPPSSATSRAKQAAAAAPRAPLRKSTTPPPPPAPTRRKTATTAAKVATRELPSPPTTTATATTTTRRGGVTGKSLETVSGSTPPGPRAAPAANKRAGSGAVQRASPSPPTRRSTPSSPPTQSNSGPARRTRGSTVSPRTKAPPTSPRGPTTRSRGASVPVELESVKRRTAALNTTRRKAAPTSGSKRTPRGVGKRDGPCAPTNHSNPTLHPDSSPRLFTSVIRTAASPTYAAVTAGATVVTAAPPGDQTDVRRLRSMTRASSLPPESPIATPSSPTLNTILRALSTSPCSPPTTFGEQEGARGCCVVSCVALATLTTTTVTTTVSGGSIMTSRPLAGGGERGAKRAWPVPAIPSLPPIEEVTVSPGPARTASSPSPPTIEEREEEGGEEDDSPLPWQSAASRRRRRQLRVLSLSPTSPSVSLPPSRSSYPETSPQEARTSPRRPSTEDVRTPEPQRRPPARAQRPPTPPPAPAATRASRGATSTTTITATTTTTAAPRVRDQPPSSRQQRRGAQRGTTAGDGRSSRPVSSRAPGGAARVDRSRDLRDMLFRLGGFASRFRTMGGNNPGRSSQGGSTTGATVPAGRTNAPPGVVRVPTTPQLPRDSGHRRPTPVDQPNPRPRASLRREQAALATERGLLIDLAEAVDNLQDLEEVATQIAAFFKRFGSQPAGVGGRTGGRPTTNARERGRVVNTPVTGPSGRHEGVTPRGTDQVREATRIQRLFRQNRRRAVQEVLMGAPAQCQVPKDQVTEHFRNMYSPASTPPASGPLGFPSEAPTASSDAALVQPFGVSEVDRRLRRMSNSAPGPDGLSYRDLRKADPSCSILTAYFNLIRRLESVPSSWKSSNTVLIHKKGDRMDLSNWRPLAMSDTTPKLFAAVLADRLVSWALQNGRLSPQQKGFLPCEGCYEHNYTLQEILNDARRGRSQVVVAWLDLSNAFGSIPHSTIYHAFAEAQVPLPFRNIVEGLYDGCTTRVRTSQGFTDPVPILSGVKQGCPLSPVAFNLALEPVLRAASGTSVGYTLHGRRYNILAYADDLVLIADTPGGMETLLNTVEAAAGGVGLRFNPAKCATLHQDSRGSRRAVPTCFSLQGQGLKSLAAGVPYEHLGVPTGFQVKQTPLLSIEELIRDLHAVDRSLLAPWQKCETVGSFILPRLDFLLRGAHVEKGPLKLADKLVRKLAKSWLNLPERASAEVVYLPPSRGGCGLLPLADLADALVIGHAFRLLTTPDPAISGLARDSLREAVARKIGRPPTDQDLATYLSGSLEGEFARTSWDFSTLWSRARNAARRSSESLQLRWEWCAARQELGLRLRGSRGRTTVVTPVARSQVLHRLRSAVTEFYSHRLVSKPDQGKVFGVSSRTKVSNHFLRGGSFTRFADWRFVHRARLNVLPLNGARRWGEDDKRCRRCGENLETLPHVICHCRPHSAAWQLRHDAVVSRIARACRLPGTLRVNQRVEGLTDDLEALRPDIVVRHEPSKSVVIIDVTVTFENGIEAFHAARERKIMKYLPIGAALEEQGYRVVTDAIVVGALGSWDQDNESVLKLLRIGKKYAGLMRRLIVSETIRWGRDIYVEHVSGVRQYAAAPVAVPSVDVTLPPPAVNVASPLALLPRTSESNIAPRNHIVDEAIGHEAHTLTQGPSGPV

SEQ ID NO: 278 - protein, 1999 aa, Lasioglossum morio
MAGPSTCPITIYIEFPFPGDFRCPECYGKPGTRTSGVYKTHNDLVKHAKKCHPGHVVVHRCGVCGEHGTGAFPLRYVKAHHLAAHTDGPRPSRCGRGGAYVIPLTTAAPTTVRSSLSTNSTNSSGRGRPESILRSANGAGPTVVPTIATTTTATTTTTTTTASGLRPPVVTTATSGGAPPPSTSPAAAPTTRAAATSTTTTTSTTTTRPTSSSLRQQRLPFGPATAGRGATTGTVTVTRTRQTPPTTATATSRAKAVVATSRTSTTPPPSSATSRAGPATGAAPTASLRKSTTPPPPPATTRTRTTASRTSTTPPPSTATAKTRTATAAASKASVRKSTTPPPPPPPTRRKTAAARTSTTPPPSSATSRAKQAAAAAPRAPLRKSTTPPPPPATSRTRKATTAAKGATRELPSPPTTTATATTTTRRGGVTGKSLETVSGSTPPGSRAAPAANKRAGSGAVQRASPSPPTRRSTPSSPPTQSNSGPARRTRGSTVSPRTKAPPTSPRGPITRSRGASVPVELESVKRRTAALNTTRRKAAPTSGSKRSPRGVGKRDGPCAPTNHSNPTLHPDSSPRLFTSVIRTAASPTYAAVTAGATVVTAAPPGGQTEVRRLRSMTRASSLPPESPIATPSSPTLNTILRALSTSPCSPPTTFGEQEGARGCCVVSCVALATLTTTTVTTTVSGGSIMTSRPLAGGGERGAKRAWPVPAIPSLPPIEEVTVPPGPARTASSPSPPTIEEREEEGGEEDDSPLPWQSAASRRRRRQLRVLSLSPTSPSVSLPPSRSSYPETSPQEARTSPRRPSTEDVRTPEPIRRTPARAQRPHTPPPAPDANRATRGVTTTSITANTTTAAPRVRNQPPPSRQQRRGAQRGTTAGDGRSSRPVSSRAPEDAARVDRSRDLRDLLFRMGGYASRFRSMGGNNPGRLNQSGSATGATVPAGRTNAPSGVVRVPTTPQLPRDSGHRRPTPVGQPNPRPRASLRREQAALATERGLLIDLAEAVDNPQDLEEVATQIAAFFKRFGSQPAGVGGRTGGRPTTNAGRRGRVVNTPVTGPSERHEGVTPRRTDQVREATRIQRLFRQNRRRAVQEVLMGAPAQCQVPKDQVLEHFRNMYSPASTPTAAGPLGFPSEAPTAASDAALVESFGVSEVDRRLRRMSNSAPGPDGLSYRDLRKADPSCGILTAYFNMVRRLESVPSSWKSSNTVLIHKKGDRMDLSNWRPLAMSDTTPKLFAAVLADRLVSWALHNGRLSPQQKGFLPCEGCYEHNYTLQEILNDARRGKSQVVVAWLDLSNAFGSIPHSTIYHAFAEAQVPLPFRNIVEGLYDGCTTRVRTSQGFTDPVPILSGVKQGCPLSPVAFNLALEPVLRAASGTSVGYTLHGRRYNILAYADDLVLIADTPGGMETLLNTVEAAAGGVGLRFNPAKCATLHQDSRGSRRAVPTCFSLQGQGLKSLAAGVPYEHLGVPTGFQVKQTPLLSIEELIRDLHAVDRSLLAPWQKCETVGSFILPRLDFLLRGAHVEKGPLKVADKLVRKLAKSWLNLPERASAEVVYLPPSRGGCGLLPLADLADALVIGHAYRLLTAPDPAISGLARDSLREAVARKIGRPPTDLDLATYLSGSLEGEFARTSWDFSTLWSRARNAARRSSNSLQLRWEWCAERQELGIRLRGSRGRTTVVTPVARSQVLHRLRSAVTEFYSHRLGSKPDQGKVFGVSSRTKVSNHFLRGGSFTRFADWRFIHRARLDVLPLNGARRWGEGDKRCRRCGENMETLPHVLCHCRPHSAAWQLRHDAVVSRIARACRLPGTLRVNQRVEGLTGDLEALRPDIVVRHEPSKSVVIIDVTVTFENGIEAFHAARGRKISKYLPIGAALEEQGYRVVTDAIVVGALGSWDQDNESVLKLLRIGKKYAGLMRRLIVSETIRWGRDIYVEHVSGVRQYAAAPAAVPSVDVTLPPPAVNVVSPLALLPRTSESTIAPRNHIVDEAIGHEAHTWTQGPSDPV

SEQ ID NO: 279 - protein, 1953 aa, Lasioglossum morio
MAGPTTSPITIVIEFPLAAEFRCPECYGKPGVRTSGVYKTHNDLVKHAKKSHPGHIVVHRCGVCGEHGTGAFPLRYVKAHHLAAHTDRPRPSRSGRGGAYVIPLTTASTTTARSSLSTTGTNSSGRGRPESLSSCATGAGLTVVPTIATTTMATTTTTTTTTGLRPTATTTVIPGGAPRPSKSPAAAPTTRAAATRTTTTTTSTTTTRPSSSSLRQQKLSFGPAAAGRGATTGTVTATETRQTPPPTATATSRAKAVVATSRTSTTPPPPRTMTRTRSATAVASRASVRKSTTPPPPPAPPKRTAAASRPSTTPPPPRTMTRTRSATALASRASIRKSTTPPPPPAPPKKGITAAARVATKNLPSPPTTTTRTTPTTTTTKRGGVTGTVPGTSTSGSGAAPAAIRRSGSGAVQRSSPSPPVRKTTSSSPPTLSPSGPARRTRGSTVSPKTKAPTTSPRGPITRSRGASVPVELECVKRRTAALKDIRRKAAPKPGSKRSPGGVGKRGAPSSAPTTSPNPPHHQSSRPRLFTSVTRTAASPSYAAVTAGATVVSATPPGDQGAVRRQRSTTPISPESPAATPSSQALTTILRALSTSPCSPPTTAGDQEGVRGCCAVSCVAIATLTTTTVTTTVSGGPIMTSRPLAGGVERGSKRTRQEPAVLSLPPIAEVTVSPGPAWTARSPSPPTIEEREEVEREEEEDDSPLPWQSAASRRRRRRQLLSLSLSPVTPPSSSVPPSRSSIPETSPQRTTPPRRPPAGDIRTPELHRRPPARPQRPPTPPPAPEASRAMRRVNDTTITAATATRAPRTGAQPPPSLQPRRSAQRGTTTGGEDNTRRVSSRAPGGAARVDRSRDLRDMLFRMGGFASRFRSMGGNNPGRSNQGDSTTGATVPVGRTNAPPGVVRVPATPQLPRDSEHRRPTPVGQPNPRPRASLRREQAALATERGLLIDLAEAVDNPQDLEEVATQIAAFFKRFGSQPAGVGGRTGGRPTTNARERGRVVNTPVTGPSGRHEGVTPRGTDQVREATRIQRLFRQNRRRAVQEVLMGAPAQCQVPKDQVTEHFRNMYSPASTPPASGPLGFPSEAPTAASDAALVEPFGVSEIDRRLRRMSNSAPGPDGLSYRDLRKADPSCGILTAYFNMVRRLESVPSSWKSSNTVLIHKKGDRMDLSNWRPLAMSDTTPKLFAAVLADRLVSWALHNGRLSPQQKGFLPCEGCYEHNYTLQEILNDARRGRSQVVVAWLDLSNAFGSIPHPTIYHAFAEAQVPLPFRNIVEGLYDGCTTRVRTSQGFTDPVPIRSGVKQGCPLSPVAFNLALEPVLRAASGTSVGYTLHGRRYNILAYADDLVLIADTPGGMDTLLSTVEAAAGGVGLRFNPAKCATLHQDSRGSRRAVPTCFSLQGQGLKSLAAGVPYEHLGVPTGFQVKQTPLLSIEELIRDLHAVDRSLLAPWQKCETVGSFILPRLDFLLRGAHVEKGPLKLADKLVRKLAKSWLNLPERASAEVVYLPPSRGGCGLLPLADLADALVIGHAFRLLTTPDPAISGLARDSLREAVARKIGRTPTDQDLATYLSGSLEGEFARTSWDFSTLWSRARNAARRSSESLQLRWEWCAARQELGIRLRGSRGRTTVVTPVARSQVLHRLRSAVTEYYSHRLDSKPDQGKVFGVSSRTRVSNHFLRGGSFTRFADWRFVHRARLNVLPLNGARRWGEGDKRCRRCGENLETLPHVMCHCRPHSAAWQLRHDAVVSRIARACRLPGTLRVNQRVEGLTGDLEALRPDIVVRHEPSKSVVIIDVTVTFENGIEAFHAARERKISKYLPIGAVLEEQGYRVVTDAIVVGALGSWDQANEPVLKLLRIGKKYAGLMRRLIVSETIRWGRDIYVEHVSGVRQYAAAPAAVPPVDATPPPPAVMVTPPLAPPPRADSVAPRTANSNIRDTTTMGHEAPVMTQGPSGPV

SEQ ID NO: 280 - protein, 1952 aa, Lasioglossum morio
MAGPTTSPITIVIEFPLAAEFRCPECYGKPGVRTSGVYKTHNDLVKHAKKSHPGHIVVHRCGVCGEHGTGAFPLRYVKAHHLAAHTDRPRPSRSGRGGAYVIPLTTASTTTARSSLSTTGTNSSGRGRPESYSSCATGAGLTVVPTIATTTTATTTTTTTTTGLRPTATTTFISGGAPRPPKSPAAAPTTRAAATRTTITTTSTTTTRPSSSSLRQQKLSFGPAATGRGATTRTVTATETRQTPPPTATATSRAKAVVATSRTSITPPPPRTMTRTRSATALAPRASVRKSTTPPPPPAPPKRTAAASRPSTTPPPPRTMTRTRSATALASRASIRKSTTPPPPPAPPKKGITAAARVATKNLPSPPTTTTRTTPTTTTTKRGGATGTVPGTSTSGSGAAPAAIRRSGSGAVQRSSPSPPVRKSTSSSPPTLSPSGPARRTRGSTVSPKTKAPTTSPRGPITRSRGASVPVELECVKRRTAALKDIRRKAAPKPGSKRSPGGVGKRGAPSSAPTTSPNPPHHQSSRPRLFTSVTRTAASPSYAAVTAGATVVSATPPGDQGAVRRQRSTTPISPESPAATPSSQALTTILRALSTSPCSPPTTTGDQEGVRGCCAVSCVAIATLTTTTVTTTVSGGPIMTSRPLAGGVERGSKRTRQEPAVLSLPPIAEVTVSPGPAWTARSPSPPTIEEREEVEREEEEDDSPLPWQSAASRRRRRRQLLSLSLSPVTPPSSSVPPSRSSIPETSPQRTTPPRRPPAGDIRTPELHRRPPARPQRPPTPPPAPEASRAMRRVNDTTITAATTTQAPRTGAQPPPSLQPRRSAQRGTTAGGEDNTRRVSSRAPGGAARVDRSRDLRDMLFRMGGFASRFRSMGGNNPGRSNQGGSTTGATVPAGRTNAPSGVVRVPTTPQLPRDSEHRRPTPVDQPNPRPRASLRREQAALATERGLLIDLAEAVDNTQDLEEVATQIAAFFKRFGSQSAGVGGRTGGRPTTNARERGRVVNTPVTGPSGRHEGVTPRETDQVREATRIQRLFRQNRRRAVQEVLMGAPAQCQVPKDQVTEHFRNMYSPASTPPASGPLGFPSEAPTASSDAALVQPFGVSEIDRRLRRMSNSAPGPDGLSYRDLRKADPSCSILTALFNMIRRLESVPSSWKSSNTVLIHKKGDRMDLSNWRPLAMSDTTPKLFAAVLADRLVSWALHNGRLSPQQKGFLPCEGCYEHNYTLQEILNDARRGRSQVVVAWLDLSNAFGSIPHSTIYHAFAEAQVPLPFRNIVEGLYDGCTTRVRTSQGFTDPVPILSGVKQGCPLSPVAFNLALEPVLRAASGTSVGYTLHGRRYNILAYADDLVLIADTPGGMDTLLSTVEAAAGGVGLRFNPAKCATLHQDSRGSRRAVPTCFSLQGQGLKSLAAGVPYEHLGVPTGFQVKQTPLLSIEELIRDLHAVDRSLLAPWQKCETVGSFILPRLDFLLRGAHVEKGPLKTADKLVRKLAKSWLNLPERASAEVVYLPPSRGGCGLLPLADLADALVIGHAFRLLTTPDPAISGLARDSLREAVARKIGRTPTDQDLATYLSGSLEGEFARTSWDFSTLWSRARNAARRSSESLQLRWEWCAARQELGIRLRGSRGRTTVVTPVARSQVLHRLRSAVTEYYSHRLDSKPDQGKVFGVSSRTRVSNHFLRGGSFTRFADWRFVHRARLNVLPLNGARRWGEGDKRCRRCGENLETLPHVMCHCRPHSAAWQLRHDAVVSRIARACRLPGTLRVNQRVEGLTGDLEALRPDIVVRHEPSKSVVIIDVTVTFENGIEAFHAARERKISKYLPIGAVLEEQGYRVVTDAIVVGALGSWDQANEPVLKLLRIGKKYAGLMRRLIVSETIRWARDIYVEHVSGVRQYAAAPAAVPPVDATPPPPAVMVTPPMAPPPRADSVAPRTTNSDRRDNTMGHEALILTQGSSSPV

SEQ ID NO: 281 - protein, 2010 aa, Lasioglossum morio
MAGPSNSPLTIYIEFPFPGDFRCPECFGKPGIKLSGVYKTHNDLVKHAKKHHPGHIVIHRCGVCGEHGTGSFPLRYVKAHHLAAHTDGPRPNRCGRGGAYVIPLTTAAPTTVRSSLSTTSTNFSGRGRPESILRDASGAGTTIVTTTSTTTPTTTTPTTTTTADGLRPAATTSPISGGAHIPPPSGPAAVPTTRTAATSTTSTNTTTTTSTTTRRTASSSLTQQRLPFGPSTAGRGATTGTKQTTKTRQTTLTTTTATSRARAVVATSRTSTTPPPSQATLRTRSATAAAPAASLRKSTTPPPTPAPTRTRTSATRTSTTPPPSTATTRTRTAAAAASKAPLRKSTTPPPPPPPTRRRTEAGRPSTTPPPSKATSGTKPAAAAAPRAPPRKSTTPPPPPATSRTRTATPPATVATSKLPSPPTTRTTATTTTKRGGATRRSDEVVSGSPPSGTRAAPAANRRAGPGAVQRTSPSLPTRKSTPSSPPTLSNSGPARRTRGSTVSPKTKAPPTSPRGPVTRSRGASVPVELESVKRRTAALTTTTTRRKAAPKPGTKRSPRGVGKRDGPCAPTNPSNPTLHPDSSPRLFTSVIRTAASPTYAAVTAGATVVTAAPPGDHTEGRRLRSMSRASSLPPESSTAMPSSPPLTAILRALSTSPCSPPTIHGEEEGARDGCVVPCVAPATLTTTTVTTTVSGGSIMTSRPLAGGERGAKRAWPVPAIPSLPPIEEVTVTPGPARAASSPSPPAIEEREEEGGEEEDDSPLPWQSAASRRRRRRQRALSSSPSSPSFSLPLSRSSIPETSPQDRTTPTRRPSAENVRTPEPQRRPPARAQRPPTPPPAPAATRASRGATTTTITATTTTTAAPRVRDQPPSSRQQRRGAQRGTTAGDGRSSRPVSSRAPGDAARVDRSRDLRELLFRMGGYASRFRSMGGNNPGRPNQSGSTTGATVPAGRTNAPPGVVRVPTTPQLPRDSGHRRPTPVDQPNPRPRASLRREQAALATERGLLIDLAEAVDNTQDLEEVATQIAAFFKRFGSQPAGVGGRTGGRPTTNARERGRVVNTPVTGPSGRHEGVTPRGTDQVREATRIQRLFRQNRRRAVQEVLMGAPAQCQVPKDQVTEHFRNMYSPASTPPASGPLGFPSEAPTASSDAALVQPFGVSEVDRRLRRMSNSAPGPDGLSYRDLRKADPSCSILTAYFNMIRRLESVPSSWKSSNTVLIHKKGDRMDLSNWRPLAMSDTTPKLFAAVLADRLVSWALHNGRLSPQQKGFLPCEGCYEHNYTLQEILNDARRGRSQVVVAWLDLSNAFGSIPHSTIYHAFAEAQVPLPFRNIVEGLYDGCTTRVRTSQGFTDPVPILSGVKQGCPLSPVAFNLALEPVLRAASGTSVGYTLHGRRYNILAYADDLVLIADTPGGMDTLLSTVEAAAGGVGLRFNPAKCATLHQDSRGSRRAVPTCFSLQGQALKSLAAGVPYEHLGVPTGFQVKQTPLLSIEELIRDLHAVDRSLLAPWQKCETVGSFILPRLDFLLRGAHVEKGPLKVADKLVRKLAKSWLNLPERASAEVVYLPPSRGGCGLLPLADLADALVIGHAYRLLTAPDPAISGLARDSLREAVARKIGRPPTDLDLATYLSGSLEGEFARTSWDFSTLWSRARNAARRSSNSLQLRWEWCAERQELGIRLRGSRGRTTVVTPVARSQVLHRLRSAVTEFYSHRLGSKPDQGKVFGVSSRTKVSNHFLRGGSFTRFADWRFIHRARLDVLPLNGARRWGEGDKRCRRCGENMETLPHVLCHCRPHSAAWQLRHDAVVSRIARACRLPGTLKVNQRVEGLTGDLEALRPDIVVRHEPSKSVVIIDVTVTFENGIEAFHAARGRKISKYLPIGAALEEQGYRVVTDAIVVGALGSWDQDNESVLKLLRIGKKYAGLMRRLIVSETIRWGRDIYVEHVSGVRQYAAAPAAVPPVDSTLPPPAVNVASPLAPLPRTDENCFAPREYIDSVTDIGHAARTMTQGPSGPV

SEQ ID NO: 282 - protein, 1216 aa, Lasioglossum morio
MPLSRSPNPETSLQRTTPTRRPSAEDVRTPEPPRRPPARGQRPPTPPPAPAVTRATRGATTTNTITATTTTAAPRVRNQPPPSRQQRRGAQRGTTAGDGRNSRSGSSRAPGDAARVDRSRDLRDLLFRMGGYASRFRSMGGNNPGRSNQGGSTTGATVPAGQTNAPPGVVRVPTTPQLPRDSEHRRPTPVGQPNPRPRASLRREQAALATERGLLIDLAEAVDNLQDLEEVATQIAAFFKRFGSQPAGVGGRTGGRPTTNARERGRVVNTPVTGPSGRHEGVTPRGTDQVREATRIQRLFRQNRRRAVQEVLMGAPAQCQVPKDQVTEHFRNMYSPASTPPASGPLGFPSEAPTASSDAALVQPFGVSEVDRRLRRMSNSAPGPDGLSYRDLRKADPSCSILTAYFNMIRRLESVPSSWKSSNTVLIHKKGDRMDLSNWRPLAMSDTTPKLFAAVLADRLVSWALHNGRLSPQQKGFLPCEGCYEHNYTLQEILNDARRGKSQVVVAWLDLSNAFGSIPHSTIYHAFAEAQVPLPFRNIVEGLYDGCTTRVRTSQGFTDPVPILSGVKQGCPLSPVAFNLALEPVLRAASGTSVGYTLHGRRYNILAYADDLVLIADTPGGMDTLLSTVEAAAGGVGLRFNPAKCATLHQDSRGSRRAVPTCFSLQGQGLKSLAAGAPYEHLGVPTGFQVKQTPLLSIEELIRDLHAVDRSLLAPWQKCETVGSFILPRLDFLLRGAHVEKGPLKVADKLVRKLAKSWLNLPERASAEVVYLPPSRGGCGLLPLADLADALVIGHAYRLLTAPDPAISGLARDSLREAVARKIGRPPTDLDLATYLSGSLEGEFARTSWDFSTLWSRARNAARRSSESLQLRWEWCAARQELGIRLRGSRGRTTVVTPVARSQVLHRLRSAVTEFYSHRLVSKPDQGKVFGVSSRTRVSNHFLRGGSFTRFADWRFVHRARLNVLPLNGARRWGEGDKRCRRCGENLETLPHVICHCRPHSAAWQLRHDAVVSRIARACRLPGTLRVNQRVEGLTDDLEALRPDIVVRHEPSKSVVIIDVTVTFENGIEAFHAARGRKISKYLPIGAALEEQGYRVVTDAIVVGALGSWDQANEPVLKLLRIGKKYAGLMRRLIVSETIRWGRDIYVEHVSGVRQYAAAPAAVPPVDATFPPPAVTVTPLLAPLPRVIESIAPRTNSDNDIGHAAHTLTQGPSGPI

SEQ ID NO: 283 - protein, 1999 aa, Lasioglossum morio
MAGPSTCPITIYIEFPFPGDFRCPECYGKPGTRTSGVYKTHNDLVKHAKKCHPGHVVVHRCGVCGEHGTGAFPLRYVKAHHLAAHTDGPRPSRCGRGGAYVIPLTTAAPTTVRSSLSTNSTNSSGRGRPESILRSANGAGPTVVPTIATTTTATTTTTTTTASGLRPPVVTTATSGGAPPPSTSPAAAPTTRAAATSTTTTTSTTTTRPTSSSLRQQRLPFGPATAGRGATTGTVTVTRTRQTPPTTATATSRAKAVVATSRTSTTPPPSSATSRAGPATGAAPAASLRKSTTPPPPPATTRTRTTASRTSTTPPPSTATARTRTATAAASRASVRKSTTPPPPPPPTRRKTAAARTSTTPPPSSATSRAKQAAAAAPGAPLRKSATPPPPPATSRTRKATTAAKVATRELPSPPTTTATATTTTRRGGVTGKSLETVSGSTPPGSRAAPAANKRAGSGAVQRASPSPPTRRSTPSSPPTQSNSGPARRTRGSTVSPRTKAPPTSPRGPITRSRGASVPVELESVKRRTAALNTTRRKAAPTSGSKRSPRGVGKRDGPCAPTNHSNPTLHPDSSPRLFTSVIRTAASPTYAAVTAGATVVTAAPPGGQTEVRRLRSMTRASSLPPESPIATPSSPTLNTILRALSTSPCSPPTTFGEQEGARGCCVVSCVALATLTTTTVTTTVSGGSIMTSRPLAGGGERGAKRAWPVPAIPSLPPIEEVTVSPGPARTASSPSPPTIEEREEEGGEEDDSPLPWQSAASRRRRRQLRVLSLSPTSPSVSLPPSRSSYPETSPQEARTSPRRPSTEDVRTPEPIRRTPARAQRPHTPPPAPDANRATRGVTTTSITANTTTAAPRVRNQPPPSRQQRRGAQRGTTAGDGRSSRPVSSRAPEDAARVDRSRDLRDLLFRMGGYASRFRSMGGNNPGRLNQSGSATGATVPAGRTNAPSGVVRVPTTPQLPRDSGHRRPTPVGQPNPRPRASLRREQAALATERGLLIDLAEAVDNPQDLEEVATQIAAFFKRFGSQPAGVGGRTGGRPTTNAGRRGRVVNTPVTGPSERHEGVTPRRTDQVREATRIQRLFRQNRRRAVQEVLMGAPAQCQVPKDQVLEHFRNMYSPASTPTAAGPLGFPSEAPTAASDAALVEPFGVSEVDRRLRRMSNSAPGPDGLSYRDLRKADPSCGILTAYFNMVRRLESVPSSWKSSNTVLIHKKGDRMDLSNWRPLAMSDTTPKLFAAVLADRLVSWALHNGRLSPQQKGFLPCEGCYEHNYTLQEILSDARRGKSQVVVAWLDLSNAFGSIPHSTIYHAFAEAQVPLPFRNIVEGLYDGCTTRVRTSQGFTDPVPILSGVKQGCPLSPVAFNLALEPVLRAASGTSVGYTLHGRRYNILAYADDLVLIADTPGGMETLLNTVEAAAGGVGLRFNPAKCATLHQDSRGSRRAVPTCFSLQGQGLKSLAAGVPYEHLGVPTGFQVKQTPLLSIEELIRDLHAVDRSLLAPWQKCETVGSFILPRLDFLLRGAHVEKGPLKVADKLVRKLAKSWLNLPERASAEVVYLPPSRGGCGLLPLADLADALVIGHAYRLLTAPDPAISGLARDSLREAVARKIGRPPTDLDLATYLSGSLEGEFARTSWDFSTLWSRARNAARRSSNSLQLRWEWCAERQELGIRLRGSRGRTTVVTPVARSQVLHRLRSAVTEFYSHRLGSKPDQGKVFGVSSRTKVSNHFLRGGSFTRFADWRFIHRARLDVLPLNGARRWGEGDKRCRRCGENMETLPHVLCHCRPHSAAWQLRHDAVVSRIARACRLPGTLRVNQRVEGLTGDLEALRPDIVVRHEPSKSVVIIDVTVTFENGIEAFHAARGRKISKYLPIGAALEEQGYRVVTDAIVVGALGSWDQDNESVLKLLRIGKKYAGLMRRLIVSETIRWGRDIYVEHVSGVRQYAAAPAAVPSVDVTLPPPAVNVVSPLALLPRTSESTIAPRNHIVDEAIGHEAHTWTQGPSDPV

SEQ ID NO: 284 - protein, 1383 aa, Lasioglossum morio
MTRASSLPPESPIATPSSPTLNIILRALSTSPCSPPTTFGEQEGARGCCVVSCVALATLTTTTVTTTVSGGPIMTSRPLAGGGERGAKRAWPVPAIPSLPPIEEVTVSPGPARTASSPSPPAIEEREEEGGEEDDSPLPWQSAASRRRRRQLRVLSLSPTSPSVSLPPSRSSYPETSPQEARTSPRRPSTEDVRTPEPIRRTPARAQRPHTPPPAPDANRATRGVTTTIITATTTTAAPRVRNQPPPSRQQRRGAQRGTTAGDGRNSRSGSSRAPGDAARVDRSRDLRDLLFRMGGYASRFRSMGGNNPGRSNQGGSTTGATVPAGQTNAPPGVVRVPTTPQLPRDSEHRRPTPVGQPNPRPRASLRREQAALATERGLLIDLAEAVDNLQDLEEVATQIAAFFKRFGSQPAGVGGRTGGRPTTNARERGRVVNTPVTGPSGRHEGVTPRGTDQVREATRIQRLFRQNRRRAVQEVLMGAPAQCQVPKDQVTEHFRNMYSPASTPPASGPLGFPSEAPTASSDAALVQPFGVSEVDRRLRRMSNSAPGPDGLSYRDLRKADPSCSILTAYFNMIRRLESVPSSWKSSNTVLIHKKGDRMDLSNWRPLAMSDTTPKLFAAVLADRLVSWALQNGRLSPQQKGFLPCEGCYEHNYTLQEILNDARRGKSQVVVAWLDLSNAFGSIPHSTIYHAFAEAQVPLPFRNIVEGLYDGCTTRVRTSQGFTDPVPILSGVKQGCPLSPLAFNLALEPVLRAASGTSVGYTLHGRRYNILAYADDLVLIADTPGGMDTLLSTVEAAAGGVGLRFNPAKCATLHQDSRGSRRAVPTCFSLQGQGLKSLAAGVPYEHLGVPTGFQVKQTPLLSIEELIRDLHAVDRSLLAPWQKCETVGSFILPRLDFLLRGAHVEKGPLKLADKLVRKLAKSWLNLPERASAEVVYLPPSRGGCGLLPLADLADALVIGHAFRLLTTPDPAISGLARDSLREAVARKIGRTPTDQDLATYLSGSLEGEFARTSWDFSTLWSRARNAARRSSESLQLRWEWCAARQELGIRLRGSRGRTTVVTPVARSQVLHRLRSAVTEFYSHRLVSKPDQGKVFGVSSRTKVSNHFLRGGSFTRFADWRFVHRARLNVLPLNGARRWGEGDKRCRRCGENLETLPHVICHCRPHSAAWQLRHDAVVSRIARACRLPGTLRVNQRVEGLTDDLEALRPDIVVRHEPSKSVVIIDVTVTFENGIEAFHAARERKIMKYLPIGAALEEQGYRVVTDAIVVGALGSWDQANEPVLKLLRIGKKYAGLMRRLIVSETIRWGRDIYVEHVSGVRQYAAAPAVVPPVDTTLPPPAVIVASPLALLPRTSENNIAPRNITCDIDIGHAARTMTQGPSGPV

SEQ ID NO: 285 - protein, 2011 aa, Lasioglossum morio
MAGPSNSPLTIYIEFPFPGDFRCPECFGKPGIKLSGVYKTHNDLVKHAKKHHPGHIVIHRCGVCGEHGTGSFPLRYVKAHHLAAHTDGPRPNRCGRGGAYVIPLTTAAPTTVRSSLSTTSTNFSGRGRPESILRDASGAGTTIVTTTSTTTPTTTTPTTTTTADGLRPAATTSPISGGAHIPPPSGPAAVPTTRTAATSTTSTNTTTTTSTTTRRTASSSLTQQRLPFGPSTAGRGATTGTKQTTKTRQTTLTTTTATSRARAVVATSRTSTTPPPSQATLRTRSATAAAPAASLRKSTTPPPPPAPTRTRTSATRTSTTPPPSTATTRTRTAAAAASKAPLRKSTTPPPPPPPTRRRTEAGRPSTTPPPSKATSGTKPAAAAAPRAPPRKSTTPPPPPATSRTRTATPPATVATSKLPSPPTTTTRTTATTTTKRGGATRRSDEVVSGSTPPGTRAAPAASRRAGPGAVQRTSPSLPTRKSTPSSPPTLSNSGPARRTRGSTVSPKTKAPPTSPRGPVTRSRGASVPVELESVKRRTAALTTTTTRRKAAPKPGTKRSPRGVGKRDGPCAPTNPSNPTLHPDSSPRLFTSVIRTAASPTYAAVTAGATVVTAAPPGDHTEGRRLRSMSRASSLPPESSTAMPSSPPLTAILRALSTSPCSPPTIHGEEEGARDGCVVPCVAPATLTTTTVTTTVSGGSIMTSRPLAGGGERGAKKAWPVPAIPSLPSIEEVTVSPGPARTASSPSPPTIEEREEEGGEEEDDSPLPWQSAASRRRRRRQRALSSSPSSPSLSMPLSRSPNPETSLQRTTPTRRPSAEDVRTPEPPRRPPARAQRPSTPPPAPAAPRASRGATTTTITATTTTTAAPRTRVQPPSSRQQRRGAQRGTTAGDDRNPRSGSSRAPGDAARVDRSRDLRDMLFRLGGFASRFRSMGGNNPGRSNQSGSTTGATVPAGRTNAPSGVVRVPATPQLPRDSGHRRPTPVDQPNPRPRASLRREQAALATERGLLIDLAEAVDNLQDLEEVATQIAAFFKRFGSQPAGVGGRTGGRPTTNARERGRVVNTPVTGPSGRHEGVTPRGTDQVREATRIQRLFRQNRRRAVQEVLMGAPAQCQVPKDQVTEHFRNMYSPASTPPASGPLGFPSEAPTASSDAALVQPFGVSEVDRRLRRMSNSAPGPDGLSYRDLRKADPSCSILTAYFNMIRRLESVPSSWKSSNTVLIHKKGDRMDLSNWRPLAMSDTTPKLFAAVLADRLVSWALQNGRLSPQQKGFLPCEGCYEHNYTLQEILNDARRGRSQVVVAWLDLSNAFGSIPHSTIYHAFAEAQVPLPFRNIVEGLYDGCTTRVRTSQGFTDPVPILSGVKQGCPLSPVAFNLALEPVLRAASGTSVGYTWHGRRYNILAYADDLVLIADTPGGMETLLNTVEAAAGGVGLRFNPAKCATLHQDSRGSRRAVPTCFSLQGQGLKSLAAGVPYEHLGVPTGFQVKQTPLLSIEELIRDLHAVDRSLLAPWQKCETVGSFILPRLDFLLRGAHVEKGPLKLADKLVRKLAKSWLNLPERASAEVVYLPPSRGGCGLLPLADLADALVIGHAFRLLTTPDPAISGLARDSLREAVARKIGRPPTDQDLATYLSGSLEGEFARTSWDFSTLWSRARNAARRSSESLQLRWEWCAARQELGLRLRGSRGRTTVVTPVARSQVLHRLRSAVTEFYSHRLVSKPDQGKVFGVSSRTKVSNHFLRGGSFTRFADWRFVHRARLNVLPLNGARRWGEDDKRCRRCGENLETLPHVICHCRPHSAAWQLRHDAVVSRIARACRLPGTLRVNQRVEGLTDDLEALRPDIVVRHEPSKSVVIIDVTVTFENGIEAFHAARERKIMKYLPIGAALEEQGYRVVTDAIVVGALGSWDQDNESVLKLLRIGKKYAGLMRRLIVSETIRWGRDIYVEHVSGVRQYAAAPVAVPSVDVTLPPPAVNVASPLALLPRTSESNIAPRNHIVDEAIGHEAHTLTQGPSGPV

SEQ ID NO: 286 - protein, 2011 aa, Lasioglossum morio
MAGPTNSPITIYIEFPFPGEFRCPECYGKPGTRTSGVYKTHSDLVKHAKKCHPGHIVVHRCGVCGEHGTGAFPLRYVKAHHLAAHTDGPRPSRCGRGGAYVIPLTTAAPTTVRSSLSTTSTNFSGRGRPESILRDASGAGPTIVTTTSTTTPTTTTPTTTTTADGLRPAATMTSISGGAHPPSPSGPAAAPTTRAAATSTTSTSTTTTTSTTTRRTASSSLTQQRLPFGPSTAGRGATTGTKQATKTRQTTLTTTTATSRARAVVATSRTSTTPPPSQATLRTRSATAAAPAASLRKSTTPPPPPAPTRTRTSATRTSTTPPPSTATTRTRTAAAAASRAPLRKSTTPPPPPHPTRRRTEAGRPSTTPPTSKATSGTKPAAAAAPRAPPRKSTTPPPPPATSRTRTATPPATVATSKLPSPPTTTTRTTATTTTKRGGATRRSDEVVSGSTPPGTRAAPAASRRAGPGAVQRTSPSLPTRKSTPSSPPTLSNSGPARRTRGSTVSPKTKAPPTSPRGPVTRSRGASVPVELESVKRRTAALTTTTTRRKAAPKPGTKRSPRGVGKRDGPCAPTNPSNPTLHPDSSPRLFTSVIRTAASPTYAAVTAGATVVTAAPPGDHTEGRRLRSMARASSLPPESSTAMPSSPPLTAILRALSTSPCSPPTIHGEEEGTRGCCLVSCVAPATLTTTTVTTTVSGGSIMTSRPLAGGERGAKRAWPVPAIPSLPPIEEVTVTPGPARAASSPSPPAIEEREEEGGEEEDDSPLPWQSAASRRRRRRQRALSSSPSSPSFSLPLSRSSIPETSPQDRTTPTRRPSAEDVRTPEPPRRPPARAQRPLTPPPAPAVTRATRGATTTNTITATTTTAAPRVRNQPPPSHQQRRGAQRGTTAGDGRSSRPVSSRAPGGAARVDRSRDLRDLLFRMGGYASRFRSMGGNNPGRSNQGGSTTGATVPAGQTNAPPGVVRVPTTPQLPRDSEHRRPTPVGQPNPRPRASLRREQAALATERGLLIDLAEAVDNLQDLEEVATQIAAFFKRFGSQPAGVGGRTGGRPTTNARERGRVVNTPVTGPSGRYEGVTPRGTDQVREATRIQRLFRQNRRRAVQEVLMGAPAQCQVPKDQVTEHFRNMYSPASTPPASGPLGFPSEAPTASSDAALVQPFGVSEVDRRLRRMSNSAPGPDGLSYRDLRKADPSCSILTAYFNMIRRLESVPSSWKSSNTVLIHKKGDRMDLSNWRPLAMSDTTPKLFAAVLADRLVSWALHNGRLSPQQKGFLPCEGCYEHNYTLQEILNDARRGKSQVVVAWLDLSNAFGSIPHSTVYHAFAEAQVPLPFRNIVEGLYDGCTTRVRTSQGFTDPVPILSGVKQGCPLSPVAFNLALEPVLRAASGTSVGYTLHGRRYNILAYADDLVLIADTPGGMDTLLSTVEAAAGGVGLRFNPAKCATLHQDSRGSRRAVPTCFSLQGQGLKSLAAGAPYEHLGVPTGFQVKQTPLLSIEELIRDLHAVDRSLLAPWQKCETVGSFILPRLDFLLRGAHVEKGPLKVADKLVRKLAKSWLNLPERASAEVVYLPPSRGGCGLLPLADLADALVIGHAYRLLTAPDPAISGLARDSLREAVARKIGRPPTDLDLATYLSGSLEGEFARTSWDFSTLWSRARNAARRSSNSLQLRWEWCAERQELGIRLRGSRGRTTVVTPVARSQVLHRLRSAVTEFYSHRLGSKPDQGKVFGVSSRTKVSNHFLRGGSFTRFADWRFIHRARLDVLPLNGARRWGEGDKRCRRCGENMETLPHVLCHCRPHSAAWQLRHDAVVSRIARACRLPGTLRVNQRVEGLTGDLEALRPDIVVRHEPSKSVVIIDVTVTFENGIEAFHAARDRKISKYLPIGAALEEQGYRVVTDAIVVGALGSWDQANEPVLKLLRIGKKYAGLMRRLIVSETIRWGRDIYVEHVSGVRQYAAAPAAVPPVDTTLPPPAVIVASPLALLPRTSENNIAPRNITCDIDIGHAARTMTQGPSGPV

SEQ ID NO: 287 - protein, 2003 aa, Lasioglossum morio
MAGPSTSPLTIYIEFPFPGDFRCPECFGKPGIKLSGVYKTHNDLIKHAKKHHPGHVVVHRCGVCGEHGTGAFPLRYVKAHHTAAHTDRPRPNRCGRGGAYVIPLNTAAPTTVRSSLSTTSTNFSGRGRPESILRDANGAGTTIVTTTSTTTPTTTTPTTTTTADGLRPAATTVTSGGAPPPPTSPAAVPTTRTAATSTISTTTTTTTSTTTRRTASSSLRQQKLSFGPAAAGRGVTTETNTATETRQTLPPTSTATSRARAVVATSRTSTTPPPPRVMTRTRSATALASAASLRKSTTPPPPPAPTRKRTTATRTSNTPPTSTATTRAAAASKAPLRKSTTPPPPPPPTRRRNEVGRPSTTPPPSTAASRPAAAAASRAPLRKSTTPPPPPAPTTRTRTATTTATVATTKKLPSPSTTSTKTTTTTTTTKRGGATDKRLESVSGSTPPGTRAAPAANRRAGPGAVQRTSPSLPTRKSTPSSPPTLSNSGPARRTRGSTVSPKTKAPPTSPRGPVTRSRGASVPVELESVKRRTAALTTTTTRRKAAPKPGTKRSPRGVGKREEACAPTNPSNPTLHPDSSPRLFTSVIRTAASPTYAAVTAGATVVSATPPGDQGALRRQRSMTPISPESPAATPSSLALTTILRALSTSPCSPPTTFGEQAGARGCCVVSCVAVATLTTTTVTTTVSGGSIMTSRPLAGGERGAKRAWPVPAIPSLPPIEEVTVPPGPARTASSPSPPAIEEREEEGGEEDDDSPLPWQSAASRRRRRRQRALSSSPSSPSFSMPLSRSPNPETSLQRTTPTRRPSAEDVRTPEPPRRPPARAQRPPTPPPAPAAPGASRGATTTTITATTTTTAAPRVRNQPPPSRQQRRGAQRGTTAGDGRSSRPVSSRAPGDAARVDRSRDLRELLFRMGGYASRFRSMGGNNPGSSRPSGSTTGATVPAGRTNAPPGVVRVPTTPQLPRDSGHRRPTPVGQPNPRPRASLRREQAALATERGLLIDLAEAVDNLQDLEEVATQIAAFFKRFGSQPAGVGGRTGGRPTTNARERGRVVNTPVTGPSGRHEGVTPGGTDQVREATRIQRLFRQNRRRAVQEVLMGAPAQCQAPKDQVTEHFRNMYSPASTPPASGPLGFPSEAPTASSDAALIQPFGVSEVDRRLRRMSNSAPGPDGLSYRDLRKADPSCSILTALFNMIRRLESVPSSWKSSNTVLIHKKGDRMDLSNWRPLAMSDTTPKLFAAMLADRLVSWALQNGRLSPQQKGFLPCEGCYEHNYTLQEILNDARRGKSQVVVAWLDLSNAFGSIPHSTIYHAFAEAQVPLPFRNIVEGLYDGCTTRVRTSQGFTDPVPILSGVKQGCPLSPVAFNLALEPVLRAASGTSVGYTLHGRRYNILAYADDLVLIADTPGGMETLLNTVEAAAGGVGLRFNPAKCATLHQDSRGSRRAVPTCFSLQGQGLKSLAAGVPYEHLGVPTGFQVKQTPLLSIEELIRDLHAVDRSLLAPWQKCETVGSFILPRLDFLLRGAHVEKGPLKAADKLVRKLAKSWLNLPERASAEVVYLPPSRGGCGLLPLADLADALVIGHAFRLLTTPDPAISGLARDSLREAVARKIGRPPTDEDLATYLSGSLEGEFARTSWDFSTLWSRARNAARRSSESLQLRWEWCAARQELGLRLRGSRGRTTVVTPVARSQVLHRLRSAVTEFYSHRLVSKPDQGKVFGVSSRTKMSNHFLRGGSFTRFADWRFVHRARLNVLPLNGARRWGEGDKRCRRCGENLETLPHVICHCRPHSAAWQLRHDAVVSRIARACRLPGTLRVNQRVEGLTDDLEALRPDIVVRHEPSKSVVIIDVTVTFENGIEAFHAARERKIMKYLPIGAVLEEQGYRVVTDAIVVGALGSWDQANEPVLKLLRIGKKYAGLMRRLIVSETIRWGRDIYVEHVSGVRQYAAAPAAVPPVDSTLPPPAVIVASPLAPLPRTDENCFAPREYIDSVTDIGHAARTMTQGPSGPV

SEQ ID NO: 288 - protein, 1984 aa, Lasioglossum morio
MAGPSTSPVTIYIEFPFPGDFRCPECFGKPGIKLSGVYKTHNDLVKHAKKHHPGHIVIHRCGVCGEHGTGAFPLRYVKAHHTAAHTDRPRPNRCGRGGAYVIPLTTAAPTTVRSPSSTTSTNFSGRGRPESILRSANGAGPTIVTTTSTTTPTTTTPTTTTTADGLRPAATTSSISGGAPPPPMSPAAVPTTRTAATTTSTTTTTTTSTTTRRTASSSLRQQKLSFGPAAAGRGVTTGTKTVTKTRQTPPTTSTATSGTRAVVATSRSSTTPPPPRAMTRTRSATALASTASLRKSTTPPPPSAPSRTRTSVTRTSTTPPPSTATTRARTAAAAASKAPLRKSTTPPPPPPPTRRRTEAGRPSTTPPTSKATSRTKPAAAAAPRAPSRKSTTPPPPPATSRTRTATSTAKVATAKKLPSPPPTSTRTATTTTTKRGGVTRKSLETVSGSTPPGTRAAPAADRRAGSGAAQRASTSPPTRKSTPSSPPTLSNSGPARRTRGSTVSPRTKAPPTSPRGPITRSRGASVPVELESVKRRTAALNTTRRKAAPTSGSKRSPRGVGKRDGPCAPTNHSNPTLHPDSSPRSLTSVIRTAASPTYAAVTAGATVVTAAPPGDQTTLNTILRALSTSPCSPPTTSGEQAGARGCCVVSCVAVATLTTTTVTTTVSGGSIMTSRPLAGGGERGAKRAWPVPAIPSLPPIEEVTVSPGPARTASSPSPPAIEEREEERGEEEDDSPLPWMSAASRRRRRRQRALSSSPTSPSVSLPLSRSPNPETSLQRTTPTRRPSAEDVRTPEPPRRPPARAQRPPTPPPAPAVTRASRGATTTNTITATTTTTAAPRVREQPPSSRQQRRGAQRGTTAGDGRNSRSGSSRAPGDAARVDRSRDLRDLLFRMGGYASRFRSMGGNNPGRSNQGGSTTGATVPAGRTNAPPGVVRVPTTPQLPRDSGHRRPTPVGQPNPRPRASLRREQAALATERGLLIDLAEAVDNLQDLEEVATQIAAFFKRFGSQPAGVGGRTGGRPTTNARERGRVVNTPVTGPSGRHEGVTPRGTDQVREATRIQRLFRQNRRRAVQEVLMGAPAQCQVPKDQVTEHFRNMYSPASTPPASGPLGFPSEAPTASSDAALVQPFGVSEVDRRLRRMSNSAPGPDGLSYRDLRKADPSCSILTAYFNMIRRLESVPSSWKSSNTVLIHKKGDRMDLSNWRPLAMSDTTPKLFAAVLADRLVSWALQNGRLSPQQKGFLPCEGCYEHNYTLQEILNDARRGRSQVVVAWLDLSNAFGSIPHSTIYHAFAEAQVPLPFRNIVEGLYDGCTTRVRTSQGFTDPVPILSGVKQGCPLSPVAFNLALEPVLRAASGTSVGYTLHGRRYNILAYADDLVLIADTPGGMDTLLNTVEAAAGGVGLRFNPAKCATLHQDSRGSRRAVPTCFSLQGQGLKSLAAGVPYEHLGVPTGFQVKQTPLLSIEELIRDLHAVDRSLLAPWQKCETVGSFILPRLDFLLRGAHVEKGPLKTADKLVRKLAKSWLNLPERASAEVVYLPPSRGGCGLLPLADLADALVIGHAFRLLTTPDPAISGLARDSLREAVARKIGRTPTDQDLATYLSGSLEGEFARTSWDFSTLWSRARNAARRSSESLQLRWEWCAARQELGIRLRGSRGRTTVVTPVARSQVLHRLRSAVTEYYSHRLDSKPDQGKVFGVSSRTKVSNHFLRGGSFTRFADWRFVHRARLNVLPLNGARRWGEGDKRCRRCGENLETLPHVICHCRPHSAAWQLRHDAVVSRIARACRLPGTLRVNQRVEGLTDDLEALRPDIVVRHEPSKSVVIIDVTVTFENGIEAFHAARERKISKYLPIGAVLEEQGYRVVTDAIVVGALGSWDRANEPVLKLLRIGKKYAGLMRRLIVSETIRWGRDIYVEHVSGVRQYAAAPAAVPPVDTTLPPPAVIVASPLALLPRSTESTIAPRLTNDSDTDLGHAARNMTQGPSDPV

SEQ ID NO: 289 - protein, 2000 aa, Lasioglossum morio
MAGPSTCPITIYIEFPFPGDFRCPECFGKPGIKLSGVYKTHNDLVKHAKKHHPGHIVIHRCGVCGEHGTGSFPLRYVKAHHLAAHTDGPRPNRCGRGGAYVIPLTTAAPTTVRSSLSTTSTNFSGRGRPESILRDASGAGTTIVTTTSTTTPTTTTPTTTTTADGLRPAATTVTSGGAPPPPTSPAAVPTTRTAATSTSTTTTTTTSTTTRRTASSSLRQQKLSFGPAAAGRGVTTETNTATETRQTLPRTSTATSRARAVVATSRTSTTPPPPRVMTRTRSATALASAASLRKSTTPPPPPAPTRKRTTATRTSNTPPTSTATTRAAAASKAPLRKSTTPPPPPPPTRRRNEVGRPSTTPPPSTAASRPAAAAASRAPLRKSTTPPPPPAPTTRTRTATTSATVATTKKLPSPSTTSTRTTTTTTTKRGGATDKRLESVSGSTPPGTRAAPAANRRAGPGAVQRTSPSLPTRKSTPSSPPTLSNSGPARRTRGSTVSPKTKAPPTSPRGPITRSRGASVPVELESVKRRTAALTTTTTRRKAAPKPGTKRSPRGVGKREEACAPTNPSNPTLHPDSSPRLFTSVIRTAASPTYAAVTAGATVVSATPPGDQGALRRQRLMTPISPESPAATPSSLALTTILRALSTSPCSPPTTFGEQAGARGCCVVSCVAVATLTTTTVTTTVSGGSIMTSRPLAGGERGAKRAWPVPAIPSLPPIEEVTVTPGPARTASSPSPPAIEEREEEGGEEDDDSPLPWQSAASRRRRRRQRALSSSPSSPSFSMPLSRSPNPETSLQRTTPTRRPSAEDVRTPEPPRRPPARGQRPPTPPPAPAVTRATRGATTTNTITATTTTAAPRVRNQPPPSRQQRRGAQRGTTAGDGRSSRPVSSRAPGDAARVDRSRDLRELLFRMGGYASRFRSMGGNNPGSSRPSGSTTGATVPAGRTNAPPGVVRVPTTPQLPRDSGHRRPTPVGQPNPRPRASLRREQAALATERGLLIDLAEAVDNLQDLEEVATQIAAFFKRLGSQPAGVGGRTGGRPTTNARERGRVVNTPVTGPSGRHEGVTPRGTDQVREATRIQRLFRQNRRRAVQEVLMGAPAQCQVPKDQVTEHFRNMYSPASTPPASGPLGFPSEAPTASSDAALVQPFGVSEVDRRLRRMSNSAPGPDGLSYRDLRKADPSCSILTALFNMIRRLESVPSSWKSSNTVLIHKKGDRMDLSNWRPLAMSDTTPKLFAAVLADRLVSWALHNGRLSPQQKGFLPCEGCYEHNYTLQEILNDARRGRSQVVVAWLDLSNAFGSIPHSTIYHAFAEAQVPLPFRNIVEGLYDGCTTRVRTSQGFTDPVPILSGVKQGCPLSPVAFNLALEPVLRAASGTSVGYTLHGRRYNILAYADDLVLIADTPGGMETLLNTVEAAAGGVGLRFNPAKCATLHQDSRGSRRAVPTCFSLQGQGLKSLAAGVPYEHLGVPTGFQVKQTPLLSIEELIRDLRAVDRSLLAPWQKCETVGSFILPRLDFLLRGAHVEKGPLKTADKLVRKLAKSWLNLPERASAEVVYLPPSRGGCGLLPLADLADALVIGHAFRLLTTPDPAISGLARDSLREAVARKIGRPPTDEDLATYLSGSLEGEFARTSWDFSTLWSRARNAARRSSESLQLRWEWCAARQELGIRLRGSRGRTTVVTPVARSQVLHRLRSAVTEYYSHRLDSKPDQGKVFGVSSRTKVSNHFLRGGSFTRFADWRFVHRARLNVLPLNGARRWGEGDKRCRRCGENLETLPHVICHCRPHSAAWQLRHDAVVSRIARACRLPGTLRVNQRVEGLTDDLEALRPDIVVRHEPSKSVVIIDVTVTFENGIEAFHAARERKISKYLPIGAVLEEQGYRVVTDAIVVGALGSWDRANEPVLKLLRIGKKYAGLMRRLIVSETIRWGRDIYVEHVSGVRQYAAAPAAVPPVDSTLPPPAVIVASPFALLPRSGESNIASRNNNCDIAIGHEAHTLTQGSSGPV

SEQ ID NO: 290 - protein, 2001 aa, Lasioglossum morio
MAGPTNSPLTIYIEFPFPGEFRCPECFGKPGIKLSGVYKTHSDLIKHAKKHHPGHIVVHRCGVCGEHGTGAFPLRYVKAHHTAAHTDRPRPNRCGRGGAYVIPLNTAAPTTVRSSLSTTSTNFSGRGRPESILRDANGAGTTIVTTTSTTTPTTTTPTTTTTADGLRPAATTVTSGGAPPPPTSPAAVPTTRTAATSTISTTTTTTTSTTTRRTASSSLRQQKLSFGPAAAGRGVTTETNTATETRQTLPPTSTATSRARAVVATSRTSTTPPPPRVMTRTRSATALASAASLRKSTTPPPPPAPTRKRTTATRTSNTPPTSTATTRAAAASKAPLRKSTTPPPPPPPTRRRNEVGRPSTTPPPSTAASRPAAAAASRAPLRKSTTPPPPPAPTTRTRTATTSATVATTKKLPSPSTTSTRTTTTTTTKRGGATDKRLESVSGSTPPGTRAAPAANRRAGPGAVQRTSPSLPTRKSTPSSPPTLSNSGPARRTRGSTVSPKTKAPPTSPRGPITRSRGASVPVELESVKRRTAALTTTTTRRKAAPKPGTKRSPRGVGKREEACAPTNPSNPTLHPDSSPRLFTSVIRTAASPTYAAVTAGATVVSATPPGDQGALRRQRSMTPISPESPAATPSSLALTTILRALSTSPCSPPTTFGEQAGARGCCVVSCVAVATLTTTTVTTTVSGGSIMTSRPLAGGERGAKRAWPVPAIPSLPPIEEVTVPPGPARTASSPSPPSIEEREEEGGEEDDDSPLPWQSAASRRRRRRQRALSSSPSSPSFSMPLSRSPNPETSLQRTTPTRRPSAEDVRTPEPPRRPPARGQRPPTPPPAPAVTRATRGATTTNTITATTTTAAPRVRNQPPPSRQQRRGAQRGTTAGDGRNSRSGSSRAPGDAARVDRSRDLRDLLFRMGGYASRFRSMGGNNPGRSNQGGSTTGATVPAGQTNAPPGVVRVPTTPQLPRDSEHRRPTPVGQPNPRPRASLRREQAALATERGLLIDLAEAVDNLQDLEEVATQIAAFFKRFGSQPAGVGGRTGGRPTTNARERGRVVNTPVTGPSGRHEGVTPRGTDQVREATRIQRLFRQNRRRAVQEVLMGAPAQCQVPKDQVTEHFRNMYSPASTPPASGPLGFPSEAPTASSDAALVQPFGVSEVDRRLRRMSNSAPGPDGLSYRDLRKADPSCSILTAYFNMIRRLESVPSSWKSSNTVLIHKKGDRMDLSNWRPLAMSDTTPKLFAAVLADRLVSWALHNGRLSPQQKGFLPCEGCYEHNYTLQEILNDARRGKSQVVVAWLDLSNAFGSIPHSTIYHAFAEAQVPLPFRNIVEGLYDGCTTRVRTSQGFTDPVPILSGVKQGCPLSPVAFNLALEPVLRAASGTSVGYTLHGRRYNILAYADDLVLIADTPGGMDTLLSTVEAAAGGVGLRFNPAKCATLHQDSRGSRRAVPTCFSLQGQGLKSLAAGAPYEHLGVPTGFQVKQTPLLSIEELIRDLHAVDRSLLAPWQKCETVGSFILPRLDFLLRGAHVEKGPLKVADKLVRKLAKSWLNLPERASAEVVYLPPSRGGCGLLPLADLADALVIGHAYRLLTAPDPAISGLARDSLREAVARKIGRPPTDLDLATYLSGSLEGEFARTSWDFSTLWSRARNAARRSSNSLQLRWEWCAERQELGIRLRGSRGRTTVVTPVARSQVLHRLRSAVTEFYSHRLGSKPDQGKVFGVSSRTKVSNHFLRGGSFTRFADWRFIHRARLDVLPLNGARRWGEGDKRCRRCGENMETLPHVLCHCRPHSAAWQLRHDAVVSRIARACRLPGTLRVNQRVEGLTGDLEALRPDIVVRHEPSKSVVIIDVTVTFENGIEAFHAARDRKISKYLPIGAALEEQGYRVVTDAIVVGALGSWDRANEPVLKLLRIGKKYAGLMRRLIVSETIRWGRDIYVEHVSGVRQYAAAPAAVPPVDTTLPPPAVIVASPLALLPRTSENNIAPRNITCDIDIGHAARTMTQGPSGPV

SEQ ID NO: 291 - protein, 2002 aa, Lasioglossum morio
MAGPSNSPITIYIEFPFPGEFRCPECFGKPGIKLSGVYKTHNDLVKHAKKHHPGHIVIHRCGVCGEHGTGAFPLRYVKAHHTAAHTDGPRPNRCGRGGAYVIPLTTAAPTTVRSSGSTTSTNSSGRGRPESILRDANGAGTTIVTTTSTTTPTTTTPTTTTTADGLRPAATTVTSGGAPPPPTSPAAVPTTRTAATSTISTTTTTTTSTTTRRTASSSLRQQKLSFGPAAAGRGVTTETNTATETRQTLPPTSTATSRARAVVATSRTSTTPPPPRVMTRTRSATALASAASLRKSTTPPPPPAPTRKRTTATRTSNTPPTSTATTRAAAASKAPLRKSTTPPPPPPPTRRRNEVGRPSTTPPPSTAASRPAAAAASRAPLRKSTTPPPPPAPTTRTRTATTTATVATTKKLPSPSTTSTKTTTTTTTTKRGGATDKRLESVSGSTPPGTRAAPAANRRAGPGAVQRTSPSLPTRKSTPSSPPTLSNSGPARRTRGSTVSPKTKAPPTSPRGPVTRSRGASVPVELESVKRRTAALTTTTTRRKAAPKPGTKRSPRGVGKREEACAPTNPSNPTLHPDSSPRLFTSVIRTAASPTYAAVTAGATVVSATPPGDQGALRRQRSMTPISPESPAATHSSLALTTILRALSTSPCSPPTTFGEQAGARGCCVVSCVAVATLTTTTVTTTVSGGSIMTSRPLAGGERGAKRAWPVPAIPSLPPIEEVTVPPGPARTASSPSPPAIEEREEEGGEEDDDSPLPWQSAASRRRRRRQRALSSSPSSPSFSMPLSRSPNPETSLQRTTPTRRPSAEDVRTPEPPRRPPARAQRPPTPPPAPAAPGASRGATTTTITATTTTTAAPRVRNQPPPSRQQRRGAQRGTTAGDGRSSRPVSSRAPGDAARVDRSRDLRELLFRMGGYASRFRSMGGNNPGSSRPSGSTTGATVPAGRTNAPPGVVRVPTTPQLPRDSGHRRPTPVGQPNPRPRASLRREQAALATERGLLIDLAEAVDNLQDLEEVATQIAAFFKRFGSQPAGVGGRTGGRPTTNARERGRVVNTPVTGPSGRHEGVTPGGTDQVREATRIQRLFRQNRRRAVQEVLMGAPAQCQVPKDQVTEHFRNMYSPASTPPASGPLGFPSEAPTASSDAALIQPFGVSEVDRRLRRMSNSAPGPDGLSYRDLRKADPSCSILTALFNMIRRLESVPSSWKSSNTVLIHKKGDRMDLSNWRPLAMSDTTPKLFAAMLADRLVSWALQNGRLSPQQKGFLPCEGCYEHNYTLQEILNDARRGKSQVVVAWLDLSNAFGSIPHSTIYHAFAEAQVPLPFRNIVEGLYDGCTTRVRTSQGFTDPVPILSGVKQGCPLSPVAFNLALEPVLRAASGTSVGYTLHGRRYNILAYADDLVLIADTPGGMETLLNTVEAAAGGVGLRFNPAKCATLHQDSRGSRRAVPTCFSLQGQGLKSLAAGVPYEHLGVPTGFQVKQTPLLSIEELIRDLHAVDRSLLAPWQKCETVGSFILPRLDFLLRGAHVEKGPLKAADKLVRKLAKSWLNLPERASAEVVYLPPSRGGCGLLPLADLADALVIGHAFRLLTTPDPAISGLARDSLREAVARKIGRPPTDEDLATYLSGSLEGEFARTSWDFSTLWSRARNAARRSSESLQLRWEWCAARQELGIRLRGSRGRTTVVTPVARSQVLHRLRSAVTEYYSHRLDSKPDQGKVFGVSSRTRVSNHFLRGGSFTRFADWRFVHRARLNVLPLNGARRWGEGDKRCRRCGENLETLPHVICHCRPHSAAWQLRHDAVVSRIARACRLPGTLRVNQRVEGLTDDLEALRPDIVVRHEPSKSVVIIDVTVTFENGIEAFHAARERKISKYLPIGAVLEEQGYRVVTDAIVVGALGSWDRANEPVLKLLRIGKKYAGLMRRLIVSETIRWGRDIYVEHVSGVRQYAAAPAAVPPADLALPPPAVMVTPPLAPLPRTDMNCSAPRNNMRDTLTGHEALILTQGSSSPA

SEQ ID NO: 292 - protein, 2009 aa, Lasioglossum morio
MAGPTSSPITIYIEFPFPGEFRCPECFGKPGIKLSGVYKTHSDLIKHAKKHHPGHVVVHRCGVCGEHGTGAFPLRYVKAHHTAAHTDRPRPNRCGRGGAYVIPLTTAAPTTVRSSLSTTSTNFSGRGRPESILRDAFGAGPTIVTTTSTTTPTTTTPTTTTTADGLRPAATTVTSGGAPPPPTSPAAVPTTRTAATTTSTTTTTTTSTTTRRTASSSLTQQRLPFGPSTAGRGATTGTKQATKTRQTTLTTSTATSRARAAVATSRTSTTPPPSQATLRTRSATAAAPAASLRKSTTPPPPPAPTRTRTSATRTSTTPPPSTATTRTRTAAAAASKAPLRKSTTPPPPPLPTRRRTEAGRPSTTPPPSKANSGTKPAAAAAPRAPPRKSTTPPPPPATSRTRTATPPATVATSKLPSPPTTTTRTTATTTTKRGGATRRSDEVVSGSPPSGTRAAPAANRRAGPGAVQRTSPSLPTRKSNPSSPPTMSTSGPARRTRGSTVSPKTKAPPTSPRGPVTRSRGASVPVELESVKRRTAALTTTTTRRKAAPKPGTKRSPRGVGKRDGPCAPTNPSNPTLHPDSSPRLFTSVIRTAASPTYAAVTAGATVVTAAPPGDHTEGRRLRSMSRASSLPPESSTAMPSSPPLTAILRALSTSPCSPPTIHGEEEGARDGCVVPCVAPATLTTTTVTTTVSGGSIMTSRPLAGGGERGAKKAWPVPAIPSLPPIEEVTVTPGPARAASSPSPPAIEEREEEGGEEEDDSPLPWQSAASRRRRRRQRALSSSPSSPSFSLPLSRSSIPETSPQDRTTPTRRPSAEDVRTPEPPRRPPARAQRPSTPPPAPAAPRASRGATTTTITATTTTTAAPRVRNQPPPSRQQRRGAQRGTTAGDGRNSHSVNSRAPGDAARVDRSRDLRDMLFRLGGFASRFRTMGGNNPGRPNQSGSTTGATVPAGRTNAPPGVVRVPMTPQLPRDSGHRRPTPVDQPNPRPRASLRREQAALATERGLLIDLAEAVDNTQDLEEVATQIAAFFKRFGSQPTGVGGRTGGRPTTNARERGRVVNTPVTGPSGRHEGVTPRGTDQVREATRIQRLFRQNRRRAVQEVLMGAPAQCQVPKDQVTEHFRNMYSPASTPPASGPLGFPSEAPTASSDAALVQPFGVSEVDRRLRRMSNSAPGPDGLSYRDLRKADPSCSILTAYFNMIRRLESVPSSWKSSNTVLIHKKGDRMDLSNWRPLAMSDTTPKLFAAVLADRLVSWALHNGRLSPQQKGFLPCEGCYEHNYTLQEILNDARRGRSQVVVAWLDLSNAFGSIPHSTIYHAFAEAQVPLPFRNIVEGLYDGCTTRVRTSQGFTDPVPILSGVKQGCPLSPVAFNLALEPVLRAASGTSVGYTLHGRRYNILAYADDLVLIADTPGGMDTLLSTVEAAAGGVGLRFNPAKCATLHQDSRGSRRAVPTCFSLQGQGLKSLAAGVPYEHLGVPTGFQVKQTPLLSIEELIRDLHAVDRSLLAPWQKCETVGSFILPRLDFLLRGAHVEKGPLKVADKLVRKLAKSWLNLPERASAEVVYLPPSRGGCGLLPLADLADALVIGHAYRLLTAPDPAISGLARDSLREAVARKIGRPPTDLDLATYLSGSLEGEFARTSWDFSTLWSRARNAARRSSNSLQLRWEWCAERQELGIRLRGSRGRTTVVTPVARSQVLHRLRSAVTEYYSHRLDSKPDQGKVFGVSSRTKVSNHFLRGGSFTRFADWRFVHRARLNVLPLNGARRWGEGDKRCRRCGENLETLPHVICHCRPHSAAWQLRHDAVVSRIARACRLPGTLRVNQRVGGLTDDLEALRPDIVVRHEPSKSVVIIDVTVTFENGIEAFHAARERKISKYLPIGAVLEEQGYRVVTDAIVVGALGSWDQANEPVLKLLRIGKKYAGLMRRLIVSETIRWGRDIYVEHVSGVRQYAAAPAAVPPVDSTLPPPAVIVASPFALLPRSGESNIASRNNNCDIAIGHEAHTLTQGSSGPV

SEQ ID NO: 293 - protein, 2001 aa, Lasioglossum morio
MAGPSTSPVTIYIEFPFPGDFRCPECFGKPGIKLSGVYKTHNDLIKHAKKHHPGHVVVHRCGVCGEHGTGAFPLRYVKAHHTAAHTDRPRPNRCGRGGAYVIPLTTAAPTTVRSSLSTTSTNFSGRGRPESILRDASGAGPTVVPTIATTTTATTTTTTTTASGLRPPAVTTATSGGAPPPSTSPAAAPTTRAAATSTTTTTSTTTTRPTSSSLRQQRLPFGPATAGRGATTGTVTVTRTRQTPPTTATATSRAKAVVATSRTPTTPPPASATLRAGPRTAAAPTASLRKSTTPPPPPATTRTRTTTSRTSTTPPPSTATARTRTATAAASKASVRKSTTPPPPPPPTRRKTAAARTSTTPPPSSATSRAKQAAAAAPRAPLRKSTTPPPPPAPTRRKTATTAAKVATRELPSPPTTTATATTTTRRGGVTGKSLETVSGSTPPGPRAAPAANKRAGSGAVQRASPSPPTRRSTPSSPPTQSNSGPARRTRGSTVSPRTKAPPTSPRGPITRSRGASVPVELESVKRRTAALNTTRRKAAPTSGSKRSPRGVGKRDGPCAPTNHSNPTLHPDSSPRLFTSVIRTAASPTYAAVTAGATVVTAAPPGDQTDVRRLRSMTRASSLPPESPIATPSSPTLNTILRALSTSPCSPPTTFGEQEGARGCCVVSCVALATLTTTTVTTTVSGGSIMTSRPLAGGGERGAKRAWPVPAIPSLPPIEEVTVSPGPARTASSPSPPAIEEREEEGGEEDDSPLPWQSAASRRRRRQLRVLSLSPTSPSVSLPPSRSSYPETSPQEARTSPRRPSTEDVRTPEPQRRPPARAQRPPTPPPAPAATRASRGATSTTTITATTTTTAAPRVRDQPPSSRQQRRGAQRGTTAGDGRSSRPVSSRTPGDAARVDRSRDLRDMLFRLGGFASRFRTMGGNNPGRSNQGGSTTGATVPAGRTNAPPGVVRVPTTPQLPRDSGHRRPTPVDQPNPRPRASLRREQAALATERGLLIDLAEAVDNLQDLEEVATQIAAFFKRFGSQPAGVGGRTGGRPTTNARERGRVVNTPVTGPSGRHEGVTPRGTDQVREATRIQRLFRQNRRRAVQEVLMGAPAQCQVPKDQVTEHFRNMYSPASTPPASGPLGFPSEAPTASSDAALVQPFGVSEVDRRLRRMSNSAPGPDGLSYRDLRKADPSCSILTAYFNMIRRLESVPSSWKSSNTVLIHKKGDRMDLSNWRPLAMSDTTPKLFAAVLADRLVSWALHNGRLSPQQKGFLPCEGCYEHNYTLQEILNDARRGRSQVVVAWLDLSNAFGSIPHSTIYHAFAEAQVPLPFRNIVEGLYDGCTTRVRTSQGFTDPVPILSGVKQGCPLSPVAFNLALEPVLRAASGTSVGYTLHGRRYNILAYADDLVLIADTPGGMDTLLSTVEAAAGGVGLRFNPAKCATLHQDSRGSRRAVPTCFSLQGQALKSLAAGVPYEHLGVPTGFQVKQTPLLSIEELIRDLHAVDRSLLAPWQKCETVGSFILPRLDFLLRGAHVEKGPLKVADKLVRKLAKSWLNLPERASAEVVYLPPSRGGCGLLPLADLADALVIGHAYRLLTAPDPAISGLARDSLREAVARKIGRPPTDLDLATYLSGSLEGEFARTSWDFSTLWSRARNAARRSSNSLQLRWEWCAERQEMGIRLRGSRGRTTVVTPVARSQVLHRLRSAVTEFYSHRLGSKPDQGKVFGVSSRTKVSNHFLRGGSFTRFADWRFIHRARLDVLPLNGARRWGEGDKRCRRCGENMETLPHVLCHCRPHSAAWQLRHDAVVSRIARACRLPGTLRVNQRVEGLTGDLEALRPDIVVRHEPSKSVVIIDVTVTFENGIEAFHAARGRKISKYLPIGAALEEQGYRVVTDAIVVGALGSWDRDNESVLKLLRIGKKYAGLMRRLIVSETIRWGRDIYVEHVSGVRQYAAAPAAVPPVDSTPPPPAVNVASPLALLPRSCESNIAPRNSTCDDDMGLEARTLTQGPSGPV

SEQ ID NO: 294 - protein, 1088 aa, Lasioglossum morio
MGGYASRFRSMGGNNPGRSSQGGSTTGATVPAGRTNAPSGVVRVPTTPQLPRDSEHRRPTPVGQPNPRPRASLRREQAALATERGLLIDLAEAVDNPQDLEEVATQIAAFFKRFGSQPAGVGGRTGGRPTTNARERGRVVNTPVTGPSGRHEGVTPRGTDQVREATRIQRLFRQNRRRAVQEVLMGAPAQCQVPKDQVTEHFRNMYSPASTPPASGPLGFPSEAPTASSDAALIQPFGVSEVDRRLRRMSNSAPGPDGLSYRDLRKADPSCSILTALFNMIRRLESVPSSWKSSNTVLIHKKGDRMDLSNWRPLAMSDTTPKLFAAVLADRLVSWALQNGRLSPQQKGFLPCEGCYEHNYTLQEILNDARRGRSQVVVAWLDLSNAFGSIPHSTIYHAFAEAQVPLPFRSIVEGLYDGCTTRVRTSQGFTDPVPILSGVKQGCPLSPVAFNLALEPVLRAASGTSVGYTLHGRRYNILAYADDLVLIADTPGGMETLLNTVEAAAGGVGLRFNPAKCATLHQDSRGSRRAVPTCFSLQGQGLKSLAAGVPYEHLGVPTGFQVKQTPLLSIEELIRDLHAVDRSLLAPWQKCETVGSFILPRLDFLLRGAHVEKGPLKTADKLVRKLAKSWLNLPERASAEVVYLPPSRGGCGLLPLADLADALVIGHAYRLLTAPDPAISGLARDSLREAVARKIGRPPTDLDLATYLSGSLEGEFARTSWDFSTLWSRARNAARRSSESLQLRWEWCAARQELGIRLRGSRGRTTVVTPVARSQVLHRLRSAVTEFYSHRLVSKPDQGKVFGVSSRTRVSNHFLRGGSFTRFADWRFVHRARLNVLPLNGARRWGEGDKRCRRCGENLETLPHVICHCRPHSAAWQLRHDAVVSRIARACRLPGTLRVNQRVEGLTDDLEALRPDIVVRHEPSKSVVIIDVTVTFENGIEAFHAARGRKISKYLPIGAALEEQGYRVVTDAIVVGALGSWDQANEPVLKLLRIGKKYAGLMRRLIVSETIRWGRDIYVEHVSGVRQYAAAPAAVPPVDATFPPPAVTVTPLLAPLPRVIESIAPRTNSDNDIGHAAHTLTQGPSGPI

SEQ ID NO: 295 - protein, 2003 aa, Lasioglossum morio
MAGPSNSPITIYIEFPFPGEFRCPECFGKPGIKLSGVYKTHNDLVKHAKKHHPGHIVIHRCGVCGEHGTGAFPLRYVKAHHTAAHTDGPRPNRCGRGGAYVIPLTTAAPTTVRSSGSTTSTNSSGRGRPESILRDANGAGTTIVTTTSTTTPTTTTPTTTTTADGLRPAATTVTSGGAPPPPTSPAAVPTTRTAATSTISTTTTTTTSTTTRRTASSSLRQQKLSFGPAAAGRGVTTETNTATETRQTLPPTSTATSRARAVVATSRTSTTPPPPRVMTRTRSATALASAASLRKSTTPPPPPAPTRKRTTATRTSNTPPTSTATTRAAAASKAPLRKSTTPPPPPPPTRRRNEVGRPSTTPPPSTAASRPAAAAASRAPLRKSTTPPPPPAPTTRTRTATTTATVATTKKLPSPSTTSTKTTTTTTTTKRGGATDKRLESVSGSTPPGTRAAPAANRRAGPGAVQRTSPSLPTRKSTPSSPPTLSNSGPARRTRGSTVSPKTKAPPTSPRGPVTRSRGASVPVELESVKRRTAALTTTTTRRKAAPKPGTKRSPRGVGKREEACAPTNPSNPTLHPDSSPRLFTSVIRTAASPTYAAVTAGATVVSATPPGDQGALRRQRSMTPISPESPAATHSSLALTTILRALSTSPCSPPTTFGEQAGARGCCVVSCVAVATLTTTTVTTTVSGGSIMTSRPLAGGERGAKRAWPVPAIPSLPPIEEVTVPPGPARTASSPSPPAIEEREEEGGEEDDDSPLPWQSAASRRRRRRQRALSSSPSSPSFSMPLSRSPNPETSLQRTTPTRRPSAEDVRTPEPPRRPPARAQRPPTPPPAPAAPGASRGATTTTITATTTTTAAPRVRNQPPPSRQQRRGAQRGTTAGDGRSSRPVSSRAPGDAARVDRSRDLRELLFRMGGYASRFRSMGGNNPGSSRPSGSTTGATVPAGRTNAPPGVVRVPTTPQLPRDSGHRRPTPVGQPNPRPRASLRREQAALATERGLLIDLAEAVDNLQDLEEVATQIAAFFKRFGSQPAGVGGRTGGRPTTNARERGRVVNTPVTGPSGRHEGVTPGGTDQVREATRIQRLFRQNRRRAVQEVLMGAPAQCQVPKDQVTEHFRNMYSPASTPPASGPLGFPSEAPTASSDAALIQPFGVSEVDRRLRRMSNSAPGPDGLSYRDLRKADPSCSILTALFNMIRRLESVPSSWKSSNTVLIHKKGDRMDLSNWRPLAMSDTTPKLFAAMLADRLVSWALQNGRLSPQQKGFLPCEGCYEHNYTLQEILNDARRGKSQVVVAWLDLSNAFGSIPHSTIYHAFAEAQVPLPFRNIVEGLYDGCTTRVRTSQGFTDPVPILSGVKQGCPLSPVAFNLALEPVLRAASGTSVGYTLHGRRYNILAYADDLVLIADTPGGMETLLNTVEAAAGGVGLRFNPAKCATLHQDSRGSRRAVPTCFSLQGQGLKSLAAGVPYEHLGVPTGFQVKQTPLLSIEELIRDLHAVDRSLLAPWQKCETVGSFILPRLDFLLRGAHVEKGPLKAADKLVRKLAKSWLNLPERASAEVVYLPPSRGGCGLLPLADLADALVIGHAFRLLTTPDPAISGLARDSLREAVARKIGRPPTDEDLATYLSGSLEGEFARTSWDFSTLWSRARNAARRSSESLQLRWEWCAARQELGLRLRGSRGRTTVVTPVARSQVLHRLRSAVTEFYSHRLVSKPDQGKVFGVSSRTKMSNHFLRGGSFTRFADWRFVHRARLNVLPLNGARRWGEGDKRCRRCGENLETLPHVICHCRPHSAAWQLRHDAVVSRIARACRLPGTLRVNQRVEGLTDDLEALRPDIVVRHEPSKSVVIIDVTVTFENGIEAFHAARERKIMKYLPTGAVLEEQGYRVVTDAIVVGALGSWDQANEPVLKLLRVGKKYAGLMRRLIVSETIRWGRDIYVEHVSGVRQYAAAPAAVPPVDSTLPPPAVIVASPLAPLPRTDENCFAPREYIDSVTDIGHAARTMTQGPSGPV

SEQ ID NO: 296 - protein, 1244 aa, Lasioglossum morio
MSAASRRRRRRQRALSSSPTSPSVSLPLSRSPNPETSLQRTTPTRRPSAEDIRTPEPPRRPSARAQRPPTPPPAPAVTRATRGATTTNTITATTTTAAPRVRNQPPPSRQQRRGAQRGAAAGDGRNSRSGSSRAPGDAARVDRSRDLRDLLFRMGGYASRFRSMGGNNPGRSNQGGSTTGATVPAGRTNAPSGVVRVPTTPQLTRDSEHRRPTPVDQPNPRPRASLRREQAALATERGLLIDLAEAVDNPQDLEEVATQIAAFFKRFGSQPAGVGGRTGGRPTTNARERGRVVNTPVTGPSGRHEGVTPRGTDQVREATRIQRLFRQNRRRAVQEVLMGAPAQCQVPKDQVTEHFRNMYSPASTPPASGPLGFPSEAPTASSDAALVQPFGVSEVDRRLRRMSNSAPGPDGLSYRDLRKADPSCSILTALFNMIRRLESVPSSWKSSNTVLIHKKGDRMDLSNWRPLAMSDTTPKLFAAVLADRLVSWALQNGRLSPQQKGFLPCEGCYEHNYTLQEILNDARRGRSQVVVAWLDLSNAFGSIPHSTIYHAFAEAQVPLPFRNIVEGLYDGCTTRVRTSQGFTDPVPILSGVKQGCPLSPVAFNLALEPVLRAASGTSVGYTLHGRRYNILAYADDLVLIADTPGGMETLLNTVEAAAGGVGLRFNPAKCATLHQDSRGSRRAVPTCFSLQGQGLKSLAAGVPYEHLGVPTGFQVRQTPLLSIEELIRDLHAVDRSLLAPWQKCETVGSFILPRLDFLLRGAHVEKGPLKLADKLVRKLAKSWLNLPERASAEVVYLPPSRGGCGLLPLADLADALVIGHAYRLLTAPDPAISGLARDSLREAVARKIGRTPTDQDLATYLSGSLEGEFARTSWDFSTLWSRARNAARRSSESLQLRWEWCAARQELGIRLRGSRGRTTVVTPVARSQVLHRLRSAVTEYYSHRLDSKPDQGKVFGVSSRTKVSNHFLRGGNFTRFADWRFVHRARLNVLPLNGARRWGEGDKRCRRCGENLETLPHVMCHCRPHSAAWQLRHDAVVSRIARACRLPGTLRVNQRVEGLTGDLEALRPDIVVRHEPSKSVVIIDVTVTFENGIEAFHAARERKIMKYLPIGAALEEQGYRVVTDAIVVGALGSWDQDNESVLKLLRIGKKYAGLMRRLIVSETIRWGRDIYVEHVSGVRQYAAAPAAVPPVDLTLPPPAVNVASPLALLPRTSESTIAPRAINDSVIDRGHAARTMTQGPSGPV

SEQ ID NO: 297 - protein, 2014 aa, Lasioglossum morio
MAGPTSSPITIYIEFPFPGEFRCPECFGKPGIKLSGVYKTHSDLIKHAKKHHPGHVVVHRCGVCGEHGTGAFPLRYVKAHHTAAHTDRPRPNRCGRGGAYVIPLTTAAPTTVRSSLSTTSTNFSGRGRPESILRDAFGAGPTIVTTTSTTTPTTTTPTTTTTADGLRPAATTVTSGGAPPPPTSPAAVPTTRTAATTTSTTTTSTTTTTTTSTTTRRTASSSLTQQRLPFGPSTAGRGAMTGTKQATKTRQTTLTTSTATSRARAAVATSRTSTTPPPSQATLRTRSATAAAPAASLRKSTTPPPPPAPTRTRTSATRTSTTPPPSTATTRTRTAAAAASKAPLRKSTTPPPPPLPTRRRTEAGRPSTTPPPSKANSGTKPAAAAAPRAPPRKSTTPPPPPATSRTRTATPPATVATSKLPSPPTTTTRTTATTTTKRGGATRRSDEVVSGSPPSGTRAAPAANRRAGPGAVQRTSPSLPTRKSNPSSPPTMSTSGPARRTRGSTVSPKTKAPPTSPRGPVTRSRGASVPVELESVKRRTAALTTTTTRRKAAPKPGTKRSPRGVGKRDGPCAPTNPSNPTLHPDSSPRLFTSVIRTAASPTYAAVTAGATVVTAAPPGDHTEGRRLRSMSRASSLPPESSTAMPSSPPLTAILRALSTSPCSPPTIHGEEEGARDGCVVPCVAPATLTTTTVTTTVSGGSIMTSRPLAGGGERGAKKAWPVPAIPSLPPIEEVTVTPGPARAASSPSPPAIEEREEEGGEEEDDSPLPWQSAASRRRRRRQRALSSSPSSPSFSLPLSRSSIPETSPQDRTTPTRRPSAEDVRTPEPPRRPPARAQRPSTPPPAPAAPRASRGATTTTITATTTTTAAPRVRNQPPPSRQQRRGAQRGATAGDGRNSHSVNSRAPGDAARVDRSRDLRDMLFRLGGFASRFRTMGGNNPGRPNQSGSTTGATVPAGRTNAPPGVVRVPMTPQLPRDSGHRRPTPVDQPNPRPRASLRREQAALATERGLLIDLAEAVDNTQDLEEVATQIAAFFKRFGSQPTGVGGRTGGRPTTNARERGRVVNTPVTGPSGRHEGVTPRGTDQVREATRIQRLFRQNRRRAVQEVLMGAPAQCQVPKDQITEHFRNMYSPASTPPASGPLGFPSEAPTASSDAALVEPFGVSEVDRRLRRMSNSAPGPDGLSYRDLRKADPSCSILTAYFNMIRRLESVPSSWKSSNTVLIHKKGDRMDLSNWRPLAMSDTTPKLFAAVLADRLVSWALHNGRLSPQQKGFLPCEGCYEHNYTLQEILNDARRGRSQVVVAWLDLSNAFGSIPHSTIYHAFAEAQVPLPFRNIVEGLYDGCTTRVRTSQGFTDPVPILSGVKQGCPLSPVAFNLALEPVLRAASGTSVGYTLHGRRYNILAYADDLVLISDTPGGMDTLLNTVEAAAGGVGLRFNPAKCATLHQDSRGSRRAVPTCFSLQGQGLKSLAAGVPYEHLGVPTGFQVKQTPLLSIEELIRDLHAVDRSLLAPWQKCETVGSFILPRLDFLLRGAHVEKGPLKVADKLVRKLAKSWLNLPERASAEVVYLPPSRGGCGLLPLADLADALVIGHAYRLLTAPDPAISGLARDSLREAVARKIGRPPTDLDLATYLSGSLEGEFARTSWDFSTLWSRARNAARRSSNSLQLRWEWCAERQELGIRLRGSRGRTTVVTPVARSQVLHRLRSAVTEFYSHRLGSKPDQGKVFGVSSRTKVSNHFLRGGSFTRFADWRFIHRARLDVLPLNGARRWGEGDKRCRRCGENMETLPHVLCHCRPHSAAWQLRHDAVVSRIARACRLPGTLRVNQRVEGLTGDLKALRPDIVVRHEPSKSVVIIDVTVTFENGIEAFHAARGRKISKYLPIGAALEEQGYRVVTDAIVVGALGSWDQDNESVLKLLRIGKKYAGLMRRLIVSETIRWGRDIYVEHVSGVRQYAAAPAAVPPVDSTLPPLAVNVASPLALLPRSCENNIAPRNHIIDEAIGHEARTSTQGPSGPV

SEQ ID NO: 298 - protein, 1573 aa, Euura saliciscinereae
MDIVIVFPHPSEFRCPECYNVSQGRRSGGLFKSHSDLIKHAKKHHPGHTVIMKCAECDFTGYGGYPLKPVKKHYAEVHERRSGRGGGGTSAASTSNANTSGRGGPNASTSTSSAASTTARTQTTPRTSGTATTTTTTTKAATTTTYSQRRSGEAALGRSPPTTTVAPTTSRPRSGSSTPGSSRPGPNAAPAAPCLGGERRTRGHADPSPRQVPTSTYQGPVTRRMRAASVPAEPTAPFTNTRRSTVPRPGGKNHKATTSAREVTATTTYAAVTAGAPSRGTQSTEDTQIRRPGLRSASRATSLPPGGQNPSSDQRILPPNTWGRQQDATIIISSVAATLTTATVTTTASGGPITTSRVLQGGGITRIPPLNALRIQPTLPPIDEARPGTSRVAEPPQQDPPATPPAAGETWTRVTRGARRQHPSGSGSSESSRGRQPSPTLSISSDTSSVFEPAVDEVDETAIEVESPPPPPTTSRRGSRGGQTRGRRGPTTLAATNDNDSVRNVRAPAGSTETGVRFNRGGNTRRRGSTGRGAARGGVPAPTGQAPIPASSRGRAISHRLRPAPQRQPPMPARQPSPPRRPVRPRAVDSAVEEREQLVSLAEAAASWEDLEEVATKVADFLKGCGAPAVEVGGVGVGREGRRPNRGGAGRGRGRAADRRDRQPQQGGIQDRETYVREATRIQQLFRVNRRRAVQEVLLGPLGHCEVSRERVQNHFEAMYAPAGELGERLVVDQPEAPDDASNDALVAAFTEREVGLRLRRMNNSAPGPDGLTYNDLRKADPGCRVLTALFNTCRRLESVPSSWKTSNTVLVHKKGDRDDLSNWRPLALGDTTAKVFAAVLADRLLAWSVRNRRISREQKGFLPCEGCYEHNFVLQEILNDARRGGRQVVVAWLDLSNAFGSVPHAAIYRALEDAGTPPPLRNIVESMYDGCTTRVRTSEGYTDPIPIRSGVRQGCPMSPVAFNLAIEPVLRAVTGLPQGYTLHGHRHNILAYADDLALISDTPEGMEVLLQAVEAAAGGIGLRFNPSKCASLHQDCRRTRSVLPTRFTLQDQHIKALAAGEPYEHLGIPTGFQVRQTPMLTVEELVRDVKAVDESLLTPWQKAETVATFILPRLDFCLRGSHVEKGPLKEADKLIRKLAKSWLNLPQRASAEVVYLPPSRGGCGLLPLADMADALVTAHAFRILTVGDEVVRGLAWESLRRTVARKIGRRNPSNHDLATYLSGSLEGEFSRDGGDISSMWSRARNAARRSGHLLGLRWRWCEERQELAVEMRGSAGRLTVVPPRARAQVVRRLRAAVVDHYSQRLLRKPDQGKVFEVTSKSRHSNHYLRGGSFTRFADWRFVHRARLDVLPLNGTRRWEEHGDKRCRRCGEPLESLPHVICHCRQHSAAWQHRHDAIVNRLARATRLPGTVNVNRRVEGVDGDLGALRPDIVVRHEPSRSIVIVDVTVPFENRYIAFEEARARKIAKYKPLADELNRHGYRVAVSAIVVGALGAWDPRNEPVLRQLQISNRYASLMRRLVVSETIRWSRDIYVEHVSGVRQYRLPDPDGPQRIEPGPENGQNEALVPLEVRG

SEQ ID NO: 299 - protein, 1209 aa, Lasioglossum morio
MDNEMDNGVDNTQMAQSDRNRRNTHSENSDHSERIISEQWEISDQCEISEQCEISEQCEISEQCEISEQCETNERAGISEQLQISEVTVLVPLVDIDYCPVCQWLNKTIAFLNLNDLKEHLTESHNTTRVMWQCRKCNRKFPGIHNCRCHIPKCKNIVESQQLEHTCAICNKSFSSVRGLSAHERHRHPTERNRKRIEVCERPKGKPGRRNYVWTEEETEELIRLNTIYESDSLRNFAIQKHFPNKTLKQIRDKRSDLKRVGRLNNVPLSDSDSVDLTSEHTGLRINETCVTIVNNQNSDENEITEILEVNESAQEENNGLDLNLGSLDLPEDEEWKERFKTVIQANPLASNHELKSIEEMIIEVANKDQPDPLDTERVLEAFMEIINSGIEENRGSSRENRHGRGKNKRRECNHTRFKRYKYARFQELYKKCPRKLVDMAIAGETFERREKVELPEKAGIENLYGDLWGTEGPTTGITRLGITPREDIPIKRVWTPISTEELITKMKRIKTNTAAGIDGITKAHLRKPGILYILSKFFNLLMLTESFPAQWRLNRTTLIPKPGKDARNAKNWRPITIGSLLSRMFSSMLDSRLRHVVRNSKRQKGFTMEDGCKQNIAILDRIITEMKQKTGGIVTVVDISKAFDTVPHKAIGDGLRRKGVPSMVTEYIEKMYEGCRTEIKTKEDSIKITLRRGVKQGDPLSPLLFNTIIDPIIDEIDGTTEGIQIGEETVSILAFADDLVLTARTKEEANRQAKELNDYLRGLGMSIQAEKCSTFEIVQKGKTWHVADPDIKIGEEKVPASEPGDTIGYLGVTIGPWKGLQRAQTEGIVRAAANIMKMNLKPDQKINLIRTHLLPKYIHLLVANPQTLDLLKSLDHEIKQIVKTILHLHPSTTDGLIYTEKRNGGLGMPKIADIVRIAKLRSSLQMMENEDEAVKEAYKKQETITLKYAQSVGLQWPASMDEIENKKKELKENHRRRWEQLASQGQGIHEFFNDRVGNAWLHRPWLLKPSRYLDALRLRSNTFGTRVVLYRADKDVDPKCRRCNGQMETLGHVLGSCTHTKPARMNRHNEIVHLIKEKASKTCAVFVEPTVMVMGELKKPDLVIKDQERLLVVDVTVRYEDKENLRKAAKEKTDKYKETAQLLKLKLKCKTATVLPIVVGCRGAMPESTKTNLTALGCTKGEQLTVAMIALRSSLEMANEFIDYNRII

SEQ ID NO: 300 - protein, 1394 aa, Lasioglossum lativentre
MTLLRNFERPTKEKLSVRAEKMALRIKNEPMRVLGLLGTGSVNRGWAIAVARALVSSGIGEGVLKQWAQRAPDTEAHDRRGFARVIHNTVELWAFSVNRTPDVDSDTSDESSTDTRGKPQVRITEGMNRWSDGENRARDSFSKLLISGPLAACVRADHVCPFCLYHSIAGIASSTCVDIGGRQPLIQMSEAFILNKLDNGNMNVGWLEAAAEQHNREMHASNGNIDTIKDCGSGQRNVIRSSKSAFWDSATVQEDHSREDATLVAESRKGMSRLFYTRAPQRGSQAYSQAGTLYQFLGDATDYFPVTDEGAEANGVRGEMPVFLTDSRAASQATLSEGDDDDVRVKKVKEGLRLVEAEVMGTLKNAPREGTKNARILRMLRITAKMAEDGQVEDNIVSGDARVNYDRRSQDDIMINQLRDDAANLVWAGVGASDLVYTGKMERTGAGDRMIEAATNPQPSAPGMLNPAKGIYTYGYMSNCPLLATMVDRSIAADNPDIRRLALKVDLYDELRAKRILQPTGVDYAWTEPVVPKKRIVHLNKLKGWHYDAIFLTMDVLDWAYRNGGYLPVGGPNGDKWFLGDKRIRIIPIAENGGYSSEGRDIWILSQLKYPLSWVMEEHRIHKVGNATPDDRFFVRTAGLVDIDEPTDKIIFMYPTQTTSNVCLGGENFRLTSPDHRGGIPRDVNIEVHNFEKRIKTDTAAGMDGVTKAHLRKPGMLYILSKFFNLLMLTKSFPAQWRLNRTTLIPKPGKDTRDAKNWRPITIGSLLSRMYSSMLDNRLRYEIINSRRQKGFTREDGCKQNIAILDRIMAQMKENTGGIVTVVDISKAFDTVPHKAIGDGMRRKGIPSCVTEYVERMYDGCRTEIRTKEESIKITLRRGVKQGDPLSPLLFNTIIDPIIEDIDETTEGIQIGEENISILAFADDLVLIAKTKEEAKKQARKLNEYLQELGMSIQAEKCSTFQIVQKGKTWHVADPEIKIGEQKVPASEPGETISYLGVTLGPWKGLQRTQIKDIIRAAGNIKKMNLKPDQKINLIRTHLLPKYIHMLVANPPAMALLNSLDHEIKQIVKTILHLHPSTTDGLIYTKKRNGGLGMQKMADIVRIAMLRNSLQMMGNEDDAVKEAYKKQEAITLKYAQSVGLRWPVTMEEIMRAKMDLKESTRRRWEQQTSQGQGVHEFFDDTIGNAWLHRPWLLKPSRYLDALRLRSNTFGTRVVLHRADKDVDPKCRRCKGQMETLGHVLGSCTHTKPARMNRHNEIVHLIKEKTSKTCAVFVEPTVLVLGELKKPDLVIKDQERLFVVDVTVRYEDKENLRKAKKDKIDKYKETAQLLKLKLKCKTAEVLPIVVGCRGAMPETTKQNLKALGFTKGEQLTVAMIALRSSIEMANEFIDYDRII

SEQ ID NO: 301 - protein, 1271 aa, Lasioglossum morio
MTLLSLRATFGESTSRRPRSGVKSTVTIGDRQCNADSNGPRGSVASFLASAGGSTDNDHGESMDNEMDNGVDNTQMAQSDRNRRNTHSENSDHSERIISEQWEICDQCEISEQCEISEQCEISEQCEISEQCETNERAGISEQLQISEVTVLVPLVDIDYCPVCQWLNKTIAFLNLNDLKEHLTESHNTTRVMWQCRKCNRKFPGIHNCRCHIPKCKNIVESQQLEHTCAICNKSFSSVRGLSAHERHRHPTERNRKRIEVCERPKGKPGRRNYVWTEEETEELIRLNTIYESDSLRNFAIQKHFPNKTLKQIRDKRSDLKREGRLNNVPLSDSDSVDLTSEHTGLRINETCVTIVNNQNSDENEITEILEVNESAQEENNGLDLNLGSLDLPEDEEWKERFKTVIQANPLASNHELKSIEEMIIEVANKDQPDPLDTERVLEAFMEIINSGIEENRGSSRENRHGRGKNKRRECNHTRFKRYKYARFQELYKKCPRKLVDMAIAGETFERREKVELPEKAGIENLYGDLWGTEGPTTGIPRLGITPREDIPIKRVWTPISTEELITKMKRIKTNTAAGIDGITKAHLRKPGILYILSKFFNLLMLTESFPAQWRLNRTTLIPKPGKDARNAKNWRPITIGSLLSRMFSSMLDSRLRHVVRNSKRQKGFTMEDGCKQNIAILDRIITEMKQKTGGIVTVVDISKAFDTVPHKAIGDGLRRKGVPSMVTEYIEKMYEGCRTEIKTKEDSIKITLRRGVKQGDPLSPLLFNTIIDPIIDEIDGTTEGIQIGEETVSILAFADDLVLTARTKEEANRQAKELNDYLRGLGMSIQAEKCSTFEIVQKGKTWHVADPDIKIGEEKVPASEPGDTIGYLGVTIGPWKGLQRAQTEGIVRAAANIMKMNLKPDQKINLIRTHLLPKYIHLLLANPQTLDLLKSLDHEIKQIVKTILHLHPSTTDGLIYTEKRNGGLGMPKIADIVRIAKLRSSLQMMENEDEAVKEAYKKQETITLKYAQSVGLRWPASMDEIENKKKELKENHRRRWEQLASQGQGIHEFFNDRVGNAWLHRPWLLKPSRYLDALRLRSNTFGTRVVLYRADKDVDPKCRRCNGQMETLGHVLGSCTHTKPARMNRHNEIVHLIKEKASKTCAVFVEPTVMVLGELKKPDLVIKDQERLLVVDVTVRYEDKENLRKAAKEKTDKYKETAQLLKLKLKCKTATVLPIVVGCRGAMPESTKTNLTALGCTKGEQLTVAMIALRSSLEMANEFIDYNRII

SEQ ID NO: 302 - protein, 1271 aa, Lasioglossum morio
MTLLSLRATFGESTSRRPRSGVKSTVTIGDRQCNADSNGPRGSVASFLASAGGSTDNDHGESMDNEMDNGVDNTQMAQSDRNRRNTHSENSDHSERIISEQWEISDQCEISEQCEISEQCEISEQCEISEQCETNERAGISEQLQISEVTVLVPLVDIDYCPVCQWLNKTTAFLNLNDLKEHLTESHNTTRVMWQCRKCNRKFPGIHNCRCHIPKCKNIVESQQLEHTCAICNKSFSSVRGLSAHERHRHPTERNRKRIEVCERPKGKPGRRNYVWTEEETEELIRLNTIYESDSLRNFAIQKHFPNKTLKQIRDKRSDLKRVGRLNNVQLSDSDSVDLTSEHTGLRINETCVTIVNNRNSDENEITEILEVNESAQEENNGLDLNLGSLDLPEDEEWKERFKTVIQANPLASNHELKSIEEMIIEVANKDQPDPLDTERVLEAFMEIINSGIEENRGSSRENRHGRGKNKRRECNHTRFKRYKYARFQELYKKCPRKLVDMAIAGETFERREKVELPEKAGIENLYGDLWGTEGPTTGIPRLGITPREDIPIKRVWTPISTEELITKMKRIKTNTAAGIDGITKAHLRKPGILYILSKFFNLLMLTESFPAQWRLNRTTLIPKPGKDARNAKNWRPITIGSLLSRMFSSMLDSRLRHVVRNSKRQKGFTMEDGCKQNIAILDRIITEMKQKTGGIVTVVDISKAFDTVPHKAIGDGLRRKGVPSMVTEYIEKMYEGCRTEIKTKEDSIKITLRRGVKQGDPLSPLLFNTIIDPIIDEIDGTTEGIQIGEETVSILAFADDLVLTARTKEEANRQAKELNDYLRGLGMSIQAEKCSTFEIIQKGKTWHVADPDIKIGEEKVPASEPGDTIGYLGVTIGPWKGLQRAQTEGIVRAAANIMKMNLKPDQKINLIRTHLLPKYIHLLVANPQTLDLLKSLDHEIKQIVKTILHLHPSTTDGLIYTEKRNGGLGMPKIADIVRIAKLRSSLQMMENEDEAVKEAYKKQETITLKYAQSVGLRWPASMDEIENKKKELKENHRRRWEQLASQGQGIHEFFNDRVGNAWLHRPWLLKPSRYLDALRLRSNTFGTRVVLYRADKDVDPKCRRCNGQMETLGHVLGSCTHTKPARMNRHNEIVHLIKEKASKTCAVFVEPTVMVLGELKKPDLVIKDQERLLVVDVTVRYEDKENLRKAAKEKIDKYKETAQLLKLKLKCKTATVLPIVVGCRGAMPESTKTNLTALGCTKGEQLTVAMIALRSSLEMANEFIDYNRII

SEQ ID NO: 303 - protein, 1203 aa, Lasioglossum morio
MDNEMDNGVDNTQMAQSDRNRRNTHSENSDHSERIISEQWEISDQCEISEQCEISEQCEISEQCETNERAGISEQIQISEVTVLVPLVDIDYCPVCQWLNKTIAFLNLNDLKEHLTESHNTTRVMWQCRKCNRKFPGIHNCRCHIPKCKNIVESQQLEHTCAICNNSFSSVRGLSAHERHRHPTERNRKRIEVCERPKGKPGRRNYVWTKEETEELIRLNTIYESDSLRNFAIQKHFPNKTLKQIRDKRSDLKRVGRLNNVPLSDSDSVDLTSEHTGLRINETCVTIVNNQNSDENEITEILEVNESAQEENNGLDLNLGSLDLPEDEEWKERFKTMIQANPLASNHELKSIEEMIIEVANKDQPDPLDTERVLEAFMEIINSGIEENRGSSRENRHGRGKNKRRECNHTRFKKYKYARFQELYKKCPRKLVDMAIAGETFERREKVELPEKAGIENLYGDLWGTEGPTTGIPRLGITPREDIPIKRVWTPISTEELITKMKRIKTNTAAGIDGITKAHLRKPGILYILSKFFNLLMLTESFPAQWRLNRTTLIPKPGKDARNAKNWRPITIGSLLSRMFSSMLDSRLRHVVRNSKRQKGFTMEDGCKQNIAILDRIITEMKQKTGGIVTVVDISKAFDTVPHKAIGDGLRRKGVPSMVTEYIEKMYEGCRTEIKTKEDSIKITLRRGVKQGDPLSPLLFNTIIDPIIDEIDGTTEGIQIGEETVSILAFADDLVLTARTKEEANRQAKELNDYLRGLGMSIQAEKCSTFEIVQKGKTWHVADPDIKIGEEKVPASEPGDTIGYLGVTIGPWKGLQRAQTEGIVRAAANIMKMNLKPDQKINLIRTHLLPKYIHLLVANPQTLDLLKSLDHEIKQIVKTILHLHPSTTDGLIYTEKKNGGLGMPKIADIVRIAKLRSSLQMMENEDEAVKEAYKKQEAITLKYAQSVGLRWPASMDEIENKKKELKENHRRRWEQLASQGQGIHEFFNDKVGNAWLHRPWLLKPSRYLDALRLRSNTFGTRVVLYRADKDVDPKCRRCNGQMETLGHVLGSCTHTKPARMNRHNEIVHLIKEKASRTCAVFVEPTVMVLGELKKPDLVIKDQERLLVVDVTVRYEDKENLRKAAKEKIDKYKETAQLLKLKLKCKTATVLPIVVGCRGAMPESTKTNLTALGCTKGEQLTVAMIALRSSLEMANEFIDYNRII

SEQ ID NO: 304 - protein, 1263 aa, Lasioglossum lativentre
MSTVTSGGRQWNADSNGPRGSVAGFPASAGGSTDDDHGESLDNEMDNGVDNTQMAETDRNVGKTQSERCEHMENSDHSEQCEINKQSETIEQRGISEQSELNELREQSETNEQMEINEVTVSVPLVDIDYCPVCQCLNKNVAFVNLNDLRKHLNEFHETVIVMWQCNKCFKKFPGLHNVRCHIPKCNNTVETRQLAHVCGICNNSFSSVRGLATHERHRHPTERNRKRIEICERPKGKPGRRNHVWTEEEIEKLIRLNDIYKNDSLPNVAIKNHFPNKTVKQIRDKRSDLKKANRLNNVPQNDSANVSANGSDRENINIRNSESDNELINHAGRYTGPRINGISMTVVNDENRDDNMFTEESPIRGSATEENNNGLDLNLGSLDLPEIEGWKGRFITAIKADPLPPEHELKSVEEMIMGSATKDLPDPLDTEIILEALMERLKIGDGENKGNSRKKANGRGNKRKESDRTRFKKFKYARFQELYKKCPKKLVDMAVAGETFERREQVELPERASIEKLYGDLWGAEGPTTGIPRLGLEPTADVPMERVWDPISVVEIIKKMKRIKTDTAAGMDGVTKAHLRKPGMLYILSKFFNLLMLTKSFPAQWRLNRTTLIPKPGKDTRDAKNWRPITIGSLLSRMYSSMLDNRLRYAIINSRRQKGFTREDGCKQNIAILDRIMAQMKENTGGIVTVVDISKAFDTVPHKAIGDGMRRKGIPSCVTEYVERMYDGCRTEIRTKEESIKITLRRGVKQGDPLSPLLFNTIIDPIIEDIDETTEGIQIGEENISILAFADDLVLIAKTKEEAKKQARKLNEYLQELGMSIQAEKCSTFQIVQKGKTWHVADPEIKIGEQKVPASEPGETISYLGVTLGPWKGLQRTQIKDIIRAAGNIKKMNLKPDQKINLIRTHLLPKYIHMLVANPPAMALLNSLDHEIKQIVKTILHLHPSTTDGLIYTKKRNGGLGMQKMADIVRIAMLRNSLQMMGNEDDAVKEAYKKQEAITLKYAQSVGLRWPVTMEEIMRAKMDLKESTRRRWEQQTSQGQGVHEFFDDTIGNAWLHRPWLLKPSRYLDALRLRSNTFGTRVVLHRADKDVDPKCRRCKGQMETLGHVLGSCTHTKPARMNRHNEIVHLIKKKTSKTCAVFVEPTVLVLGELKKPDLVIKDQERLFVVDVTVRYEDKENLRKAKKDKIDKYKETAQLLKLKLKCKTAEVLPIVVGCRGAMPETTKQNLKALGFTKGEQLTVAMIALRSSIEMANEFIDYDRII

SEQ ID NO: 305 - protein, 1300 aa, Lasioglossum lativentre
MSTVTSGGRQWNADSNGPRGSVAGFPASAGGSTDDDHGESLDNEMDNGVDNTQMAETDRNVGKTRSEHCEHCEHCEHCEYCEHGEHCEQSDNSEQRDNSVHREITGLSERIEISEITEVTVSVPLVNTDYCPVCQCLNKTVAFLNLNDLKKHLDENHEIVKVMWQCIKCLKKFPGLHNCRCHIPKCINTVETRQPEHVCGICNESFSSVRGLSTHERHRHPTERNRKRREICERPKGKPGRRNHVWTEEETVELIRLNAIYQNDSFPNVAIKKHFPSKTAKQISDKRSDLRKQNRLNSVTQSDRLNVSASVGASGIANTSANVNVNVSANINTNATTNISLNRNTNASANDNANVCDCDNVNSIYSENENGHTGPGINDIYMTTVNDENGNDNGFTVGSPINESATEENNGLDLNLGALDLPEFEEWKGRFRTVIQTNPLPSKHELKSIEEMIMGVAIKDQPDTLDTERVLEALIEKLKIGVDESKGNSRKKGNGQAKTKRKECDRTRFKKYKYARFQELYKKCPRKLVDMAVAGETFERREQIELPEKAGIEELYGDLWGTEGPTTGIPRLGGAQREDVPIERVWTPISVEELITKMKRIKTNTAAGIDGITKAHLRKPGILYILSKFFNLLMLTESFPAQWRLNRTTLIPKPGKDARVAKNWRPITIGSLLSRMYSSMLDNRLRHVVRNSRRQKGFTMEDGCKQNIAILDRIVTEMKQKTGGVVTVVDISKAFDTVPHKAIGDGLRRKGIPSTVTEYIEKMYEGCRTEIKTKEESIKITLKRGVKQGDPLSPLLFNTIIDPIIDEIDETTEGIQIGEEMVSILAFADDLVLTARTKEEADRQTQKLNDYLRELGMSIQAEKCSTFQIIQKGKTWHVADPEIKIGDRKVPDSEPGNTIGYLGVTLGPWKGLQRAPTEDIVRAAGNIKRMNLKPDQKINLIRTHLLPKYIHLLVANSPALVLLNSLDHEIKQIVKTILHLHPSTTDGLIYTERRNGGLGMPKMADIVRIAKLRNSLQMMENEDDAVKEAYKKQEAVTLKYAQSVGLRWPASMEEIQNARMGLKENTRKRWEQLKSQGQGVHEFFNDKVGNAWLHKPWLLKPSRYLDALRIRSNTFGTRVVLYRANKDVDPKCRRCKGQMETLGHVLGSCTHTKAARMNRHNEIVRLIAEKTSKTCAVFVEPTVMVLGELKKPDLVIKDQERLIVVDVTVRYEDKENLRKAMKDKIDKYKETAQVLKLKLKCKTAEVLPIVVGCRGAMPETTKTNLKSLGFTKGDQLTAAMIALRSSIEMANEFIDYDRII

SEQ ID NO: 306 - protein, 1203 aa, Lasioglossum morio
MDNEMDNGVDNTQMAQSDRNRRNTHSENSDHSERIISEQWEISDQCEISEQCEISEQCEISEQCETNERAGISEQLQISEVTVLVPLVDIDYCPVCQWLNKTIAFLNLNDLKEHLTESHNTTRVMWQCRKCNRKFPGIHNCRCHIPKCKNIVESQQLEHTCAICNNSFSSVRGLSAHERHRHPTERNRKRIEVCERPKGKPGRRNYVWTEEETEELIRLNTIYESDSLRNFAIQKHFPNKTLKQIRDKRSDLKRVGRLNNVPLSNSDSVDLTSEHTGLRINETCVTIVNNQNCDENEITEILEVNESAQEENNGLDLNLGSLDLPEDEEWKERFKTVIQANPLAPNHELKSIEELIIEVANKDQPDPLDTERVLEAFMEIINSGIEENRGSSRENRHGRGKNKRRECNHTRFKRYKYARFQELYKKCPRKLVDMAIAGETFERREKVELPEKAGIENLYGDLWGTEGPTTGIPRLGITPREDIPIKRVWTPISTEELITKMKRIKTNTAAGIDGITKAHLRKPGILYILSKFFNLLMLTESFPAQWRLNRTTLIPKPGKDARNAKNWRPITIGSLLSRMFSSMLDSRLRHVVRNSKRQKGFTMEDGCKQNIAILDRIITEMKQKTGGIVTVVDISKAFDTVPHKAIGDGLRRKGVPSMVTEYIEKMYEGCRTEIKTKEDSIKITLRRGVKQGDPLSPLLFNTIIDPIIDEIDGTTEGIQIGEETVSILAFADDLVLTARTKEEANRQAKELNDYLRGLGMSIQAEKCSTFEIVQKGKTWHVADPDIKIGEEKVPASEPGDTIGYLGVTIGPWKGLQRAQTEGIVRAAANIMKMNLKPDQKINLIRTHLLPKYIHLLVANPQTLDLLKSLDHEIKQIVKTILHLHPSTTDGLIYTEKRNGGLGMPKIADIVRIAKLRSSLQMMENEDEAVKEAYKKQEAITLKYAQSVGLRWPASMDEIENKKKELKENHRRRWEQLASQGQGIHEFFNDKVGNAWLHRPWLLKPSRYLDALRLRSNTFGTRVVLYRADKDVDPKCRRCNGQMETLGHVLGSCTHTKPARMNRHNEIVHLIKEKASRTCAVFVEPTVMVLGELKKPDLVIKDQERLLVVDVTVRYEDKENLRKAAKEKIDKYKETAQLLKLKLKCKTATVLPIVVGCRGAMPESTKTNLTALGCTKGEQLTVAMIALRSSLEMANEFIDYNRII

SEQ ID NO: 307 - protein, 1300 aa, Lasioglossum lativentre
MSTVTSGGRQWNADSNGPRGSVAGFPASAGGSTDDDHGESLDNEMDNGVDNTQMAETDRNVGKTRSEHCEHCEHCEHCEYCEHGEHCEQSDNSEQRDNSVHREITGLSERIEISEISEVTVSVPLVNTDYCPVCQCLNKTVAFLNLNDLKKHLDENHEIVKVMWQCIKCLKMFPGLHNCRCHIPKCINTVETRQLEHVCGICNESFSSVRGLSTHERHRHPTERNRKRREMCERPKGKPGRRNHVWTEEETVELIRLNAIYQNDSFPNVAIKKHFPSKTAKQISDKRSDLRKQNRLNSVTQSDRLNVSASVGASGIANTSANVNVNVSANINTNATTNISLNRNTNASANDNANVCDCDNVNSIYSENENGHTGPGINDIYMTTVNDENGNDNGFTVGSPINESATEENNGLDLNLGALDLPEFEEWKGRFRTVIQTNPLPSKHELKSIEEMIMGVAIKDQPDTLDTERVLEALLEKLKIGVDESKGNSRKKGNGQAKTKRKECDRTRFKKYKYARFQELYKKCPRKLVDMAVAGETFEKREQIELPEKAGIEELYGDLWGTEGPTTGIPRLGGAQREDVPIERVWTPISVEELITKMKRIKTNTAAGIDGITKAHLRKPGILYILSKFFNLLMLTESFPAQWRLNRTTLIPKPGKDARVAKNWRPITIGSLLSRMYSSMLDNRLRHVVRNSRRQKGFTMEDGCKQNIAILDRIVTEMKQKTGGVVTVVDISKAFDTVPHKAIGDGLRRKGIPSTVTEYIEKMYEGCRTEIKTKEESIKITLKRGVKQGDPLSPLLFNTIIDPIIDEIDETTEGIQIGEEMVSILAFADDLVLTARTKEEADRQTQKLNDYLRELGMSIQAEKCSTFQIIQKGKTWHVADPEIKIGDRKVPDSEPGNTIGYLGVTLGPWKGLQRAPTEDIVRAAGNIKRMNLKPDQKINLIRTHLLPKYIHLLVANSPALVLLNSLDHEIKQIVKTILHLHPSTTDGLIYTERRNGGLGMPKMADIVRIAKLRNSLQMMENEDDAVKEAYKKQEAVTLKYAQSVGLRWPASMEEIQNARMGLKENTRKRWEQLKSQGQGVHEFFNDKVGNAWLHKPWLLKPSRYLDALRIRSNTFGTRVVLYRANKDVDPKCRRCKGQMETLGHVLGSCTHTKAARMNRHNEIVRLIAEKTSKTCAVFVEPTVMVLGELKKPDLVIKDQERLIVVDVTVRYEDKENLRKAMKDKIDKYKETAQVLKLKLKCKTAEVLPIVVGCRGAMPETTKTNLKSLGFTKGDQLTAAMIALRSSIEMANEFIDYDRII

SEQ ID NO: 308 - protein, 1300 aa, Lasioglossum lativentre
MSTVTSGGRQWNADSNGPRGSVAGFPASAGGSTDDDHGESLDNEMDNGVDNTQMAETDRNVGKTRSEHCEHCEHCEHCEYCEHGEHCEQSDNSEQRDNSVHREITGLSERIEISEISEVTVSVPLVNTDYCPVCQCLNKTVAFLNLNDLKKHLDENHEIVKVMWQCIKCLKMFPGLHNCRCHIPKCINTVETRQLEHVCGICNESFSSVRGLSTHERHRHPTERNRKRREMCERPKGKPGRRNHVWTEEETVELIRLNAIYQNDSFPNVAIKKHFPSKTAKQISDKRNDLRKQNRLNSVTQSDRLNVSASVGASGIANTSANVNVNVSANINTNATTNISLNRNTNASANDNANVCDCDNVNSIYSENENGHTGPGINDIYMTTVNDENGNDNGFTVGSPINESATEENNGLDLNLGALDLPEFEEWKGRFRTVIQTNPLPSKHELKSIEEMIMGVAIKDQPDTLDTERVLEALIEKLKIGVDESKGNSRKKGNGQAKTKRKECDRTRFKKYKYARFQELYKKCPRKLVDMAVAGETFEKREQIELPEKAGIEELYGDLWGTEGPTTGIPRLGGAQREDVPIERVWTPISVEELITKMKRIKTNTAAGIDGITKAHLRKPGILYILSKFFNLLMLTESFPAQWRLNRTTLIPKPGKDARVAKNWRPITIGSLLSRMYSSMLDNRLRHVVRNSRRQKGFTMEDGCKQNIAILDRIVTEMKQKTGGVVTVVDISKAFDTVPHKAIGDGLRRKGIPSTVTEYIEKMYEGCRTEIKTKEESIKITLKRGVKQGDPLSPLLFNTIIDPIIDEIDETTEGIQIGEEMVSILAFADDLVLTARTKEEADRQTQKLNDYLRELGMSIQAEKCSTFQIIQKGKTWHVADPEIKIGDRKVPDSEPGNTIGYLGVTLGPWKGLQRAPTEDIVRAAGNIKRMNLKPDQKINLIRTHLLPKYIHLLVANSPALVLLNSLDHEIKQIVKTILHLHPSTTDGLIYTERRNGGLGMPKMADIVRIAKLRNSLQMMENEDDAVKEAYKKQEAVTLKYAQSVGLRWPASMEEIQNARMGLKENTRKRWEQLKSQGQGVHEFFNDKVGNAWLHKPWLLKPSRYLDALRIRSNTFGTRVVLYRANKDVDPKCRRCKGQMETLGHVLGSCTHTKAARMNRHNEIVRLIAEKTSKTCAVFVEPTVMVLGELKKPDLVIKDQERLIVVDVTVRYEDKENLRKAMKDKIDKYKETAQVLKLKLKCKTAEVLPIVVGCRGAMPETTKTNLKSLGFTKGDQLTAAMIALRSSIEMANEFIDYDRII

SEQ ID NO: 309 - protein, 1234 aa, Lasioglossum morio
MDTVYGYWQDYGHDFDKYLETTLQIIAQNIKLIMADTPNTQASDTELPDPGSSVTDLSVMEGVIYDDLDVIPAMPLVSVNGPYSIEVPLSTEQTECPQCKEKGVCQFFISLTDLENHIKAKHLRTVVHWMCQKCHKPFTKLHGARCHFPKCNGVPIEDNKTIHCTACTMRFETQRGLSMHERHMHPEVRNRKRQEDDAHKALNPGPGRKNTIWTREEENLLRELEPQYKSCKQPNKEIQKYIPNKTCKQISDKRQTLFYKQKAARSINEAEAGETNAVEIIANQEQASNDDSFSTGEANNALYNVETIVDPIEDDQTRWREALYQEANKADLTNTPNEIKELYHDIRATFQTYYDNQEEPTNKIDEFLEKLMSFMKNSTITDNKKGTNKHAYKSKDKQTDKNNKFNKSNKNNNNHANKINKNNNNNHANKCKKSNNKNKPNRNELRKYMYARCQEMYKECPKKLADLIVSHDEFTIKPPIPPPQSQAIKDQYADIWGTPGPENIPLKFNNPPPFKLMDFFFPVTAQEIALKIKKIKTNTAAGVDGIKKHHLLIDGIPIILANLFNMLLYTNHYPENWKINRTTLIPKPNKDLDNVSNWRPITISSLLSRMFSSIVDARMRTIIVQNMRQKGFTSENGCAQNTALLDNALSTCKLNLGGVFTILDISKAFDTIPHAMIEIGLKKRGIPTRIIELIKNMYRNCFTSIRARNNESVEIEIKRGVKQGDSLSPLLFNLSLEPLIEKLEECTTGLPINNSTDIAVLAFADDLVLLSKDKEEAQRQLNLVISYLDKLGMNVSASKCNTFEIKTKTDTWFVKDPKIKTHDGKLIPYADPQEILRYLGARIGPWKGMQCGIVVPEIIDLVKKIRTLPLKPQQKIDLIIRYILPRFTYQLLISPPSEGVLKLLDSEVRQQVKEILHLMTSTASGFFYTPRNQGGLGIPRFEHIIKLAVLKNAINLKNTMDPAVFGLINEKFDNKLKAIANSLRINWPASLDDIEKAKTRLKNEHLLQWKSLKSQGQGVKEFAEDKIGNLWLGSNDLKPSRFIDAIRLRTNTFGNKTTLARANKDIDVTCRRCHYQPETLGHILGLCQHTKSLRILRHDEIKNFIAEKNKRNSQIFIEPSFQVENNTYKPDLVIKNENSIFIVDVTVRYENKDYLQKAHFEKIDKYNACLGYLKNKFKKKEGEILPIVVGCRGALPPQTKKNLKNLGLNEHHMRTISLSALRCSIEIANIFIDD

SEQ ID NO: 310 - protein, 863 aa, Lasioglossum morio
MSFMKNSTITDNKKGTNKHAYKSKDKQTDKNNKFNKSNKNNNNHANKINKNNNNNHANKCKKSNNKNKPNRNELRKYMYARCQEMYKECPKKLADLIVSHDEFTIKPPIPPPQSQAIKDQYADIWGTPGPENIPLKFNNPPPFKLMDFFFPVTAQEIALKIKKIKTNTAAGVDGIKKHHLLIDGIPIILANLFNMLLYTNHYPENWKINRTTLIPKPNKDLDNVSNWRPITISSLLSRMFSSIVDARMRTIIVQNMRQKGFTSENGCAQNTALLDNALSTCKLNLGGVFTILDISKAFDTIPHAMIEIGLKKRGIPTRIIELIKNMYRNCFTSIRARNNESVEIEIKRGVKQGDSLSPLLFNLSLEPLIEKLEECTTGLPINNSTDIAVLAFADDLVLLSKDKEEAQRQLNLVISYLDKLGMNVSASKCNTFEIKTKTDTWFVKDPKIKTHDGKLIPYADPQEILRYLGARIGPWKGMQCGIVVPEIIDLVKKIRTLPLKPQQKIDLIIRYILPRFTYQLLISPPSEGVLKLLDSEVRQQVKEILHLMTSTASGFFYTPRNQGGLGIPRFEHIIKLAVLKNAINLKNTMDPAVFGLINEKFDNKLKAIANSLRINWPASLDDIEKAKTRLKNEHLLQWKSLKSQGQGVKEFAEDKIGNLWLGSNDLKPSRFIDAIRLRTNTFGNKTTLARANKDIDVTCRRCHYQPETLGHILGLCQHTKSLRILRHDEIKNFIAEKNKRNSQIFIEPSFQVENNTYKPDLVIKNENSIFIVDVTVRYENKDYLQKAHFEKIDKYNACLGYLKNKFKKKEGEILPIVVGCRGALPPQTKKNLKNLGLNEHHMRTISLSALRCSIEIANIFIDD

SEQ ID NO: 311 - protein, 1214 aa, Lasioglossum lativentre
MADAHNTQASDTELPGPGSSVTDSSVLEGVIYDDSEMIPVMPLVSVKGPYSIEVPLSTEQTECPQCKEKGACQFFVSLTDLEKHLKAKHLRTVVHWKCQKCHKPYTKLHAARCHFSKCKGAPNEDNKTIQCSGCSMRFETKRGLSTHERHMHPEIRNRKRQAEEARKNVDPGPGRKNMVWTREEENLLRELEPQYKSCRQPNKEIQKHIPYRSCKQISDKRVTLFSKQQVAININEVAATGTNAGEIIINQVQGPKDDSFSAGEGNNVESSAHPNEDDSNADPYEDDQTKWLEALFQEANNTDLTSTPKEVRELYCDIRATFQIYYDNHEEPTNKIEEFLKKLMLFFKNSVATDNKKGTGKHAQKSKDKQSDKNNKFNNNNKFNKSDRNNDNHASKTNKNNNNNNHANKKNRKSNNKNKTSRNQLRKYMYARCQELYKECPKKLADLIVSHDEFTIKPPIPPPQAQAIKDQYEDIWGISGPANIPLKFNNPSPFKLMDFFFPVTAQEIALKIKKIKTNTAAGVDGIKKHHLLMDGVPIILASLFNMLLYTNHYPESWKINRTTLIPKPNKDLNNVGNWRPITISSLISRIFSSLVDARMRTVIVQNMRQKGFTSENGCAQNTAMMDNALSTCKLNLGGVFTILDISKAFDTIPHAMIEIGLNKRGIPPRIIELIKNMYKQCFTSIKACNNESVEIEIKRGVKQGDSLSPLLFNLSLEPLLENLEEHTTGLSINNNVHIPVLAFADDLVLLSKDKEEAQRQLNFVTSYLNKLGMNISASKCNTFQIMTKKDTWFVIDPKIKTQDGKLIPYEDPQEVLRYLGAKIGPWKGMQCGIVVPEIIDLVKKIRTLPLKPQQKIDLLTRYILPRFIYQLLISPPSDGVLKLLDSEVRQQVKEILHLMTSTASGFFYTPRNKGGLGIPRFEHIIKLAVLKNAINLKNTMDPAVLGLINDKVENKLKAIANSLRINWPASLDDIEKAKARLKNEHLSQWMSLKSQGQGVKEFADDKIGNSWLASNALKPSRFIDAIRLRTNTFGNKTTLARAKKDIDVTCRRCHNQPETLGHILGLCQHTKSLRILRHDEIKKFIAEKNEPNNQTFIEPSFQMENNTYKPDLVIKNEKSIFIVDVTVRYENKDYLQKAHLEKISKYSACLGYLKNRFKIKEGEVLPIVVGCRGALPLTTQINLKKLGLNKHHMKTISLSALRCSIEIANIFIDD

SEQ ID NO: 312 - protein, 974 aa, Platycheirus albimanus
MRKAHPVEFDAQNIRTDKKSRWTDEETKMMAREEARLTNMSVRFMNVELAKIFPQRTLDAIKSNRKKQQYKDEVARYLREIEESTSPLPASSTSATEDPTPPHSSTHQPPINVEDNATNIINFLLEYPPPTTDDFRSNELTDIINNATSRGKEETKIQLGLYLLRVFPPSTNRRNNHNHTPQPPRNRRERRRLEYRTTQTNWRKHQQRCIESILDGPSAVAVPPQPVMEPYWRHILETTTMGNLEERNPSNHLQTIWKPISSEEIKATRPSLTTSPGPDGITPRKLRAIPDDIVLRIYNIILWCGGAPINLRKSRTIFIAKKPDSMEPGDFRPITVSSLLLRQLHAILAQRLANEIDLDPRQQAFVKADGCANNTTILDLMLRYHHSTHSSCYMASLDVAKAFDSVAHSALWTTLKSYGAPTTFIDYIKDSYLHSTTQLIGDNWTSDGITPKSGVKQGDPLSPILFNLIIDQLMKKYPKEIGCRIGSNTTNALAYADDVIVCASTEAGLQKLLDITSDFLKSCGLNINPAKCTTISIKGQPKQKNTVVIPRAYKINGRDIPYLLRTDTFKYLGLNFNPDGKCKVNLKDSLQTKLDRVTKAPLKPQQRLHILRTTLIPQLYHQLTLGSTHIGSLNKTDKIIRSYVKKWTNLPKDVPTPYFYATSKDGGLGLNALRWTAPLIRHRRLMRLKLPDLENSVVANTYIAMEIDKTNDRLRTNGQHLNTTTLINDYWKNKLYSSVDGSGLREAEQYPQAHRWITEPTTLLTGRDFLRCLRTRINALPSKSRTSRGRSSVDRHCRAGCQVPETLNHIVQQCHRTHDKRIDRHNSVINFIRRNACRDNLHTIEEPTIDTPEGIMKPDLVISFEDKAVVIDAQIVTDGRPLQQAHRRKAAKYNLQPVIDDIRERTGKDRVVFTTATLNWRGVWSKESVEQLLKFKVIKTTDTALISTRVLIGTHMCFRQFNQGTWMRRRIDPG

SEQ ID NO: 313 - protein, 974 aa, Platycheirus albimanus
MRKAHPVEFDAQNIRTDKKSRWTDEETKMMAREEARLTNMSVRFMNVELAKIFPQRTLDAIKSNRKKQQYKDEVARYLREIEESTSPLPASSTSATEDPTPPHSSTHQPPINVEDNATNIINFLLEYPPPTTDDFRSNELTDIINNATSRGKEETKIQLGLYLLRVFSPSTNRRNNHNHTPQPPRNRRERRRLEYRTTQTNWRKHQQRCIESILDGPSAVAVPPQPVMEPYWRHILETTTMGNLEERNPSNHLRTIWKPISSEEIKATRPSLTTSPGPDGITPRKLRAIPDDIVLRIYNIILWCGGAPINLRKSRTIFIAKKPDSMEPGDFRPITVSSLLLRQLHAILAQRLANEIDLDPRQQAFVKADGCANNTTILDLMLRYHHSTHSSCYMASLDVAKAFDSVAHSALWTTLKSYGAPTTFIDYIKDSYLHSTTQLIGDNWTSDGITPKSGVKQGDPLSPILFNLIIDQLMKKYPKEIGCRIGSNTTNALAYADDVIVCASTEAGLQKLLDITSDFLKSCGLNINPAKCTTISIKGQPKQKNTVVIPRAYKINGRDIPYLLRTDTFKYLGLNFNPDGKCKVNLKDSLQTKLDRVTKAPLKPQQRLHILRTTLIPQLYHQLTLGSTHIGSLNKTDKIIRSYVKKWTNLPKDVPTPYFYATSKDGGLGLNALRWTAPLIRHRRLMRLKLPDLENSVVANTYIAMEIDKTNDRLRTNGQHLNTTTLINDYWKNKLYSSVDGSGLREAEQYPQAHRWITEPTTLLTGRDFLRCLRTRINALPSKSRTSRGRSSVDRHCRAGCQVPETLNHIVQQCHRTHDKRIDRHNSVINFIRRNACRDNLHTIEEPTIDTPEGIMKPDLVISFEDKAVVIDAQIVTDGRPLQQAHRRKAAKYNLQPVIDDIRERTGKDRVVFTTATLNWRGVWSKESVEQLLKFKVIKTTDTALISTRVLIGTHMCFRQFNQGTWMRRRIDPG

SEQ ID NO: 314 - protein, 974 aa, Platycheirus albimanus
MRKAHPVEFDAQNIRTDKKSRWTDEETKMMAREEARLTNMSVRFMNVELAKIFPQRTLDAIKSNRKKQQYKDEVARYLREFEESTSPLPASSTSATEDPTPPHSSTHQPPINVEDNATNIINFLLEYPPPTTDDFRSNELTDIINNATSRGKEETKIQLGLYLLRVFPPSTNRRNNHNHTPQPPRNRRERRRLEYRTTQTNWRKHQQRCIESILDGPSAVAVPPQPVMEPYWRHILETTTMGNLEERNPSNHLRTIWKPISSEEIKATRPSLTTSPGPDGITPRKLRAIPDDIVLRIYNIILWCGGAPINLRKSRTIFIAKKPDSMEPGDFRPITVSSLLLRQLHAILAQRLANEIDLDPRQQAFVKADGCANNTTILDLMLRYHHSTHSSCYMASLDVAKAFDSVAHSALWTTLKSYGAPTTFIDYIKDSYLHSTTQLIGNNWTSDGITPKSGVKQGDPLSPILFNLIIDQLMKKYPKEIGCRIGSNTTNALAYADDVIVCASTEAGLQKLLDITSDFLKSCGLNINPAKCTTISIKGQPKQKNTVVIPRAYKINGRDIPYLLRTDTFKYLGLNFNPDGKCKVNLKDSLQTKLDRVTKAPLKPQQRLHILRTTLIPQLYHQLTLGSTHIGSLNKTDKIIRSYVKKWTNLPKDVPTPYFYATSKDGGLGLNALRWTAPLIRHRRLMRLKLPDLENSVVANTYIAMEIDKTNDRLRTNGQHLNTTTLINDYWKNKLYSSVDGSGLREAEQYPQAHRWITEPTTLLTGRDFLRCLRTRINALPSKSRTSRGRSSVDRHCRAGCQVPETLNHIVQQCHRTHDKRIDRHNSVINFIRRNACRDNLHTIEEPTIDTPEGIMKPDLVISFEDKAVVIDAQIVTDGRPLQQAHRRKAAKYNLQPVIDDIKERTGKDRVVFTTATLNWRGVWSKESVEQLLKFKVIKTTDTALISTRVLIGTHMCFRQFNQGTWMRRRIDPG

SEQ ID NO: 315 - protein, 974 aa, Platycheirus albimanus
MRKAHPVEFDAQNIRTDKKSRWTDEETKMMAREEARLTNMSVRFMNVELAKIFPQRTLDAIKSNRKKQQYKDEVARYLREIEESTSPLPASSTSATEDPTPPHSSTHQPPINVEDNATNIINFLLEYPPPTTDDFRSNELTDIINNATSRGKEETKIQLGLYLLRVFPPSTNRRNNHNHTPQPPRNRRERRRLEYRTTQTNWRKHQQRCIESILDGPSAVAVPPQPVMEPYWRHILETTTMGNLEERNPSNHLRTIWKPISSEEIKATRPSLTTSPGPDGITPRKLRAIPDDIVLRIYNIILWCGGAPINLRKSRTIFIAKKPDSMEPGDFRPITVSSLLLRQLHAILAQRLANEIDLDPRQQAFVKADGCANNTTILDLMLRYHHSTHSSCYMASLDVAKAFDSVAHSALWTTLKSYGAPTTFIDYIKDSYLHSTTQLIGDNWTSDGITPKSGVKQGDPLSPILFNLIIDQLMKKYPKEIGCRIGSNTTNALAYADDVIVCASTEAGLQKLLDITSDFLKSCGLNINPAKCTTISIKGQPKQKNTVVIPRAYKINGRDIPYLLRTDTFKYLGLNFNPDGKCKVNLKDSLQTKLDRVTKAPLKPQQRLHILRTTLIPQLYHQLTLGSTHIGSLNKTDKIIRSYVKKWTNLPKDVPTPYFYATSKDGGLGLNALRWTAPLIRHRRLMRLKLPDLENSVVANTYIAMEIDKTNDRLRTNGQHLNTTTLINDYWKNKLYSSVDGSGLREAEQYPQAHRWITEPTTLLTGRDFLRCLRTRINALPSKSRTSRGRSSVDRHCRAGCQVPETLNHIVQQCHRTHDKRIDRHNSVINFIRRNACRDNLHTIEEPTIDTPEGIMKPDLVISFEDKAVVIDAQIVTDGRPLQQAHRRKAAKYNLQPVIDDIRERTGKDRVVFTTATLNWRGVWSKESVEQLLKFKVIKTTDTALISTRVLIGTHMCFRQFNQGTWMRRRIDPG

SEQ ID NO: 316 - protein, 973 aa, Platycheirus albimanus
MRKAHPVEFDAQNIRTDKKSRWTDEETKMMAREEARLTNMSVRFMNVELAKIFPQRTLDAIKSNRKKQQYKNEVARYLREIEESTSPLPASSTSATEDPTPPHSSTHQPPINVEDNATNIINFLLEYPPPTTDDFRSNELTDIINNATSRGKEETKIQLGLYLLRVFPPSTNRRNNHNHTPQPPRNRRERRRLEYRTTQTNWRKHQQRCIESILDGPSAVAVPPQPVMEPYWRHILETTTMGNLEERNPSNHLRTIWKPISSEEIKATRPSLTTSPGPDGITPRKLRAIPDDIVLRIYNIILWCGGAPINLRKSRTIFIAKKPDSMEPGDFRPITVSSLLLRQLHAILAQRLANEIDLDPRQQAFVKADGCANNTTILDLMLRYHHSTHSSCYMASLDVAKAFDSVAHSALWTTLKSYGAPTTFIDYIKDSYLHSTTQLIGDNWTSDGITPKSGVKQGDPLSPILFNLIIDQLMKKYPKEIGCRIGSNTTNALAYADDVIVCASTEAGLQKLLDITSDFLKSCGLNINPAKCTTISIKGQPKQKNTVVIPRAYKINGRDIPYLLRTDTFKYLGLNFNPDGKCKVNLKDSLQTKLDRVTKAPLKPQQRLHILRTTLIPQLYHQLTLGSTHIGSLNKTDKIIRSYVKKWTNLPKDVPTPYFYATSKDGGLGLNALRWTAPLIRHRRLMRLKLPDLENSVVANTYIAMEIDKTNDRLRTNGQHLNTTTLINDYWKNKLYSSVDGSGLREAEQYPQAHRWITEPTTLLTGRDFLRCLRTRINALPSKSRTSRGRSSVDRHCRAGCQVPETLNHIVQQCHRTHDKRIDRHNSVINFIRRNACRDNLHTIEEPTIDTPEGIMKPDLVISFEDKAVVIDAQIVTDGRPLQQAHRRKAAKYNLQPVIDDIRERTGKDRVVFTTATLNWRCLVKESVEQLLKFKVIKTTDTALISTRVLIGTHMCFRQFNQGTWMRRRIDPG

SEQ ID NO: 317 - protein, 974 aa, Platycheirus albimanus
MRKAHPVEFDAQNIRTDKKSRWTDEETKMMAREEARLTNMSVRFMNVELAKIFPQRTLDAIKSNRKKQQYKDEVARYQREIEESTSPLPASSTSATEDPTPPHSSTHQPPINVEDNATNIINFLLEYPPPTTDDFRSNELTDIINNATSRGKEETKIQLGLYLLRVFPPSTNRRNNHNHTPQPPRNRRERRRLEYRTTQTNWRKHQQRCIESILDGPSAVAVPPQPVMEPYWRHILETTTMGNLEERNPSNHLRTIWKPISSEEIKATRPSLTTSPGPDGITPRKLRAIPDDIVLRIYNIILWCGGAPINLRKSRTIFIAKKPDSMEPGDFRPITVSSLLLRQLHAILAQRLANEIDLDPRQQAFVKADGCANNTTILDLMLRYHHSTHSSCYMASLDVAKAFDSVAHSALWTTLKSYGAPTTFIDYIKDSYLHSTTQLIGDNWTSDGITPKSGVKQGDPLSPILFNLIIDQLMKKYPKEIGCRIGSNTTNALAYADDVIVCASTEAGLQKLLDITSDFLKSCGLNINPAKCTTISIKGQPKQKNTVVIPRAYKINGRDIPYLLRTDTFKYLGLNFNPDGKCKVNLKDSLQTKLDRVTKAPLKPQQRLHILRTTLIPQLYHQLTLGSTHIGSLNKTDKIIRSYVKKWTNLPKDVPTPYFYATSKDGGLGLNALRWTAPLIRHRRLMRLKLPDLENSVVANTYIAMEIDKTNDRLRTNGQHLNTTTLINDYWKNKLYSSVDGSGLREAEQYPQAHRWITEPTTLLTGRDFLRCLRTRINALPSKSRTSRGRSSVDRHCRAGCQVPETLNHIVQQCHRTHDKRIDRHNSVINFIRRNACRDNLHTIEEPTIDTPEGIMKPDLVISFEDKAVVIDAQIVTDGRPLQQAHRRKAAKYNLQPVIDDIRERTGKDRVVFTTATLNWRGVWSKESVEQLLKFKVIKTTDTALISTRVLIGTHMCFRQFNQGTWMRRRIDPG

SEQ ID NO: 318 - protein, 1018 aa, Platycheirus albimanus
MRKAHPVEFDAQNIRTDKKSRWTDEETKMMAREEARLTNMSVRFMNVELAKIFPQRTLDAIKSNRKKQQYKDEVARYLREIEESTSPLPASSTSATEDPTPPHSSTHQPPINVEDNATNIINFLLEYPPPTTDDFRSNELTDIINNATSRGKEETKIQLGLYLLRVFPPSTNRRNNHNHTPQPPRNRRERRRLEYRTTQTNWRKHQQRCIESILDGPSAVAVPPQPVMEPYWRHILETTTMGNLEERNPSNHLRTIWKPISSEEIKATRPSLTTSPGPDGITPRKLRAIPDDIVLRIYNIWKPISSEEIKATRPSLTTSPGPDGITPRKLRAIPDDIVLRIYNIILWCGGAPINLRKSRTIFIAKKPDSMEPGDFRPITVSSLLLRQLHAILAQRLANEIDLDPRQQAFVKADGCANNTTILDLMLRYHHSTHSSCYMASLDVAKAFDSVAHSALWTTLKSYGAPTTFIDYIKDSYLHSTTQLIGDNWTSDGITPKSGVKQGDPLSPILFNLIIDQLMKKYPKEIGCRIGSNTTNALAYADDVIVCASTEAGLQKLLDITSDFLKSCGLNINPAKCTTISIKGQPKQKNTVVIPRAYKINGRDIPYLLRTDTFKYLGLNFNPDGKCKVNLKDSLQTKLDRVTKAPLKPQQRLHILRTTLIPQLYHQLTLGSTHIGSLNKTDKIIRSYVKKWTNLPKDVPTPYFYATSKDGGLGLNALRWTAPLIRHRRLMRLKLPDLENSVVANTYIAMEIDKTNDRLRTNGQHLNTTTLINDYWKNKLYSSVDGSGLREAEQYPQAHRWITEPTTLLTGRDFLRCLRTRINALPSKSRTSRGRSSVDRHCRAGCQVPETLNHIVQQCHRTHDKRIDRHNSVINFIRRNACRDNLHTIEEPTIDTPEGIMKPDLVISFEDKAVVIDAQIVTDGRPLQQAHRRKAAKYNLQPVIDDIRERTGKDRVVFTTATLNWRGVWSKESVEQLLKFKVIKTTDTALISTRVLIGTHMCFRQFNQGTWMRRRIDPG

SEQ ID NO: 319 - protein, 974 aa, Platycheirus albimanus
MRKAHPVEFDAQNIRTDKKSRWTDEETKMMAREEARLTNMSVRFMNVELAKIFPQRTLDAIKSNRKKQQYKDEVARYLREIEESTSPLPASSTSATEDPTPPHSSTHQPPINVEDNATNIINFLLEYPPPTTDDFRSNELTDIINNATSRGKEETKIQLGLYLLRVFPPSTNRRNNHNHTPQPPRNRRERRRLEYRTTQTNWRKHQQRCIESILDGPSAVAVPPQPVMEPYWRHILETTTMGNLEERNPSNHLRTIWKPISSEEIKATRPSLTTSPGPDGITPRKLRAIPDDIVLRIYNIILWCGGAPINLRKSRTIFIAKKPDSMEPGDFRPITVSSLLLRQLHAILAQRLANEIDLDPRQQAFVKADGCANNTTILDLMLRYHHSTHSSCYMASLDVAKAFDSVAHSALWTTLKSYGAPTTFIDYIKDSYLHSTTQLIGDNWTSDGITPKSGVKQGDPLSPILFNLIIDQLMKKYPKEIGCRIGSNTTNALAYADDVIVCASTEAGLQKLLDITSDFLKSCGLNINPAKCTTISIKGQPKQKNTVVIPRAYKINGRDIPYLLRTDTFKYLGLNFNPDGKCKVNLKDSLQTKLDRVTKAPLKPQQRLHILRTTLIPQLYHQLTLGSTHIGSLNKTDKIIRSYVKKWTNLPKDVPTPYFYATSKDGGLGLNALRWTAPLIRHRRLMRLKLPDLENSVVANTYIAMEIDKTNDRLRTNGQHLNTTTLINDYWKNKLYSSVDGSGLREAEQYPQAHRWITEPTTLLTGRDFLRCLRTRINALPSKSRTSRGRSSVDRHCRAGCQVPETLNHIVQQCHRTHDKRIDRHNSVINFIRRNACRDNLPTIEEPTIGTPEGIMKPDLVISFEDKAVVIDAQIVTDGRPLQQAHRRKAAKYNLQPVIDDIRERTGKDRVVFTTATLNWRGVWSKESVEQLLKFKVIKTTDTALISTRVLIGTHMCFRQFNQGTWMRRRIDPG

SEQ ID NO: 320 - protein, 974 aa, Platycheirus albimanus
MRKAHPVEFDAQNIRTDKKSRWTDEETKMMAREEARLTNMSVRFMNVELAKIFPQRTLDAIKSNRKKQQYKDEVARYLREIEESTSPLPASSTSATEDPTPPHSSTHQPPINVEDNATNIINFLLEYPPPTTDDFRSNELTDIINNATSRGKEETKIQLGLYLLRVFPPSTNRRNNHNHTPQPPRNRRERRRLEYRTTQTNWRKHQQRCIESILDGPSAVAVPPQPVMEPYWRHILETTTMGNLEERNPSNHLQTIWKPISSEEIKATRPSLTTSPGPDGITPRKLRAIPDDIVLRIYNIILWCGGAPINLRKSRTIFIAKKPDSMEPGDFRPITVSSLLLRQLHAILAQRLANEIDLDPRQQAFVKADGCANNTTILDLMLRYHHSTHSSCYMASLDVAKAFDSVAHSALWTTLKSYGAPTTFIDYIKDSYLHSTTQLIGDNWTSDGITPKSGVKQGDPLSPILFNLIIDQLMKKYPKEIGCRIGSNTTNALAYADDVIVCASTEAGLQKLLDITSDFLKSCGLNINPAKCTTISIKGQPKQKNTVVIPRAYKINGRDIPYLLRTDTFKYLGLNFNPDGKCKVNLKDSLQTKLDRVTKAPLKPQQRLHILRTTLIPQLYHQLTLGSTHIGSLNKTDKIIRSYVKKWTNLPKDVPTPYFYATSKDGGLGLNALRWTAPLIRHRRLMRLKLPDLENSVVANTYIAMEIDKTNDRLRTNGQHLNTTTLINDYWKNKLYSSVDGSGLREAEQYPQAHRWITEPTTLLTGRDFLRCLRTRINALPSKSRTSRGRSSVDRHCRAGCQVPETLNHIVQQCHRTHDKRIDRHNSVINFIRRNACRDNLHTIEEPTIDTPEGIMKPDLVISFEDKAVVIDAQIVTDGRPLQQAHRRKAAKYNLQPVIDDIRERTGKDRVVFTTATLNWRGVWTKESVEQLLKFKVIKTTDTALISTRVLIGTHMCFRQFNQGTWMRRRIDPG

SEQ ID NO: 321 - protein, 974 aa, Platycheirus albimanus
MRKAHPVEFDAQNIRTDKKSRWTDEETKMMAREEARLTNMSVRFMNVELAKIFPQRTLDAIKSNRKKQQYKDEVARYLREIEDSTSPLPASSTSATEDPTPPHSSTHQPPINVEDNATNIINFLLEYPPPTTDDFRSNELTDIINNATSRGKEETKIQLGLYLLRVFPPSTNRRNNHNHTPQPPRNRRERRRLEYRTTQTNWRKHQQRCIESILDGPSAVAVPPQPVMEPYWRHILETTTMGNLEERNPSNHLQTIWKPISSEEIKATRPSLTTSPGPDGITPRKLRAIPDDIVLRIYNIILWCGGAPINLRKSRTIFIAKKPDSMEPGDFRPITVSSLLLRQLHAILAQRLANEIDLDPRQQAFVKADGCANNTTILDLMLRYHHSTHSSCYMASLDVAKAFDSVAHSALWTTLKSYGAPTTFIDYIKDSYLHSTTQLIGDNWTSDGITPKSGVKQGDPLSPILFNLIIDQLMKKYPKEIGCRIGSNTTNALAYADDVIVCASTEAGLQKLLDITSDFLKSCGLNINPAKCTTISIKGQPKQKNTVVIPRAYKINGRDIPYLLRTDTFKYLGLNFNPDGKCKVNLKDSLQTKLDRVTKAPLKPQQRLHILRTTLIPQLYHQLTLGSTHIGSLNKTDKIIRSYVKKWTNLPKDVPTPYFYATSKDGGLGLNALRWTAPLIRHRRLMRLKLPDLENSVVANTYIAMEIDKTNDRLRTNGQHLNTTTLINDYWKNKLYSSVDGSGLREAEQYPQAHRWITEPTTLLTGRDFLRCLRTRINALPSKSRTSRGRSSVDRHCRAGCQVPETLNHIVQQCHRTHDKRIDRHNSVINFIRRNACRDNLHTIEEPTIDTPEGIMKPDLVISFEDKAVVIDAQIVTDGRPLQQAHRRKAAKYNLQPVIDDIRERTGKDRVVFTTATLNWRGVWSKESVEQLLKFKVIKTTDTALISTRVLIGTHMCFRQFNQGTWMRRRIDPG

SEQ ID NO: 322 - protein, 974 aa, Platycheirus albimanus
MRKAHPVEFDAQNIRTDKKSRWTDEETKMMAREEARLTNMSVRFMNVELAKIFPQRTLDAIKSNRKKQQYKDEVARYLREIEESTSPLPASSTSATEDPTPPHSSTHQPPINVEDNATNIINFLLEYPPPTTDDFRSNELTDIINNATSRGKEETKIQLGLYLLRVFPPSTNRRNNHNHTPQPPRNRRERRRLEYRTTQTNWRKHQQRCIESILDGPSAVAVPPQPVMEPYWRHILETTTMGNLEERNPSNHLQTIWKPISSEEIKATRPSLTTSPGPDGITPRKLRAIPDDIVLRIYNIILWCGGAPINLRKSRTIFIAKKPDSMEPGDFRPITVSSLLLRQLHAILAQRLANEIDLDPRQQAFVKADGCANNTTILDLMLRYHHSTHSSCYMASLDVAKAFDSVAHSALWTTLKSYGAPTTFIDYIKDSYLHSTTQLIGDNWTSDGITPKSGVKQGDPLSPILFNLIIDQLMKKYPKEIGCRIGSNTTNALAYADDVIVCASTEAGLQKLLDITSDFLKSCGLNINPAKCTTISIKGQPKQKNTVVTPRAYKINGRDIPYLLRTDTFKYLGLNFNPDGKCKVNLKDSLQTKLDRVTKAPLKPQQRLHILRTTLIPQLYHQLTLGSTHIGSLNKTDKIIRSYVKKWTNLPKDVPTPYFYATSKDGGLGLNALRWTAPLIRHRRLMRLKLPDLENSVVANTYIAMEIDKTNDRLRTNGQHLNTTTLINDYWKNKLYSSVDGSGLREAEQYPQTHRWITEPTTLLTGRDFLRCLRTRINALPSKSRTSRGRSSVDRHCRAGCQVPETLNHIVQQCHRTHDKRIDRHNSVINFIRRNACRDNLHTIEEPTIDTPEGIMKPDLVISFEDKAVVIDAQIVTDGRPLQQAHRRKAAKYNLQPVIDDIRERTGKDRVVFTTATLNWRGVWSKESVEQLLKFKVIKTTDTALISTRVLIGTHMCFRQFNQGTWMRRRIDPG

SEQ ID NO: 323 - protein, 974 aa, Platycheirus albimanus
MRKAHPVEFDAQNIRTDKKSRWTDEETKMMAREEARLTNMSVRFMNVELAKIFPQRTLDAIKSNRKKQQYKDEVARYLREIEESTSPLPASSTSATEDPTPPHSSTHQPPINVEDNATNIINFLLEYPPPTTDDFRSNELTDIINNATSRGKEETKIQLGLYLLRVFPPSTNRRNNHNHTPQPPRNRRERRRLEYRTTQTNWRKHQQRCIESILDGPSAVAVPPQPVMEPYWRHILETTTMGNLEELNPSNHLRTIWKPISSEEIKATRPSLTTSPGPDGITPRKLRAIPDDIVLRIYNIILWCGGAPINLRKSRTIFIAKKPDSMEPGDFRPITVSSLLLRQLHAILAQRLANEIDLDPRQQAFVKADGCANNTTILDLMLRYHHSTHSSCYMASLDVAKAFDSVAHSALWTTLKSYGAPTTFIDYIKDSYLHSTTQLIGDNWTSDGITPKSGVKQGDPLSPILFNLIIDQLMKKYPKEIGCRIGSNTTNALAYADDVIVCASTEAGLQKLLDITSDFLKSCGLNINPAKCTTISIKGQPKQKNTVVIPRAYKINGRDIPYLLRTDTFKYLGLNFNPDGKCKVNLKDSLQTKLDRVTKAPLKPQQRLHILRTTLIPQLYHQLTLGSTHIGSLNKTDKIIRSYVKKWTNLPKDVPTPYFYATSKDGGLGLNALRWTAPLIRHRRLMRLKLPDLENSVVANTYIAMEIDKTNDRLRTNGQHLNTTTLINDYWKNKLYSSVDGSGLREAEQYPQAHRWITEPTTLLTGRDFLRCLRTRINALPSKSRTSRGRSSVDRHCRAGCQVPETLNHIVQQCHRTHDKRIDRHNSVINFIRRNACRDNLHTIEEPTIDTPEGIMKPDLVISFEDKAVVIDAQIVTDGRPLQQAHRRKAAKYNLQPVIDDIRERTGKDRVVFTTATLNWRGVWSKESVEQLLKFKVIKTTDTALISTRVLIGTHMCFRQFNQGTWMRRRIDPG

SEQ ID NO: 324 - protein, 1032 aa, Platycheirus albimanus
MTLLINNYNEPRINNSGSSDPGNQQNNNIPPIPNPNPESFTCPICNRPFTKKTGLGLHMRKAHPVEFDAQNIRTDKKSRWTDEETKMMAREEARLTNMSVRFMNVELAKIFPQRTLDAIKSNRKKQQYKDEVARYLREIEESTSPLPASSTSATEDPTPPHSSTHQPPINVEDNATNIINFLLEYPPPTTDDFRSNELTDIINNATSRGKEETKIQLGLYLLRVFPPSTNRRNNHNHTPQPPRNRRERRRLEYRTTQTNWRKHQQRCIESILDGPSAVAVPPQPVMEPYWRHILETTTMGNLEERNPSNHLRTIWKPISSEEIKATRPSLTTSPGPDGITPRKLRAIPDDIVLRIYNIILWCGGAPINLRKSRTIFIAKKPDSMEPGDFRPITVSSLLLRQLHAILAQRLANEIDLDPRQQAFVKADGCANNTTILDLMLRYHHSTHSSCYMASLDVAKAFDSVAHSALWTTLKSYGAPTTFIDYIKDSYLHSTTQLIGDNWTSDGITPKSGVKQGDPLSPILFNLIIDQLMKKYPKEIGCRIGSNTTNALAYADDVIVCASTEAGLQKLLDITSDFLKSCGLNINPAKCTTISIKGQPKQKNTVVIPRAYKINGRDIPYLLRTDTFKYLGLNFNPDGKCKVNLKDSLQTKLDRVTKAPLKPQQRLHILRTTLIPQLYHQLTLGSTHIGSLNKTDKIIRSYVKKWTNLPKDVPTPYFYATSKDGGLGLNALRWTAPLIRHRRLMRLKLPDLENSVVANTYIAMEIDKTNDRLRTNGQHLNTTTLINDYWKNKLYSSVDGSGLREAEQYPQAHRWITEPTTLLTGRDFLRCLRTRINALPSKSRTSRGRSSVDRHCRAGCQVPETLNHIVQQCHRTHDKRIDRHNSVINFIRRNACRDNLHTIEEPTIDTPEGIMKPDLVISFEDKAVVIDAQIVTDGRPLQQAHRRKAAKYNLQPVIDDIRERTGKDRVVFTTATLNWRGVWSKESVEQLLKFKVIKTTDTALISTRVLIGTHMCFRQFNQGTWMRRRIDPG

SEQ ID NO: 325 - protein, 974 aa, Platycheirus albimanus
MRKAHPVEFDAQNIRTDKKSRWTDEETKMMAREEARLTNMSVRFMNVELAKIFPQRTLDAIKSNRKKQQYKDEVARYLREIEESTSPLPASSTSATEDPTPPHSSTHQPPINVEDNATNIINFLLEYPPPTTDDFRSNELTDIINNATSRGKEETKIQLGLYLLRVFPPSTNRRNNHNHTPQPPRNRRERRRLEYRTTQTNWRKHQQRCIESILDGPSAVAVPPQPVMEPYWRHILETTTMGNLEERNPSNHLRTIWKPISSEEIKATRPSLTTSPGPDGITPRKLRAIPDDIVLRIYNIILWCGGAPINLRKSRMIFIAKKPDSMEPGDFRPITVSSLLLRQLHAILAQRLANEIDLDPRQQAFVKADGCANNTTILDLMLRYHHSTHSSCYMASLDVAKAFDSVAHSALWTTLKSYGAPTTFIDYIKDSYLHSTTQLIGDNWTSDGITPKSGVKQGDPLSPILFNLIIDQLMKKYPKEIGCRIGSNTTNALAYADDVIVCASTEAGLQKLLDITSDFLKSCGLNINPAKCTTISIKGQPKQKNTVVIPRAYKINGRDIPYLLRTDTFKYLGLNFNPDGKCKVNLKDSLQTKLDRVTKAPLKPQQRLHILRTTLIPQLYHQLTLGSTHIGSLNKTDKIIRSYVKKWTNLPKDVPTPYFYATSKDGGLGLNALRWTAPLIRHRRLMRLKLPDLENSVVANTYIAMEIDKTNDRLRTNGQHLNTTTLINDYWKNKLYSSVDGSGLREAEQYPQAHRWITEPTTLLTGRDFLRCLRTRINALPSKSRTSRGRSSVDRHCRAGCQVPETLNHIVQQCHRTHDKRIDRHNSVINFIRRNACRDNLHTIEEPTIDTPEGIMKPDLVISFEDKAVVIDAQIVTDGRPLQQAHRRKAAKYNLQPVIDDIRERTGKDRVVFTTATLNWRGVWSKESVEQLLKFKVIKTTDTALISTRVLIGTHMCFRQFNQGTWMRRRIDPG

SEQ ID NO: 326 - protein, 974 aa, Platycheirus albimanus
MRKAHPVEFDAQNIRTDKKSRWTDEETKMMAREEARLTNMSVRFMNVELAKIFPQRTLDAIKSNRKKQQYKDEVARYLREIEESTSPLPASSTSATEDPTPPHSSTHQPPINVEDNATNIINFLLEYPPPTTDDFRSNELTDIINNATSRGKEETKIQLGLYLLRVFPPSTNRRNNHNHTPQPPRNRRERRRLEYRTTQTNWRKHQQRCIESILDGPSAVAVPPQPVMEPYWRHILKTTTMGNLEERNPSNHLQTIWKPISSEEIKATRPSLTTSPGPDGITPRKLRAIPDDIVLRIYNIILWCGGAPINLRKSRTIFIAKKPDSMEPGDFRPITVSSLLLRQLHAILAQRLANEIDLDPRQQAFVKADGCANNTTILDLMLRYHHSTHSSCYMASLDVAKAFDSVAHSALWTTLKSYGAPTTFIDYIKDSYLHSTTQLIGDNWTSDGITPKSGVKQGDPLSPILFNLIIDQLMKKYPKEIGCRIGSNTTNALAYADDVIVCASTEAGLQKLLDITSDFLKSCGLNINPAKCTTISIKGQPKQKNTVVTPRAYKINGRDIPYLLRTDTFKYLGLNFNPDGKCKVNLKDSLQTKLDRVTKAPLKPQQRLHILRTTLIPQLYHQLTLGSTHIGSLNKTDKIIRSYVKKWTNLPKDVPTPYFYATSKDGGLGLNALRWTAPLIRHRRLMRLKLPDLENSVVANTYIAMEIDKTNDRLRTNGQHLNTTTLINDYWKNKLYSSVDGSGLREAEQYPQAHRWITEPTTLLTGRDFLRCLRTRINALPSKSRTSRGRSSVDRHCRAGCQVPETLNHIVQQCHRTHDKRIDRHNSVINFIRRNACRDNLHTIEEPTIDTPEGIMKPDLVISFEDKAVVIDAQIVTDGRPLQQAHRRKAAKYNLQPVIDDIRERTGKDRVVFTTATLNWRGVWSKESVEQLLKFKVIKTTDTALISTRVLIGTHMCFRQFNQGTWMRRRIDPG

SEQ ID NO: 327 - protein, 918 aa, Platycheirus albimanus
MTLLIKSNRKKQQYKDEVARYLREIEESTSPLPASSTSATEDPTPPHSSTHQPPINVEDNATNIINFLLEYPPPTTDDFRSNELTDIINNATSRGKEETKIQLGLYLLRVFPPSTNRRNNHNHTPQPPRNRRERRRLEYRTTQTNWRKHQQRCIESILDGPSAVAVPPQPVMEPYWRHILETTTMGNLEERNPSNHLQTIWKPISSEEIKATRPSLTTSPGPDGITPRKLRAIPDDIVLRIYNIILWCGGAPINLRKSRTIFIAKKPDSMEPGDFRPITVSSLLLRQLHAILAQRLANEIDLDPRQQAFVKADGCANNTTILDLMLRYHHSTHSSCYMASLDVAKAFDSVAHSALWTTLKSYGAPTTFIDYIKDSYLHSTTQLIGDNWTSDGITPKSGVKQGDPLSPILFNLIIDQLMKKYPKEIGCRIGSNTTNALAYADDVIVCASTEAGLQKLLDITSDFLKSCGLNINPAKCTTISIKGQPKQKNTVVIPRAYKINGRDIPYLLRTDTFKYLGLNFNPDGKCKVNLKDSLQTKLDRVTKAPLKPQQRLHILRTTLIPQLYHQLTLGSTHIGSLNKTDKIIRSYVKKWTNLPKDVPTPYFYATSKDGGLGLNALRWTAPLIRHRRLMRLKLPDLENSVVANTYIAMEIDKTNDRLRTNGQHLNTTTLINDYWKNKLYSSVDGSGLREAEQYPQAHRWITEPTTLLTGRDFLRCLRTRINALPSKSRTSRGRSSVDRHCRAGCQVPETLNHIVQQCHRTHDKRIDRHNSVINFIRRNACRDNLHTIEEPTIDTPEGIMKPDLVISFEDKAVVIDAQIVTDGRPLQQAHRRKAAKYNLQPVIDDIRERTGKDRVVFTTATLNWRGVWSKESVEQLLKFKVIKTTDTALISTRVLIGTHMCFRQFNQGTWMRRRIDPG

SEQ ID NO: 328 - protein, 974 aa, Platycheirus albimanus
MRKAHPVEFDAQNIRTDKKSRWTDEETKMMAREEARLTNMSVRFMNVELAKIFPQRTLDAIKSNRKKQQYKNEVARYLREIEESTSPLPASSTSATEDPTPPHSSTHQPPINVEDNATNIINFLLEYPPPTTDDFRSNELTDIINNATSRGKEETKIQLGLYLLRVFPPSTNRRNNHNHTPQPPRNRRERRRLEYRTTQTNWRKHQQRCIESILDGPSAVAVPPQPVMEPYWRHILETTTMGNLEERNPSNHLRTIWKPISSEEIKATRPSLTTSPGPDGITPRKLRAIPDDIVLRIYNIILWCGGAPINLRKSRTIFIAKKPDSMEPGDFRPITVSSLLLRQLHAILAQRLANEIDLDPRQQAFVKADGCANNTTILDLMLRYHHSTHSSCYMASLDVAKAFDSVAHSALWTTLKSYGAPTTFIDYIKDSYLHSTTQLIGDNWTSDGITPKSGVKQGDPLSPILFNLIIDQLMKKYPKEIGCRIGSNTTNALAYADDVIVCASTEAGLQKLLDITSDFLKSCGLNINPAKCTTISIKGQPKQKNTVVIPRAYKINGRDIPYLLRTDTFKYLGLNFNPDGKCKVNLKDSLQTKLDRVTKAPLKPQQRLHILRTTLIPQLYHQLTLGSTHIGSLNKTDKIIRSYVKKWTNLPKDVPTPYFYATSKDGGLGLNALRWTAPLIRHRRLMRLKLPDLENSVVANTYIAMEIDKTNDRLRTNGQHLNTTTLINDYWKNKLYSSVDGSGLREAEQYPQAHRWITEPTTLLTGRDFLRCLRTRINALPSKSRTSRGRSSVDRHCRAGCQVPETLNHIVQQCHRTHDKRIDRHNSVINFIRRNACRDNLHTIEEPTIDTPEGIMKPDLVISFEDKAVVIDAQIVTDGRPLQQAHRRKAAKYNLQPVIDDIRERTGKDRVVFTTATLNWRGVWSKESVEQLLKFKVIKTTDTALISTRVLIGTHMCFRQFNQGTWMRRRIDPG

SEQ ID NO: 329 - protein, 974 aa, Platycheirus albimanus
MRKAHPVEFDAQNIRTDKKSRWTDEETKMMAREEARLTNMSVRFMNVELAKIFPQRTLDAIKSNRKKQQYKDEVARYLREIEESTSPLPASSTSATEDPTPPHSSTHQPPINVEDNATNIINFLLEYPPPTTDDFRSNELTDIINNATSRGKEETKIQLGLYLLRVFPPSTNRRNNHNHTPQPPRNRRERRRLEYRTTQTNWRKHQQRCIESILDGPSAVAVPPQPVMEPYWRHILETTTMGNLEERNPSNHLRTIWKPISSEEIKATRPSLTTSPGPDGITPRKLRAIPDDIVLRIYNIILWCGGAPINLRKSRTIFIAKKPDSMEPGDFRPITVSSLLLRQLHAILAQRLANEIDLDPRQQAFVKADGCANNTTILDLMLRYHHSTHSSCYMASLDVAKAFDSVAHSALWTTLKSYGAPTTFIDYIKDSYLHSTTQLIGDNWTSDGITPKSGVKQGDPLSPILFNLIIDQLMKKYPKEIGCRIGSNTTNALAYADDVIVCASTEAGLQKLLDITSDFLKSCGLNINPAKCTTISIKGQPKQKNTVVIPRAYKINGRDIPYLLRTDTFKYLGLNFNPDGKCKVNLKDSLQTKLDRVTKAPLKPQQRLHILRTTLIPQLYHQLTLGSTHIGSLNKTDKIIRSYVKKWTNLPKDVPTPYFYATSKDGGLGLNALRWTAPLIRHRRLMRLKLPDLENSVVANTYIAMEIDKTNDRLRTNGQHLNTTTLINDYWKNKLYSSVDGSGLREAEQYPQAHRWITEPTTLLTGRDFLRCLRTRINALPSKSRTSRGRSSVDRHCRAGCQVPETLNHIVQQCHRTHDKRIDRHNSVINFIRRNACRDNLHTIEEPTIDTPEGIMKPDLVISFEDKAVVIDAQIVTDGRPLQQAHRRKAAKYNLQPVIDDIRERTGKDRVVFTTATMNWRGVWSKESVEQLLKFKVIKTTDTALISTRVLIGTHMCFRQFNQGTWMRRRIDPG

SEQ ID NO: 330 - protein, 974 aa, Platycheirus albimanus
MRKAHPAEFDAQNIRTDKKSRWTDEETKMMAREEARLTNMSVRFMNVELAKIFPQRTLDAIKSNRKKQQYKDEVARYLREIEESTSPLPASSTSATEDPTPPHSSTHQPPINVEDNATNIINFLLEYPPPTTDDFRSNELTDIINNATSRGKEETKIQLGLYLLRVFPPSTNRRNNHNHTPQPPRNRRERRRLEYRTTQTNWRKHQQRCIESILDGPSAVAVPPQPVMEPYWRHILETTTMGNLEERNPSNHLRTIWKPISSEEIKATRPSLTTSPGPDGITPRKLRAIPDDIVLRIYNIILWCGGAPINLRKSRTIFIAKKPDSMEPGDFRPITVSSLLLRQLHAILAQRLANEIDLDPRQQAFVKADGCANNTTILDLMLRYHHSTHSSCYMASLDVAKAFDSVAHSALWTTLKSYGAPTTFIDYIKDSYLHSTTQLIGDNWTSDGITPKSGVKQGDPLSPILFNLIIDQLMKKYPKEIGCRIGSNTTNALAYADDVIVCASTEAGLQKLLDITSDFLKSCGLNINPAKCTTISIKGQPKQKNTVVIPRAYKINGRDIPYLLRTDTFKYLGLNFNPDGKCKVNLKDSLQTKLDRVTKAPLKPQQRLHILRTTLIPQLYHQLTLGSTHIGSLNKTDKIIRSYVKKWTNLPKDVPTPYFYATSKDGGLGLNALRWTAPLIRHRRLMRLKLPDLENSVVANTYIAMEIDKTNDRLRTNGQHLNTTTLINDYWKNKLYSSVDGSGLREAEQYPQAHRWITEPTTLLTGRDFLRCLRTRINALPSKSRTSRGRSSVDRHCRAGCQVPETLNHIVQQCHRTHDKRIDRHNSVINFIRRNACRDNLHTIEEPTIDTPEGIMKPDLVISFEDKAVVIDAQIVTDGRPLQQAHRRKAAKYNLQPVIDDIRERTGKDRVVFTTATLNWRGVWSKESVEQLLKFKVIKTTDTALISTRVLIGTHMCFRQFNQGTWMRRRIDPG

SEQ ID NO: 331 - protein, 1113 aa, Labeo catla
MATTRTVIQTQRRLRQTTLTEEAPELKCSCGRICKGVRGLKIHQSKSACGRGRMHAHRSDEPSGETQENPRQEAHHSPRDLSVPAIPQDHTRRTSNAISESQPQPTKERIKWPKMSDGKEWSMLDEDLDKVLGAVQAGSAERKVDLLTAITYNVAKERFGTVPRRENKARPEKQDNRRERKIKQLRKEIKTLRKQFKLASAEGKEGIKELTASLREQLIRIRRAERFKQRRKKQEAARAQFIKDPYRFTKSLLGEARSGTLTSSKEEVEQFVEEAFSDPTRDDALEGNQGMTNIDPPTTILSTECPSWKEVQEVVKHARSSSAPGPSGIPYKVYKKCPKLLRRLWKLMRVIWSKGTIPTSWRRAEGCFVPKEQGSTQISQFRTISLLSVEGKIFFAVLAKRLSAYMTQNGYINTSIQKGGVEGFSGCLEHTGVLSQLIQEAKEKKGSLTVVWLDFANAYGSIPHNLIQVALDYYHIPHNIQGMITSYLRDIKLRFQSAKFTTKWQPVEKGIVTGCTISPILFIMGMNLIISAASTKSKGPKTTAGCQQPVIRAFMDDLTVITPTHVQARWVLAELDRMATWAKMVFKPKKSRSLVIQKGKITERFKLLIQEEVIPNIQGNPIRCLGKWYDDSLSDKNSISNTGKQVEEWLKKIDKSGLPGKYKCWIYQNGLLPRLMWLLTVYEVLLSTVEEMERKFNKHLRRWLGIPPSFTSLGLYIRSGQLQLPLSSVVEEFKVAKCRLSLIYRDSRDQLTREAGVRTRSGRKWAASTAIDLAECSLRTKEIIGNPCTGRQGLGTAHFQQWSKSSPREKRIMILDEVRNLEEEGRRAKSIELVTQGTWTRWNLPKRTITWSELWRLEPFCISFLLRAVYDTLPTPVNLHRWGRREDPMCRLCGGKGTMAHILSGCKIALIQGRYRWRHDKVLAVLADILEKERGKRRPAKVRPLLSTIAFVKEGQRPVVHSQARQNLLQSAQGWEMEVDLGRRLHFPEAILSTTLRPDIIMWSLEGKRIILVELTVPWEEGCEEAAERKNGKYQQLVQACRDKGWTTWLMTVEVGCRGFPAQSAWNLMTKVGLRGHLRKTAIRRLGEAAERASCWLWHKREGISWKPGGEGQ

SEQ ID NO: 332 - protein, 1111 aa, Planiliza haematocheilus
MTRTVTQTQRRLKQTTLTGEAWEVKCNCGKVCKGVRGLKIHQRLVKDKAKCGQGRTQAHRTDEQSGETQENPRQEAHHSPRDLSVPAIPQERTVTTSNANPESPPEPTKERIKWPKMSETKEWSTLDEDLDMVLEAVQAGSAERKVDSLTAITYNLAKERFGTVPRGESKARPEKKDNRRERKIKQLRKEIKTLRKQFKLAATEEKEGIKELTASLREQLIRARRAEGLRQRRKRQEAARAQFIKDPYRFSKSLLGEARSGTLISSKEEVEESVAESFSDPSRNEALPENQGLGTINPPTSPLSTDFPSWIEVQEVVKHARSSSAPGPSGIPYKVYKKCPKLLRRLWKLMRVIWSKGTVPASWRRAEGCFVPKEQGSSQISQFRTISLLSVEGKIFFSVLARRMSKYMTQNGYVDTSIQKGGIEGFSGCLEHTGVLSQLIQEAKEKKGNLTVVWLDFANAYGSIPHNLIQVAMEHYHIPHQIQGMITSYLGDIKLRFQSARFTTKWQAVEKGIVTGCTISPILFVMGMNLIVSAASIKSRGLKTAAGSQQKAIRAFMDDLTVITPTHVQARWVLAELERMATWAKMIFKPKKSRSLVIQKGKATERFKMIIQGEMIPNIQGNPIKCLGKWYDDSLSDKSSVSSTGKQVDEWLKKIDKSGLPGKYKCWIYQHGLLQRLMWLLTVYEVPVTAVEAMERKFNKHLRRWLGIPPSFTAVGLYIRSGQLQLPLSSVVEEFKVAKCRLSLTYRDSQDQLVREAGIRTRAGRKWATSTAVYQAEASLRIKETIGNPCTGRQGLGTSHFQQWSKSTPKEKRSMIQDEVRNLEEEHRRAKSIELATQGAWTRWNLPKRTITWSELWRLEPFRISFLLRAVYDTLPTPANLHKWGMREDPLCRLCGGKGTMAHILSGCKIALAQGRYRWRHDKVLALLADILEQERRKKQPAKTRPPLSTIAFVKEGHRPVVQGQAKQNLLQSAQGWEMEVDLGRKLHFPEAVLTTTLRPDVIMWSPEGKKIIMVELTVPWEEGCEEAAERKKTKYQQLVQECRDKGWTAWLMTVEVGCRGFPAQSVWNLLTKVGVRGHLRKTAVRRLGEAAERASCWLWHKREDNSWKPG

SEQ ID NO: 333 - protein, 965 aa, Clupea harengus
MQAHRSDEQSGETQENPRQEAHHSPRDPSVHVIPQEHTRRTPNAIPESPPQPTKERLKWPKMCDTKEWSMLDEDLDKVLEAAQAGSAERKEDSLTAITYSLAKERFGTVPRRENKGRRENQENRRERKIKQLRKEIKTLKKQFKLVSTEEKEGIKELTANLREQLIRARRAEGLRQRRKKQEAARAQFIKDPYRFIKSLLGEARSGTSTSSKEEVEEFVEESFSDPSRNNALAEDHGLGTIDPPTTSLNIDFPSWREVQEVVKHARSSSAPGPSGIPYKVYKRCPKLLRRLWKLMRVIWSKGTVPTSWRRAEGCFVPKERGSTQINQFRTISLLSVEGKIFFSVLARRMSTYMCQNGYIDTSIQKGAIEGFSGCLEHTGVLSQLIQEAKEKKGNLTVAWLDFANAYGSIPHNLIQVAMDHYHIPHHIQGMITGYLGDIKLRFQSAMFTTKWQPVEKGIVTGCTISPILFVMGMNLIITAASTKSRGPKTAAGSQQPVIRAFMDDLTVITPTHVQARWVLAELERMATWAKMIFKPKKSRCLVIQKGKTTEKFKLLVQGEVIPNIQGNPIKCLGKWYDDSLSDKNSISSTLKQVEEWLNKIDKSGLPGKYKCWIYQHGLLQRLMWLLTIYEVPITSVEGMERKFNKHLRRWLGIPPSFTSVGLYIRSGQLQLPLSSVVEEFKVAKCRLSLTYRDSEDQLTREAGIRTRSGRKWAASTAVNQAESSLRTKDTIGNLCTGRQGLGTSHFQQWSKSTPREKRTMIQDEVRNLEEEGRRAKSIELATQGAWTRWNLPKRTITWSEMWRLEPFRISFMLRAVYDTLPTPVNLHRWGMREDPLCRLCGGKGTMAHILSGCKTALTQGRYRWRHDKVLAQLADTLEQERRKKRPAKTKPLLSTIAFVKEGQRPAVQSQAKQNLLQSAQGWVLEVDLGRKLHFPEAVLSTTLRPDIIMWSLEGKKIILVELTVP

SEQ ID NO: 334 - protein, 1113 aa, Symphodus melops
MTCNWTVTQTQRRLRQTTLTGEAAEVKCRCGRICKGIRGLKIHQSKSVCGQGWRQAHRSGEPSGETQENPRQEAHHSPSDLSVPAIPQDHTRTSSKVIPDSSPQPTRERIKWPKMSDGKEWSMLDEDLDKVLGAVQAGSVEKKVDSLSAITYNVAKERFGTMPRKENSDRAEKQDNRRERKIKQLRKEIKTLRKQFKLASVGEKEGIKELTASLHEQLIRIRRAERFRQRRKKQEAARAQFIKDPYRFTKLHLGEARSGTLMSSKEEVEQSVEESFGDQSRDDALGGNHGLANIDPPTTSLSTACPSWGEVQQVVRHARSSSAPGPSGIPYKVYKKCPKLLRRLWKLMRVIWSKGSIPTSWRRAEGCFVPKERGSTQISRFRTISLLSVEGKMFFSVLARRMSAYMTQNGYINTSIQKGGVEGFSGCLEHTGVLSQLIQEAEEKKGSQTVVWLDFANAYGSIPHNLIQAALDYYHIPPDIQGMITSYLSYIKVRFQSAKFTTKWQSVEKGIVTGCTISPILFIMGMNLIISAASTRSRGVKTAAGCQQPAIRAFMDDLTVITPTHVQARWVLEELDRMATWAKMAFKPMKSRSMVIQKGKVTGRCELRVQGEVIPNIQGNPIKCLGKWYDDSLSDKNSISNTGKQVEEWLMKIDKSGLPGKYKCWIYQHGLLPRLTWHLTIYEVPLSTVEEMERKFNKHLRRWLGVPPSFTSLGLYISSGQLQLPMSSVVEEFKVAKCRLSLTYRDSQDQLTREAGVRTRSGRKWAASTAINQAESSLRTKDIIGNPCTGRQGLGTTHFQQWSKSTPRERRTLIQDEVRNLEEEGRRAKSIELATQGAWTRWNLPKRTITWSEMWRLEPFRISFLLRAVYDTPPTPVNLHRWGMREDQLCRLCGGKGTMAHILSGCKTALTQGRYRWRHDRVLSVLADILEQERRKKQPAKTRPLFSTIAFVKEGHRTASHNQARQNLLQSAQRWEMVVDLGRKLHFPEAVLSTTQRPDTIIWSPEGKKIIMVELTVPWEEGCEEAAERKKAKYQQLAQDCRDKGWTTWLLTVEIGCRGFPAQSAWDLMTKIGLRGHLRKAAVRRLGEAAERASCWLWHKREDTSWKPGGEGQ

SEQ ID NO: 335 - protein, 898 aa, Clupea harengus
MCDTKEWSMLDEDLDKVLEAAQAGSAERKEDSLTAITYSLAKERFGTVPRRENKGRRENQENRRERKIKQLRKEIKTLKKQFKLASTEEKEGIKELTANLREQLIRARRAEGLRQRRKKQEAARAQFIKDPYTKSLLGEARSGTLTSSKEEVEEFVEESFSDPSRNNALAEDHGLGTIDPPTTSLNIDFPSWREVQEVVKHARSSSAPGPSGIPYKVYKRCPKLLRRLWKLMRVIWSKGTVPTSWRRAEGCFVPKERGSTQINQFRTISLLSVEGKIFFSVLARRMSTYMCQNGYIDTSIQKGAIEGFSGCLEHTGVLSQLIQEAKEKKGNLTVAWLDFANAYGSIPHNLIQVAMDHYHIPHHIQGMITGYLGDIKLRFQSAMFTTKWQPVEKGIVTGCTISPILFVMGMNLIITAASTKSRGPKTAAGSQQPVIRAFMDDLTVITPTHVQARWVLAELERMATWAKMIFKPKKSRCLVIQKGKTTEKFKLLVQGEVIPNIQGNPIKCLGKWYDDSLSDKNSISSTLKQVEEWLNKIDKSGLPGKYKCWIYQHGLLQRLMWLLTIYEVPITSVEGMERKFNKHLRRWLGIPPSFTSVGLYIRSGQLQLPLSSVVEEFKVAKCRLSLTYRDSEDQLTREAGIRTRSGRKWAASTAVNQAESSLRTKDTIGNLCTGRQGLGTSHFQQWSKSTPREKRTMIQDEVRNLEEEGRRAKSIELATQGAWTRWNLPKRTITWSEMWRLEPFRISFMLRAVYDTLPTPVNLHRWGMREDPLCRLCGGKGTMAHILSGCKTALTQGRYRWRHDKVLAQLADTLEQERRKKRPAKTKPLLSTIAFVKEGQRPAVQSQAKQNLLQSAQGWVLEVDLGRKLHFPEAVLSTTLRPDIIMWSLEGRRSSWWN

SEQ ID NO: 336 - protein, 999 aa, Symphodus melops
MSDGKEWSMLDEDLDKVLGAVQAGSVEKKVDSLSAITYNVAKERFGTMPRKENSDRAEKQDNRRERKIKQLRKEIKTLRKQFKLASVGEKEGIKELTASLREQLIRIRRAERFRQRRKKQEAARAQFIKDPYRFTKLHLGEARSGTLMSSKEEVEQSVEESFGDQSRDEALGGNHGLANIDPPTTSLSTACPSWGEVQQVVRHARSSSAPGPSGIPYKVYKKCPKLLRRLWKLMRVIWSKGSIPTSWRRAEGCFVPKERGSTQISQFRTISLLSVEGKMFFSVLARRMSAYMTQNGYINTSIQKGGVEGFSGCLEHTGVLSQLIQEAKEKKGSLTVVWLDFANAYGSIPHNLIQAALDYYHIPPDIQGMITSYLSDIKLRFQSAKFTTKWQSVEKGIVTGCTISPILFIMGMNLIISAASTRSRGVKTAAGCQQPAIRAFMDDLTVITPTHVQARWVLEELDRMATWAKMAFKPMKSRSMVIQKGKVTGRCELRVQGEVIPNIQGNPIKCLGKWYDDSLSDKNSISNTGKQVEEWLMKIDKSGLPGKYKCWIYQHGLLPRLMWHLTIYEVPLSTVEEMERKFNKHLRRWLGVPPSFTSLGLYIRSGQLQLPMSSVVEEFKVAKCRLSLTYRDSQDQLTREAGVRTRSGRKWAASTAINQAESSLRTKDIIGNPCTGRQGLGTTHFQQWSKSTPRERRTLIQDEVRNLEEEGRRAKSIELATQGAWTRWNLPKRTITWSEMWRLEPFRISFLLRAVYDTLPTPVNLHRWGMREDQLCRLCGGKGTMAHILSGCKTALTQGRYRWRHDRVLSVLADILEQERRKKQPAKTRPLVRTIAFVKEGHRTASHNQARQNLLQSAQRWEMVVDLGRKLHFPEAVLSTTQRPDTIIWSPEGKKIIMVELTVPWEEGCEEAAERKKAKYQQLAQDCRDKGWTTWLLTVEIGCRGFPAQSAWDLMTKIGLRGHLRKAAVRRLGEAAERASCWLWHKREDTSWKPGGEGQ

SEQ ID NO: 337 - protein, 1183 aa, Symphodus melops
MVCMDGNRGRSVTLERQLTSRKDWRGNRGQQPLLQHSQEGTKKATESTKEQYPQSLPRGGEEERLTRTDSTATNWTVTQTQRRLRQTTLTGEAAEVKCRCGRICKGIRGLKIHQSKSVCGQGWRQAHRSGEPSGETQENPRQEAHHSPSDLSVPAIPQDRTRTSSKVIPDSSPQPTRERIKWPKMSDGKEWSMLDEDLDKVLGAVQAGSVEKKVDSLSAITYNVAKERFGTMPRKENSDRAEKQDNRRERKIKQLRKEIKTLRKQFKLASVGEKEGIKELTASLREQLIRIRRAERFRQRRKKQEAARAQFIKDPYRFTKLHLGEARSGTLMSSKEEVEQSVEESFGDQSRDEALGGNHGLANIDPPTTSLSTACPSWGEVQQVVRHARSSSAPGPSGIPYKVYKKCPKLLRRLWKLMRVIWSKGSIPTSWRRAEGCFVPKERGSTQISQFRTISLLSVEGKMFFSVLARRMSAYMTQNGYINTSIQKGGVEGFSGCLEHTGVLSQLIQEAKEKKGSLTVVWLDFANAYGSIPHNLIQAALDYYHIPPDIQGMITSYLSDIKLRFQSAKFTTKWQSVEKGIVTGCTISPILFIMGMNLIISAASTRSRGVKTAAGCQQPAIRAFMDDLTVITPTHVQARWVLEELDRMATWAKMAFKPMKSRSMVIQKGKVTGRCELRVQGEVIPNIQGNPIKCLGKWYDDSLSDKNSISNTGKQVEDWLMKIDKSGLPGKYKCWIYQHGLLPRLMWHLTIYEVPLSTVEEMERKFNKHLRRWLGVPPSFTSLGLYIRSGQLQLPMSSVVEEFKVAKCRLSLTYRDSQDQLTREAGVRTRSGRKWAASTAINQAESSLRTKDIIGNPCTGRQGLGTTHFQQWSKSTPRERRTLIQDEVRNLEEEGRRAKSIELATQGAWTRWNLPKRTITWSEMWRLEPFRISFLLRAVYDTLPTPVNLHRWGMREDQLCRLCGGKGTMAHILSGCKTALTQGRYRWRHDRVLSVLADILEQERRKKQPAKTRPLVRTIAFVKEGHRTASHNQARQNLLQSAQRWEMVVDLGRKLHFPEAVLSTTQRPDTIIWSPEGKKIIMVELTVPWEEGCEEAAERKKAKYQQLAQDCRDKGWTTWLLTVEIGCRGFPAQSAWDLMTKIGLRGHLRKAAVRRLGEAAERASCWLWHKREDTSWKPGGEGQ

SEQ ID NO: 338 - protein, 1111 aa, Planiliza haematocheilus
MTRTVTQTQRRLKQTTLTGEAWEVKCNCGKVCKGVRGLKIHQRLVKDKAKCGQGRMQAHRTDEQSGETQENPRQEAHHSPRDLSVPAIPQERTVTTSNANPESPPEPTKERIKWPKMSETKEWSTLDEDLDMVLEAVQAGSAERKVDSLTAITYNLAKERFGTVPRGESKARPEKKDNRRERKIKQLRKEIKTLRKQFKLAATEEKEGIKELTASLREQLIRARRAEGLRQRRKRQEAARAQFIKDPYRFSKSLLGEARSGTLISSKEEVEESVAESFSDPSRNEALPENQGLGTINPPTSPLSTDFPSWIEVQEVVKHARSSSAPGPSGIPYKVYKKCPKLLRRLWKLMRVIWSKGTVPASWRRAEGCFVPKEQGSSQISQFRTISLLSVEGKIFFSVLARRMSKYMTQNGYVDTSIQKGGIEGFSGCLEHTGVLSQLIQEAKEKKGNLTVVWLDFANAYGSIPHNLIQVAMEHYHIPHQIQGMITSYLGDIKLRFQSARFTTKWQAVEKGIVTGCTISPILFVMGMNLIVSAASIKSRGLKTAAGSQQKAIRAFMDDLTVITPTHVQARWVLAELERMATWAKMIFKPKKSRSLVIQKGKATERFKMIIQGEMIPNIQGNPIKCLGKWYDDSLSDKSSVSSTGKQVDEWLKKIDKSGLPGKYKCWIYQHGLLQRLMWLLTVYEVPVTAVEAMERKFNKHLRRWLGIPPSFTAVGLYIRSGQLQLPLSSVVEEFKVAKCRLSLTYRDSQDQLVREAGIRTRAGRKWAASTAVYQAEASLRIKETIGNPCTGRQGLGTSHFQQWSKSTPKEKRSMIQDEVRNLEEEHRRAKSIELATQGAWTRWNLPKRTITWSELWRLEPFRISFLLRAVYDTLPTPANLHKWGMREDPLCRLCGGKGTMAHILSGCKIALAQGRYRWRHDKVLALLADILEQERRKKQPAKTRPPLSTIAFVKEGHRPVVQGQAKQNLLQSAQGWEMEVDLGRKLHFPEAVLTTTLRPDVIMWSPEGKKIIMVELTVPWEEGCEEAAERKKTKYQQLVQECRDKGWTAWLMTVEVGCRGFPAQSVWNLLTKVGVRGHLRKTAVRRLGEAAERASCWLWHKREDNSWKPG

SEQ ID NO: 339 - protein, 1111 aa, Planiliza haematocheilus
MTRTVTQTQRRLKQTTLTGEAWEVKCNCGKVCKGVRGLKIHQRLVKDKAKCGQGRMQAHRTDEQSGETQENPRQEAHHSPRDLSVPAIPQERTVTTSNANPESPPEPTKERIKWPKMSETKEWSTLDEDLDMVLEAVQAGSAERKVDSLTAITYNLAKERFGTVPRGESKARPEKKDNRRERKIKQLRKEIKTLRKQFKLAATEEKEGIKELTASLREQLIRARRAEGLRQRRKRQEAARAQFIKDPYRFSKSLLGEARSGTLISSKEEVEESVAESFSDPSRNEALPENQGLGTINPPTSPLSTDFPSWIEVQEVVKHARSSSAPGPSGIPYKVYKKCPKLLRRLWKLMRVIWSKGTVPASWRRAEGCFVPKEQGSSQISQFRTISLLSVEGKIFFSVLARRMSKYMTQNGYVDTSIQKGGIEGFSGCLEHTGVLSQLIQEAKEKKGNLTVVWLDFANAYGSIPHNLIQVAMEHYHIPHQIQGMITSYLGDIKLRFQSARFTTKWQAVEKGIVTGCTISPILFVMGMNLIVSAASIKSRGLKTAAGSQQKAIRAFMDDLTVITPTHVQARWVLAELERMATWAKMIFKPKKSRSLVIQKGKATERFKMIIQGEMIPNIQGNPIKCLGKWYDDSLSDKSSVSSTGKQVDEWLKKIDKSGLPGKYKCWIYQHGLLQRLMWLLTVYEVPVTAVEAMERKFNKHLRRWLGIPPSFTAVGLYIRSGQLQLPLSSVVEEFKVAKCRLSLTYRDSQDQLVREAGIRTRAGRKWAASTAVYQAEASLRIKETIGNPCTGRQGLGTSHFQQWSKSTPKEKRSMIQDEVRNLEEEHRRAKSIELATQGAWTRWNLPKKTITWSELWRLEPFRISFLLRAVYDTLPTPANLHKWGMREDPLCRLCGGKGTMAHILSGCKIALAQGRYRWRHDKVLALLADILEQERRKKQPAKTRPPLSTIAFVKEGHRPVVQGQAKQNLLQSAQGWEMEVDLGRKLHFPEAVLTTTLRPDVIMWSPEGKKIIMVELTVPWEEGCEEAAERKKTKYQQLVQECRDKGWTAWLMTVEVGCRGFPAQSVWNLLTKVGVRGHLRKTAVRRLGEAAERASCWLWHKREDNSWKPG

SEQ ID NO: 340 - protein, 1113 aa, Labeo catla
MATTRTVIQTQRRLRQTTLTEEAPELKCSCGRICKGVRGLKIHQSKSACGRGRMHAHRSDEPSGETQENPRQEAHHSPRDLSVPAIPQDHTRRTSNAISESQPQPTKERIKWPKMSDGKEWSMLDEDLDKVLGAVQAGSAERKVDLLTAITYNVAKERFGTVPRRENKARPEKQDNRRERKIKQLRKEIKTLRKQFKLASAEGKEGIKELTASLREQLIRIRRAERFKQRRKKQEAARAQFIKDPYRFTKSLLGEARSGTLTSSKEEVEQFVEEAFSDPTRDDALEGNQGMTNIDPPTTSLSTECPSWKEVQEVVKHARSSSAPGPSGIPYKVYKKCPKLLRRLWKLMRVIWSKGTIPTSWRRAEGCFVPKEQGSTQISQFRTISLLSVEGKIFFAVLAKRMSAYMTQNGYINTSIQKGGVEGFSGCLEHTGVLSQLIQEAKEKKGSLTVVWLDFANAYGSIPHNLIQVALDYYHIPHNIQGMITSYLRDIKLRFQSAKFTTKWQPVEKGIVTGCTISPILFIMGMNLIISAASTKSKGPKTTAGCQQPVIRAFMDDLTVITPTHVQARWVLAELDRMATWAKMVFKPKKSRSLVIQKGKTTERFKLLIQEEVIPNIQGNPIRCLGKWYDDSLSDKNSISNTGKQVEEWLKKIDKSGLPGKYKCWIYQNGLLPRLMWLLTVYEVLLSTVEEMERKFNKHLRRWLGIPPSFTSLGLYIRSGQLQLPLSSVVEEFKVAKCRLSLIYRDSRDQLTREAGVRTRSGRKWAASTAIDLAECSLRTKEIIGNPCTGRQGLGTAHFQQWSKSSPREKRIMILDEVRNLEEEGRRAKSIELVTQGTWTRWNLPKRTITWSELWRLEPFCISFLLRAVYDTLPTPVNLHRWGRREDPMCRLCGGKGTMAHILSGCKIALIQGRYRWRHDKVLAVLADILEKERGKRRPAKVRPLLSTIAFVKEGQRPVVHSQARQNLLQSAQGWEMEVDLGRRLHFPEAILSTTLRPDIIMWSLEGKRIILGELTVPWEEGCEEAAERKNGKYQQLVQDCRDKGWTTWLMTVEVGCRGFPAQSAWNLMTKVGLRGHLRKAAIRRLGEAAERASCWLWHKREGISWKPGGEGQ

SEQ ID NO: 341 - protein, 1157 aa, Sinonovacula constricta
MSETDNSTAIMCPCGKMCKNRRGMKIHQTRSGCQLRNTQEQRTVNPGETGEISSQATNHSTTCLSAPVHSLTADDIKNGSANPTDQTEPSKELISPTGVGEESPIFRTDRPRVTSAGSSPIVAKRRQSTTPLQETQKVPDQGQAESDSRPRQPTPSDRKPKIAWPNTNDSSWKTFDDDLDLILQSTLSGAVERKLQVLPSIAYTLGRERFGEVKKGESKKSQPRPNRRQCEIKRLRTELRTLRKRYKGANQTEREGLAQLKGQLRSRLKTLTTAERVAKKRKTKAKKRAAFIANPYRFSRDLLGGERSGKMESSKNEVEQHLRDVHSDPKRHDLLGNCDRILPVEEPSIPLDLKEPTFKEVTSVVMKARSCSAPGPSGIPYKVYKKCPKLLRRLWQLLKVVWRKGTVPDCWKQAEGCFVPKEKDSKTIKQFRTISLLNVEGKIFFSILANRMTSYMLSNQYINTSVQKGGIPGFSGCVEHTSALTQLLHEARINHKDLSVIWLDLANAYGSIPHQLILEALHHYHIPDHATKLIQSYFSNIHLRFSCEQFTTDWIELQKGIVTGCTISVILFVMGMNIIIKAAEGETRGPKTNSGIRLPSNRGFMDDMTVTTETHIQARWVLTALEKTVTWARMQFKPAKSRSLVIKKGKVTERFKMTIQGEEIPSLSNNPVKCLGKWFDASLTDKSSQARLQQQAEEGLRRIDKCDLSGKFKAWVYQHNLLPRLVWPMMVNDIPTSTVEKLERTVSKHLRRWLGLPPSFTNIGLYSKTAKLQMPINSIVEEFKVAKTRLLLTLRDSKDEKISGAGIEVRTGRKWSVSRAVELAESSLKHQDIVGMTNIGKEGLGTRKHQRWETATQQERRSLVQTEIRKEAEQERMSRAVQLGPQGNWTRWQVPERKLSWQEIWQYEPLRLSFLLRSIYDMLPSPTNLYQWKLIDDPACPLCGSPGSLKHVLSSCPTALSQGRYRWRHDQVLSEIAHVLETERKKERPRPNQNRYIGFLKEGEQVPKSAPAPTGILNESRSWEMKADLKEQQQFPHEITQTTLRPDIVIWSRNPKRVVLVELTVPWEERIEESHELKRSKYEDLARSCKSNGWNTQVFPIEVGCRGFPSQSVWRMLGALGIKGAIRKRTVHALGRTAERASSWLWMLRSKHEWQPR

SEQ ID NO: 342 - protein, 847 aa, Sinonovacula constricta
MESSKNEVEQHLRDVHSDPKRHDLLGNCDRILPVEEPSIPLDLKEPTFKEVTSVVMKARSCSAPGPSGIPYKVYKKCPKLLRRLWQLLKVVWRKGTVPDCWKQAEGCFVPKEKDSKTIKQFRTISLLNVEGKIFFSILANRMTSYMLSNQYINTSVQKGGIPGFSGCVEHTSALTQLLHEARINHKDLSVIWLDLANAYGSIPHQLILEALHHYHIPDHATKLIQSYFSNIHLRFSCEQFTTDWIELQKGIVTGCTISVILFVMGMNIIIKAAEGETRGPKTNSGIRLPSNRGFMDDMTVTTETHIQARWVLTALEKTVTWARMQFKPAKSRSLVIKKGKVTERFKMTIQGEEIPSLSNNPAKCLGKWFDASLTDKSSQARLQQQAEEGLRRIDKCDLSGKFKAWVYQHNLLPRLVWPMMVNDIPTSTVEKLERTVSKHLRRWLGLPPSFTNIGLYSKTAKLQMPINSIVEEFKVAKTRLLLTLRDSKDEKISGAGIEVRTGRKWSVSRAVELAESSLKHQDIVGMTNIGKEGLGTRKHQRWETATQQERRSLVQTEIRKEAEQERMSRAVQLGPQGNWTRWQVPERKLSWQEIWQYEPLRLSFLLRSIYDMLPSPTNLYQWKLIDDPACPLCGSPGSLKHVLSSCPTALSQGRYRWRHDQVLSEIAHVLETERKKERPRPNQNRYIGFLKEGEQVPKSAPAPTGILNESRSWEMKADLKEQLQFPHEITQTTLRPDIVIWSRNPKRVVLVELTVPWEERIEESHELKRSKYEDLARSCKSNGWNTQVFPIEVGCRGFPSQSVWRMLGALGIKGAIRKRTVHALGRTAERASSWLWMLRSKHEWQPR

SEQ ID NO: 343 - protein, 1157 aa, Sinonovacula constricta
MSETDNSTAIMCPCGKMCKNRRGMKIHQTRSGCQLRNTQEQRTVNPGETGEISSQATNHSTTCLSAPVHSLTADDIKNGSANPTDQTEPSKELISPTGVGEESPIFRTDRPRVTSAGSSPIVAKRRQSTTPLQETQKVPDQGQAESDSRPRQPTPSDRKPKIAWPNTNDSSWKTFDDDLDLILQSTLSGAVERKLQVLPSIAYTLGRERFGEVKKGESKKSQPRPNRRQCEIKRLRTELRTLRKRYKGANQTEREGLAQLKGQLRSRLKTLTTAERVAKKRKTKAKKRAAFIANPYRFSRDLLGGERSGKMESSKNEVEQHLRDVHSDPKRHDLLGNCDRILPVEEPSIPLDLKEPTFKEVTSVVMKARSCSAPGPSGIPYKVYKKCPKLLRRLWQLLKVVWRKGTVPDCWKQAEGCFVPKEKDSKTIKQFRTISLLNVEGKIFFSILANRMTSYMLSNQYINTSVQKGGIPGFSGCVEHTSALTQLLHEARINHKDLSVIWLDLANAYGSIPHQLILEALHHYHIPDHATKLIQSYFSNIHLRFSCEQFTTDWIELQKGIVTGCTISVILFVMGMNIIIKAAEGETRGPKTNSGIRLPSNRGFMDDMTVTTETHIQARWVLTALEKTVTWARMQFKPAKSRSLVIKKGKVTERFKMTIQGEEIPSLSNNPVKCLGKWFDASLTDRSSQARLQQQAEEGLRRIDKCDLSGKFKAWVYQHNLLPRLVWPMMVNDIPTSTVEKLERTVSKHLRRWLGLPPSFTNIGLYSKTAKLQMPINSIVEEFKVAKTRLLLTLRDSKDEKISGAGIEVRTGRKWSVSRAVELAESSLKHQDIVGMTNIGKEGLGTRKHQRWETSTQQERRSLVQTEIRKEAEQERMSRAVQLGPQGNWTRWQVPERKLSWQEIWQYEPLRLSFLLRSIYDMLPSPTNLYQWKLIDDPACPLCGSPGSLKHVLSSCPTALSQGRYRWRHDQVLSEIAHVLETERKKERPRPNQNRYIGFLKEGEQLPKSAPAPTGILNESRSWEMKADLKEQLQFPHEITQTTLRPDIVIWSRNPKRVVLVELTVPWEERIEESHELKRSKYEDLARSCKSNGWNTQVFPIEVGCRGFPSQSVWRMLGALGIKGAIRKRTVHALGRTAERASSWLWMLRSKHEWQPR

SEQ ID NO: 344 - protein, 1157 aa, Sinonovacula constricta
MSETDNSTAIMCPCGKMCKNRRGMKIHQTRSGCQLRNTQEQRTVNPGETGEISSQATNHSTTCLSAPVHSLTADDIKNGSANPTDQTEPSKELISPTGVGEESPIFRTDRPRVTSAGSSPIVAKRRQSTTPLQETQKVPDQGQAESDSRPRQPTPSDRKPKIAWPNTNDSSWKTFDDDLDLILQSTLSGAVERKLQVLPSIAYTLGRERFGEVKKGESKKSQPRPNRRQCEIKRLRTELRTLRKRYKGANQTEREGLAQLNGQLRSRLKTLTMAERVAKKRKTKAKKRAAFIANPYRFSRDLLGGERSGKMESSKNEVEQHLRDVHSDPKRHDLLGNCDRILPVEEPSIPLDLKEPTFKEVTSVVMKARSCSAPGPSGIPYKVYKKCPKLLRRLWQLLKVVWRKGTVPDCWKQAEGCFVPKEKDSKTIKQFRTISLLNVEGKIFFSILANRMTSYMLSNQYINTSVQKGGIPGFSGCVEHTSALTQLLHEARINHKDLSVIWLDLANAYGSIPHQLILEALHHYHIPDHATKLIQSYFSNIHLRFSCEQFTTDWIELQKGIVTGCTISVILFVMGMNIIIKAAEGETRGPKTNSGIRLPSNRGFMDDMTVTTETHIQARWVLTALEKTVTWARMQFKPAKSRSLVIKKGKVTERFKMTIQGEEIPSLSNNPVKCLGKWFDASLTDKSSQARLQQQAEEGLRRIDKCDLSGKFKAWVYQHNLLPRLVWPMMVNDIPTSTVEKLERTVSKHLRRWLGLPPSFTNIGLYSKTAKLQMPINSIVEEFKVAKTRLLLTLRDSKDEKISGAGIEVRTGRKWSVSRAVELAESSLKHQDIVGMTNIGKEGLGTRKHQRWETATQQERRSLVQTEIRKEAEQERMSRAVQLGPQGNWTRWQVPERKLSWQEIWQYEPLRLSFLLRSIYDMLPSPTNLYQWKLIDDPACPLCGSPGSLKHVLSSCPTALSQGRYRWRHDQVLSEIAHVLETERKKERPRPNQNRYIGFLKEGEQVPKSAPAPTGILNESRSWEMKADLKEQLQFPHEITQTTLRPDIVIWSRNPKRVVLVELTVPWEERIEESHELKRSKYEDLARSCKSNGWNTQVFPIEVGCRGFPSQSVWRMLGALGIKGAIRKRTVHALGRTAERASSWLWMLRSKHEWQPR

SEQ ID NO: 345 - protein, 1175 aa, Sinonovacula constricta
MKLISLIYVTKSGMTVHDICETDNSTAIMCPCGKMCKNRRGMKIHQTRSGCQLRNTQEQRTVNPGETGEISSQATNHSTTCLSAPVHSLTADDIKNGSANPTDQTEPSKELISPTGVGEESPIFRTDRPRVTSAGSSPIVAKRRQSTTPLQETQKVPDQGQAESDSRPRQPTPSDRKPKIAWPNTNDSSWKTFDDDLDLILQSTLSGAVERKLQVLPSIAYTLGRERFGEVKKGESKKPQPRPNRRQCEIKRLRTELRTLRKRYKGANQTEREGLAQLKGQLRSRLKTLTTAERVAKKRKTKAKKRAAFIANPYRFSRDLLGGERSGKMESSKNEVEQHLRDVHSDPKRHDLLGNCDRILPVEEPSIPLDLKEPTFKEVTSVVMKARSCSAPGPSGIPYKVYKKCPKLLRRLWQLLKVVWRKGTVPDCWKQAEGCFVPKEKDSKTIKQFRTISLLNVEGKIFFSILANRMTSYMLSNQYINTSVQKGGIPGFSGCVEHTSALTQLLHEARINHKDLSVIWLDLANAYGSIPHQLILEALHHYHIPDHATKLIQSYFSNIHLRFSCEQFTTDWIELQKGIVTGCTISVILFVMGMNIIIKAAEGETRGPKTNSGIRLPPNRGFMDDMTVTTETHIQARWVLTALEKTVTWARMQFKPAKSRSLVIKKGKVTERFKMTIQGEEIPSLSNNPVKCLGKWFDASLTDKSSQARLQQQAEEGLRRIDKCDLSGKFKAWVYQHNLLPRLVWPMMVNDIPTSTVEKLERTVSKHLRRWLGLPPSFTNIGLYSKTAKLQMPINSIVEEFKVAKTRLLLTLRDSKDEKISGAGIEVRTGRKWSVSRAVELAESSLKHQDIVGMTNIGKEGLGTRKHQRWETATQQERRSLVQTEIRKEAEQERMSRAVQLGPQGNWTRWQVPERKLSWQEIWQYEPLRLSFLLRSIYDMLPSPTNLYQWKLIDDPACPLCGSPGSLKHVLSSCPTALSQGRYRWRHDQVLSEIAHVLETERKKERPRPNQNRYIGFLKEGEQVPKSAPAPTGILNESRSWEMKADLKEQLQFPHEITQTTLRPDIVIWSRNPKRVVLVELTVPWEERIEESHELKRSKYEDLARSCKSNGWNTQVFPIEVGCRGFPSQSVWRMLGALGIKGAIRKRTVHALGRTAERASSWLWMLRSKHEWQPR

SEQ ID NO: 346 - protein, 807 aa, Mercenaria mercenaria
MKEPSFAEIRDIVMKARSCSAPGPSGIPYKVYKKCPKLLKRLSVLLRVIWKKGKVPECWKQAEGCFIPKEKNSKTIKQFRTISLLSVEGKIFFSVLARRLTTYMTTNKYVDISVQKGGIPGLSGCVEHTSALTQLLHEARINHRDLTVVSLDLANAYGSIPHELIKKSLEHYHIPDHARSLIMNYFDNIHLRFSCSRFTTNWLQLQKGIVTGCTISVILFVMGMNMILKAAERETRGPKTSSGIRLPSNRGFMDDMTVTTESHIQTRWILKALDKTITWARMQFKPAKSRCLIVKKGKVMNKFKLFIQDEEIPALANNPIKCLGKWFDSSMTDKDSKNRLHQQVHDGLRRIDKCELQGKFKAWIYQHSFLPRLVWPLMVYELPLTTVEKLEQAISKHLRRWLGLPPSFTSIGLYGHSNKLQLPINSLVEEFKVAKARLLLTLRDSKDNKISGAGIDIRTGRKWSVSHEVERAESSLKHQDIVGSTNRGREGLGTRSHQSWADANLQERRSMVQSEIRRSEEQERSAKAVQFGSQGNWTKWTVPERKLTWNELWTYEPLQLSFLLRSVYDMLPTPTNLYQWKLTEDQTCPLCEKKGSLRHILSGCPTALSQGRYRWRHDKVLGELAHVLEKERRKVKPLIPKSHLINFVREGEKKPVSTVERGILQNSKSWDLRADLGKKLQFPEEIAHTTLRPDIVIWSRNPKTVIMVELTVPWEERVEESNELKREKYEELANTCRGNGWKTWVFPVEVGCRGFPSSSVWRMLGALGIKGATRKTSVHVLSKAAERASCWLWLQRSNTCWKPTQTG

SEQ ID NO: 347 - protein, 1174 aa, Mercenaria mercenaria
MRKSEHDTSVVCPCGKVCKNQRGMRIHQSRSGCQSRGGQMQRSGQPGQTGETTSRGSNHSASSVPAPVLSLTEGSSLGGESSLLDDLSSPSLEDLTTALTEEEEDNPLEGSPIFGSAQLEDSPIFSPINRHRELQGQESPGSSFSFPQSWASQPVREDTKLSQKQQHPASTERRQKIAWPKMNDSRWATYDNDLDVILQTALSGSVERKLQALPSIAYAVGKERFGIEKPTSVAKSRPRQNRRVVEIKKLRVELRALRKRFVQSEVSEREGLSKLRGEIRERLKTLTAAERIRKKRRNRAKKRAKFISNPYKFSRELLGEEKSGSLESSQEEVEHFLTETHSDPQRDQPLGDCDNILPEKEPLLPLDMKEPSFAEIRDIVMKARSCSAPGPSGIPYKVYKKCPKLLKRLSVLLRVIWKKGKVPECWKQAEGCFIPKEKNSKTIKQFRTISLLSVEGKIFFSVLARRLTTYMTTNKYVDISVQKGGIPGLSGCVEHTSALTQLLHEARINHRDLTVVWLDLANAYGSIPHELIKKSLEHYHIPDHARSLIMNYFDNIHLRFSCSRFTTNWLQLQKGIVTGCTISVILFVMGMNMILKAAERETRGPKTSSGIRLPSNRGFMDDMTVTTESHIQTRWILKALDKTITWARMQFKPAKSRCLIVKKGKVMNKFKLFIQDEEIPALANNPIKCLGKWFDSSMTDKDSKNRLHQQVHDGLRRIDKCELQGKFKAWIYQHSFLPRLVWPLMVYELPLTTVEKLEQAISKHLRRWLGLPPSFTSIGLYGHSNKLQLPINSLVEEFKVAKARLLLTLRDSKDNKISGAGIDIRTGRKWSVSHEVERAESSLKHQDIVGSTNRGREGLGTRSHQSWADANLQERRSMVQSEIRRSEEQERSAKAVQFGSQGNWTKWTVPERKLTWNELWTYEPLQLSFLLRSVYDMLPTPTNLYQWKLTEDQTCPLCEKKGSLRHILSGCPTALSQGRYRWRHDKVLGELAHVLEKERRKVKPLIPKSHLINFVREGEKKPVSTVERGILQNSKSWDLRADLGKKLQFPEEIAHTTLRPDIVIWSRNPKTVIMVELTVPWEERVEESNELKREKNEELANTCRGNGWKTWVFPVEVGCRGFPSSSVWRMLGALGIKGATRKTSVHVLSKAAERASCWLWLQRSNTCWKPTQTG

SEQ ID NO: 348 - protein, 1202 aa, Limonius californicus
MEQDTNNEASDVSGSRAVPDMERQPVDDHSNSQGHTQIQNPADRALAANQPATTKAGKPRQRMKWTLEMNMNVIRCYYKATKLETEMTLYRARMHALFTEKYPDIVVTEQRIADQRSTIMNRGLLPQAIIENLRAEVERQLREGREQDEDIINVQELDEETDSNSINLPERQPVEGDNEEPVDIQRLNEETRPEHIDTDQNALLRHLADELNTAIAEYSGMDPTKRPVIPKQNTSKKLALIVENMNKILPNSVAETQSFSDFHTLVYCAAITYARENGAKIRTLTGKKLEDRKIPKWQLRLQNKIIKLRSNINRLTLYIRGHRGNRLVREVEKIFKNYKTHTQHEEDNLKAEEFLDTLKQKLKALSKRHKRYTNSRRRRSENKLFSTEEGKFYRRVGKDHNNAPSNLPGMDAIENYWSNLWSNNESHNPSAKWIIEEKRRTRHINHMPYTTITEEQISSIISKTHNWKAPGNDNIHNYWLKKLTCIHGKLTKFINDFITYPELMPKFLCQGLTYLLPKGGNSSNPANYRPITCLPTIFKILTASISQLIYQHCEANDILTEQQKGCKRNAQGCKEQLIIDLIIMKQAYKKNRKIYTAYIDYQKAFDSVPHSWLLEVLDIYKINPSIINFLQHNISTWKTVIRIQSQNATQATKPIDIKRGIFQGDSLSPLWFCLALNPLSRMLNDGKMGYKIATVHNTPSQLSHLMYMDDIKIYCSSVQHLRQSLKITEMFSKDIGMKFGLDKCKTQSINRGKREVADYEMENNDIIRGLQEGEVYKYLGMYQSRLTEETQMKECLISKYKDRVKKLMKTMLYGKNLIKAINTYAVPLLTYFFGIIHWTDTDMQNLRRTTSAMLTSVRYHHPRSAVERLTLPRVEGGRGLIDFTNLQNKQKENLREYFFTKQNTSDLHRAIVIIDNNYSPLNLANDLALPITSNHEKQQAWAQKVLHGRHAHELSQPHVDRIASNAWLTSSGLFPETEGFMCAIQDQVINTKNYKKYIIRDGTQDDSCRCCRAAPENIQHIISGCQAIAQTEYKVRHDNVAKILHSKLVTKYSLEREDVPYYKYVPEKITENEQALIYWDRGIITDRTIAHNRPDITLIDKNRNSAFLIDISIPNTSNLQNAHADKIAKYTDLVYEVRQLWHVEAVYTLPVIISATGVIPVTLHQTFHQLGIDNKLYISMQKSVILSTCNIVRRFLNNQTDQ

SEQ ID NO: 349 - protein, 1407 aa, Cnaphalocrocis medinalis
MENNSRKYNLRPLPGGYRRGTPGAVAGCSSMRPNGDGGLSRRAPLDKNTTAATRQGDEELNRRTPVEKSATAEAPDDTIHLNVSDTTSVLSSGSSFCLTESSTSPSSDLNEEFVDVVQEAETATNTVPTTNTRTKRRRWTTEMNKFILRTYLLITQLETDTKTYLDALHPKFLERFPDFPVTRQRLGDQRRVIVRNRLLPQKTIDDIYIEVQTELNRNQSTRQNITLPHNTQATFTTNSQALQRMRWSNIHNETIIRGYYKVTRLETDMTCYRQKIHEHFINAFPHLAHVTEQRVADQRRLIFINKMISSERLQTIRQEVADELDIIQIDPERNTQSQLLTQAQTQEDTHTYISTPQTNFDDPLATMEINALLNMNEELNDTNNPERNSFIDNIFREALDHFTNTDPTKRSYIPKQRTTKKLAQVTNYIDNTLLPQYVNENTSFDELQTTLYCAAWTSAKINGSKLSLPPPENPTTSRNKEHKPRWQRRLERKIEDLRAKIGRLTHYINGNRSRNLQAQVFKIMEEYKIHTIHEENNTQLVHFLDTLKQKLSVVSSRLKRYKACSLRKSQNNQFTNHEKQFYRNLARPNITRSDNNNSSTMASPEELRQFWAQIWENSVQHNEDAEWIAKEQEESTNIQEMEFDAITAETFQQVLGKLHNWKTPGSDNIHNYWIKKFSYLHSFLHNFINHFIKNPDNIPDYITNGITYMLPKDASDTANPAKYRPITCLQTIYKIITSCLTEIIYKHTESNNIMTEQQKGCRRSSHGCKEQLTIDAVIHTQVQKAKKDLFTMYIDYKKAYDSVPHSWLLKILDIYKIHPVICTFLQQISQKWTTRLQLNSADGIQRSEAIKIKRGIFQGDSLSPLWFCLALNPLSNMLNTTNIGYTLKLQQGTNELTDNRDTEKISHLMYMDDIKLYSETENQLEDLAHITEKFSHDIHMQFGVDKCKINSIRAGQTHQHTYQMTTGETIEPLEENDFYKYLGYNQAKLIEHKDTKDAITKNFKHRLRAILNSQLNSKHTIKAINTYAIPVLTYSFGIIRWTKTELKSLQRTIHTTMTRHRKHHPRSCIQRMTLPRVDGGRGLIDILNLHAKQITNLRNYFHKKTQTSILHHAIADNDNKLTPLNLKDRNLQNNETQTDRQTKLQMWANKALHGRHFQDLRHNNVDSKASNEWLKRGVLFPETEGFIMAIQDQVIETRNYQKHIIKLPVSDICRKCKSASETIQHITGACKALAQSDYKHRHDQIANIIHQLLAQKYKLITDPPVPYYKYKAETILENSTHKLYYDRAILTDKTIHFNRPDITLINKVDKTAHLIDIAVPNTHNIQKTITEKLTKYIELKDEIARVWQLRKVSIVPIVLSSTGVIPIQLVTSLRTLDLHDNTYIQLQKASILNTCRLTRKFLQTEQL

SEQ ID NO: 350 - protein, 979 aa, Marasmia exigua
MILPKHIDENTSFETFQTILYCSAWTAAKVNGAKLSLSPTENTYVRRKVTKPRWQIRLERKVEDLRAIIGRMTQYINGNRGRKLAAHVKKIMTEYKIHSIHEETNTQLIHFLDTLKQKLSVVNSRLNRYKACTLRKTQNNQFRNNEKQFYRNITNPNTTLNDQNNTSAKMASPEQLREFWSNIWENPVEHNENAEWIKQEAERYGNIQGMESEVIPMETLLTTLEKLHNWKTPGSDYIHNYWFKKFTHIHTFLHTFINNFIQNPHNIPEYLMTGVTYMLPKDHKDTSNPAKFRPITCLQTTYKIITSCLTNVIYNHIEKNNILSEEQKGCRKSSQGCKEQLTIDAVIHKQVQKLKRNLYTMYIDYKKAYDSVPHSWLKKILDIYKIHPTIKVFLDHITQRWNTQLHLNTQDGTQRSDTIKIKRGIFQGDALSPLWFCLALNPLSNLLNFTNNGYSLTYQRDNFTDRLTDSNEQKLNHLMYMDDIKLYAYSEIELEELANITELFSLDIKMEFGIDKCRINSIRAGQNHQHNYHMSTGETITPLGETDVYKYLGYNQSKLIEHKSTKDTLTKQFKHRLNSILTSKLDSRNTVKAINTYAIPILTYSFGIIQWTKAELKSLQRTLHTSMTKQRKHHPRSCVQRMTIPRSEGGRGLIDILNLYGKQITNLRKYFQEKAPTSPLHLAVVENDNILTPLNLKDKNQQNSEKQTDKQTKLQDWSRKALHGRHFNDLYHANVNKKASNEWLKRGELYPETEGFILAIQDQVIETRNYQKHIMKLSITDICRRCQSAPETIQHITGSCKTITQSDYKHRHDQVASIIHQLLARKHKLLSEPPIPYYKYKADSVLENSTHKLYYDRAILTDKTIHFNRPDITLINKHNKTAQLIDIAVPNTHNLQRTITEKLTKYTELKEEITRMWQLKKVTIVPIVLSSTGIIPSQIFPSLRSLELHENTYIQLQKACILNTCRLTRKFLQSADNLE

SEQ ID NO: 351 - protein, 1349 aa, Marasmia exigua
MRSNGDGGLNRRAPLDKNITAETSHVDEELSRRTPFDNVTTAENSPLPDDSDSLNSSDTTSILSMGSLFHRSESSTTTSSEFNEEFLDVVQEAIMATNTAPTTNKTKRRRWTIEMNKFILRTYLRVTQLETDTKTYLDDLHKLFSEKFPEMQATRQRLGDQKRAILRNKLIPQEEIDNIYIEVQAELNGSNHTSQTQRSQLLHTKTSNTSTTTQLSQRMRWTNAYNETIMREYYRVTQLETDMTTYRQKIHQHFINIYPHLSHITEQRVADQRRLIILNKMIPNDRLQIIKKEIAEELKINVESYDNTETATQYTQCSNNEINSETHTQTVTHSHNDNISHNSFNISGTCRNVPTENPETNPEIEKIFAEALVYYTNIKPTARNFIPKQKSTRKLASIIYYIDKMILPKHIDENTSFETFQTILYCSAWTAAKVNGAKLSLFPTENTYVRRKVTKPRWQIRLERKVEDLRAKIGRMTQYINGNRGRKLAAHVKKIMTEYKIHSIHEETNTQLIHFLDTLKQKLSVVNSRLNRYKACTLRKTQNNQFRNNEKQFYRNITNPNTTINDQNNTSAKMASPEQLREFWSNIWENPVEHNENAEWIKQETERYGNIQGMESEVIPMETLLTTLEKLHNWKTPGSDYIHNYWFKKFTHIHTFLHTFINNFIQNPHNIPEYLMTGVTYMLPKDHKDTSNPAKFRPITCLQTTYKIITTCFTNVIYNHIEKNNILSEEQKGCRKSSQGCKEQLTIDAVIHKQVQKLKRNLYTMYIDYKKAYDSVPHSWLKKILDIYKIHPTIKVFLDHITQRWNTQLHLNTQDGTQRSDTIKIKRGIFQGDALSPLWFCLALNPLSNLLNFTNNGYSLTYQRDNSTDRLTDSNEQKLNHLMYMDDIKLYAYSEIELEELANITELFSLDIKMEFGIDKCRINSIRAGQNHQHNYHMSTGETITPLAETDVYKYLGYNQSKLIEHKSTKDTLTKQFKHRLNSILTSKLDSRNTVKAINTYAIPILTYSFGIIQWTKAELKSLQRTIHTSMTKQRKHHPRSCVQRMTIPRSEGGRGLIDILNLYGKQITNLRKYFQEKAPTSPLHLAVVENDNKLTPLNLKDKSQQNSEKQTDKQTKLQDWSRKALHGRHFNDLYHANVDRKASNEWLKRGELYPETEGFILAIQDQVIETRNYQKHIMKLSITDICRRCQSAPETIQHITGSCKTITQSDYKHRHDQVASIIHQLLARKHKLLSEPPIPYYKYKADSVLENSTHKLYYDRAILTDKTIHFNRPDITLINKHNKTAQLIDIAVPNTHNLQRTITEKLTKYTELKEEITRMWQLKKVTIVPIVLSSTGIIPSQIFPSLSH

SEQ ID NO: 352 - protein, 1431 aa, Cnaphalocrocis medinalis
MSVYRKYELRPLPGGRRGTPGAVAGCSSMRSNGDGGLSRRAPLDKNITAGTCGDEELSRRTPVDSITTAEDNPQSEDSDCLNLSDTTSVLSMGSLFHRSESSSTPSSELNEEFIDVVQEASPAINTAPTMNKTKRKRWTIDMNKFILRTYLRVTQLETDTKTYLDDLHKLFSEKFPEMQATRQRLGDQKRAILRNKLISQEVIDSIYIEVAAELNEKNHTSQTQPSQSLHTQTTASNTRTITQPSQRMRWNNAYNETIIREYYRVTQLETDMTTYRQKIHQHFINTYPHLSHVTEQRIADQRRLIILNKMIPNERLQIIKKEVAEELRLNANTHENTQIDTHNTYTLDSNNQINSQIHTQPVTCPHNDDILQNSMNIPCLNGTRSNDPTENTEDSATAESTPETNLEIENTFSESLKYYTKTEPTARNYIPKQKSTRKLASIVYYIDKKILPNHINEDTNFETFQTILYCAAWTAAKINGAKLSLPPTENTNARRKVSKPRWQIRLERKVEDLRAKIGRMTHYINGNRGRKLVAHVKKIMAEYQIHSIHEETNTQLIHFLDTLKQKLSVVNSRLNRYKACTLRKTQNNQFRNNEKQFYRNINNTNTNTTSITNERNNTSTNMASPEQLREFWSKIWEKPEEHNESADWIKQEQERYANIQSMETEVISIETLLAVLEKLHNWKTPGSDNIHNYWFKKFTHIHTFLHTFINNFIQNPQNIPEYLMTGITYMLPKDPQDTTNPAKYRPITCLQTTYKIITSCLTSAIYDHIQSNNILSEEQKGCRRSSQGCKEQLTIDAVIHKQVQKLKKNLYTMYIDYKKAYDSVPHSWLKKILDIYKIHPTIRVFLDHISQRWKTQLHVNTQNGTQRSDTIKINRGIFQGDALSPLWFCLALNPLSNLLNSTSNGYSLTYRHDNFTDGLTDWNEHKLNHLMYMDDIKLYANSEIDLDELANITELFSLDIKMEFGIDKCKINSIRAGQNYQHNYHLSTGETITPLTGEDVYKYLGYNQSKLIEHKSTKATLTKQFKHRLNAILTSKLDSRNTIKAINTYAIPILTYSFGIIQWTKTELKSLQRTIHTSMTKQRKHHPRSCVQRMTIPRSEGGRGLIDILNLHGRQITNLRKYFHEKAATTTLHLAIVENDYKLTPLNLKDQNQQKSERQTDRQTKLQEWSRKALHGRHFHDLCHANVDRKASNEWLKRGELFPETEGFILAIQDQVIETRNYQKHIMKLPITDICRRCQSAPETIQHITGSCKTITQTDYKHRHDQVASIIHQLLAHKHKLLSESPIPYYKYKADSVLENSTHKLYYDRAILTDKTVHFNRPDITLINKHNKTAQLIDIAVPNTHNLQRTITEKLTKYTELKEEITRMWQLKKVTIVPVVLSSTGVIPTQIFPSLRSLDLHEKTFIQLQKACILNTCRLTRKFLQSAEVSE

SEQ ID NO: 353 - protein, 1431 aa, Cnaphalocrocis medinalis
MSVYRKYELRPLPGGRRGTPGAVAGCSSMRSNGDGGLSRRAPLDKNITAGTCGDEELSRRTPVDSITTAEDNPQSEDSDCLNLSDTTSVLSMGSLFHRSVSSPTPSSELNEEFIDVVQEASPAINTAPTMNKTKRKRWTIDMNKFILRTYLRVTQLETDTKTYLDDLHKLFSEKFPEMQATRQRLGDQKRAILRNKLISQEVIDSIYIEVAAELNERNHTSQTQPSQSLHTQTTTSNTRTITQPSQRMRWNNAYNETIIREYYRVTQLETDMTTYRQKIHQHFINTYPHLSHVTEQRIADQRRLIILNKMIPNERLQIIKKEVAEELRLNANTHENTQIDTHNTYTLDSNNQINSQINTQPVTCPHNDDILQNNMNIPCLNGTRSNDPTENTEDSATAESTPETNPEIENTFSESLKYYTKTEPTARNYIPKQKSTRKLASIVYYIDKKILPNHINEDTNFETFQTILYCAAWTAAKINGAKLSLPPTENTNARRKVSKPRWQIRLERKVEDLRAKIGRMTHYINGNRGRKLVAHVKKIMAEYQIHSIHEETNTQLIHFLDTLKQKLSVVNSRLNRYIACTLRKTQNNQFRNNEKQFYRNINNTNTNTTSITNERNNTSTNMASAEQLREFWSKIWEKPEEHNESADWIKQEQERYANIQSMETEFISIETLLAVLEKLHNWKTPGSDNIHNYWFKKFTHIHTFLHTFINNFIQNPQNIPEYLMTGITYMLPKDPQDTINPAKYRPITCLQTTYKIITSCLTSVIYDHIQSNNILSEEQKGCRRSSQGCKEQLTIDAVIHKQVQKLKKNLYTMYIDYKKAYDSVPHSWLKKILDIYKIHPTIRVFLDHISQRWKTQLHLNTQNGTQRSDTIKINRGIFQGDALSPLWFCLALNPLSNLLNSTSNGYSLTYRHDNFTDGLTDWNEHKLNHLMYMDDIKLYANSEIDLDELANITELFSLDIKMEFGIDKCKINSIRAGQNYQHNYHLSTGETITPLTGEDVYKYLGYNQSKLIEHKSTKATLTKQFKHRLNAILTSKLDSRNTIKAINTYAIPILTYSFGIIQWTKTELKSLQRTIHTSMTKQRKHHPRSCVQRMTIPRSEGGRGLIDILNLHGRQITNLRKYFHEKAPTTTLHQAIVENDYKLTPLNLKDQNQQKSERQTDRQTKLQEWSRKALHGRHFHDLCHANVDRKASNEWLKRGELFPETEGFILAIQDQVIETRNYQKHIMKLPITDICRRCQSAPETIQHITGSCKTITQTDYKHRHDQVASIIHQLLAHKHKLLSESPIPYYKYKADSVLENSTHKLYYDRAILTDKTVHFNRPDITLINKLNKTAQLIDIAVPNTHNLQRTITEKLTKYTELKEEITRMWQLKKVTIVPVVLSSTGVIPTQIFPSLRSLDLHEKTFIQLQKACILNTCRLTRKFLQSAEVSE

SEQ ID NO: 354 - protein, 1448 aa, Cnaphalocrocis medinalis
MSSNRRYNLRPLPGVRRGTPGAVAGCSSMRPNGDGGLSRRAPLDKNTTAETRQGDEELSRRTPVDKSTTAETRQGDEELSRRTPVDKSITAETRLSDEELSRRTPVDTSTAAETTDKYDDRSLSVSPYLSSSSSYHRSDMSSPLSSDFAEFTDVVQRANTAIVTVPTVNEPAKRRRWSSEMNQFILRTYFKATRLEEDTTTYLDELHSKFTEKYPSMQVTRQRLGDQRRAIVRNKLIPQNIIDNIIMEVQSELNSNTTQHAPQSVSQNTQPTYTINTQSQQRMRWSNTLNEAIIRIYYKVTKLETDLTIYRQKIHQEFIKTFPHLSHVTEQRVADQRRIIIKNKMINSDRMRIIRKEVADELQMIDDGETLIDNHANTCTESTNAQTEASLRQNITDSILNSINIEALLTNEPPEINSEIEQLEPNLTIDTTFKEALEYYTNTEPTSRSYIPKQKSTKKLAGIVYYINAVILPQQVNEDTEFDVLQTVLYCAAWTAAKINGAKLCIPERPIVKKKDYKPNWQKRLERKVEDLRIKIGRMVQYINGNRSRKLVRHVESIMTQYKIHSIHEETNTKLTQFLDTLKQKLTVVSSRLKRYKACTLRKTQNNQFNSNEKQFYRNISNPNASNPNLNNRTPDAEDLRQFWANLWENSKEHAAEAEWIKDEENRFAELQEMEFEAIPIDIFKKVIEKQHNWKAPGSDHIHNYWIKKFTYLHDYLHNFINNFIINPDETPKYITSGITYMLPKDLEDSTNPAKYRPITCLQTIYKIMTSCITELIYQHIDNNKILTEQQKGCRKASQGCKEQLTIDSVILKKVQKSRNDLFSMYIDYKKAYDSVPHSWLLKILNIYKIHPKINTFLQNTSQKWTTKLKINTDNGTIQTEDIRVRRGIFQGDALSPLWFCLALNPLSNMLNGSKVGYTLKYTQTGTINDFTDRQNDTNEEILSHLLYMDDIKLYATTEEDLEKLANITERFSKDIGMEFGIDKCRINSIKAGKNYQHHYNMDTGEIIMPLEERDVYKYLGYNQSKLIEYKTTKETLTKKFKHRLNSILTSHLYSRNTIKAINTYAIPVLTYSFGVINWTKTELKTLQRLVHKSMTKHRKHHPRSCVQRMTLPRVDGGRGLIDLINLHAKQISNLRKYFHEKAQSSKLHHAIVKNDRKLTPLNLEDYNHQNKENQTDRLTKQQEWSRKSLHGRHYSDLCQSNVDCKASNEWLRRGELFPETEGFILAIQDQVIETRNYQKHIMKQPITDICRRCNSATETIQHITGACKTIAQTDYKHRHDQVANIIHQLLAFKYNLLHEMDTPYYKYSPESVLENSTHKLYYDRAILTDKTVHFNRPDITLLDKINKTAQLIDIAIPNTHNLNKTIVEKLSKYTDLKDEISRMWQLRKVTIVPIVLSATGVIPIQLLPSLRTLGLRDEIYSKLQKACILNTCRLTRKFLQQDQNTFE

SEQ ID NO: 355 - protein, 1415 aa, Marasmia exigua
MSSNRRYVLRPLPGVRRGTPGAVAGCSSMRSIGDGGLSRRAPLDKNATAETHQGDEELNRRTPVDKFTTAETSDINDDRSLSVSPFLSSSSSYHRSDISSPPSSDFADVVQEASTATITAPTVNAPTKRRRWSPEMNQFILRTYLRTTRLEEDTTGYLDELYSNFTKKYPTMQVTRQRLGDQRRAIVRNKLLPQNTIDNIIIEVQTELNSHTLHPQSVSQNTQLPYTRNTQSKQRMRWSNALNEAIIRIYYKVTKLETDLTIYRQKVHQEFINTFPHLSHVTEQRVADQRRLIIKNKMVSSDRMRIIRKEVADELHMTDDGEALSDSHVSTYINFTDLRTDTNRALTSQANDQARSLHQDNIDNNILQSINVEDLSRIEPPEANSETEQLEPNPTIDNTFREALEYYTNTEPTSRSYIPKQKSTKKLTGIVHYINTVTLPQNVNEETGFNELQTVLYCAAWTAAKINGAKLFIPERQIVKKNDYKPNWQTRLERKVEDLRTKIGRMTHYINGNRSRKLVKHVEYIMTQYKIHSIHEEANTQLIHFLDTLKQKLTVISSRLKRYKACTLRKTQNNQFYSNEKQFYRNISNPNTSNSNRNYRFPAAEDLREFWAQLWETSKEHAGEAEWIKYEENRFAELQEMDFEAVPIDIFKIVIEKQHNWKAPGSDHIHNYWIKKFNYLHVFLHNFINHFIVNPDETPEYLTSGVTYMLPKDLEDTVNPAKYRPITCLQTLYKIMTSCITELIYQHIDNNKILTEQQKGCRKASQGCKEQLTIDSVILKKVQKARSDLFSMYIDYKKAYDSVPHSWLIKVLNIYKIHPTIYTFLQNINQKWSTKLRLNTDNGTIQTEDIRVRRGIFQGDALSPLWFCLALNPLSNMLNDSNVGYSLKYKQTDTINDSTDRQNDINEEILSHLLYMDDIKLYATTEEDLKKLANITERFSNDIGMEFGIDKCRINSIKAGKNYQHHYNMDTGEVIMPLEERDVYKYLGYNQSKLLEYKSTKETLIRKFKHRLNSILTSQLNSRNTIKAINTFAIPVLTYSFGVIFWTKTELKSLQRLAHTSMTKHRKHHPRSCIQRMTLPRADGGRGLIDIINLHAKQISNLRKYFHEKAQASKLHHAVVKNDQKLTPMNLEDNSTQNNENQTDRLTKQHEWSRKSLHGRHYSDLSQTNVDRKASNEWLRRGELFPETEGFLLAIQDQVIETRNYQKHIMQQPVTDICRRCNSASETIQHITGACKTIAQTDYKHRHDQVANIIHQLLAYKYNLLHEIETPYYKYTPETVLENSTHKLYYDRAILTDKTIHFNRPDITLLDKTNKTAQLIDIAIPNTHNLNKTIVEKITKYTDLKDEIARMWQLRKVTIVPIVMSATGVIPIQLLPSLRTLGLRDEIFIKLQKACILNTCRLTRKFLQNVQNTVE

SEQ ID NO: 356 - protein, 1403 aa, Ostrinia furnacalis
MRVTNRAMVNPSYGEMSNRRYNLRPLPGGRRGAPGAVAGCLSMRSNGDEELSRRAPVDKNTTAEESQDFDTQSLLSTGSSCYQPEPERPSSSSSEYQSCEDVAQEVPRTVKSVPTTHERRKRRRWTEEMNIFILRTYLEITSLESDTKNYLELLHKRFIEKYPDLEVTRQHLGNQRRSIVNNKLISQTVMDNIYREVQATINTLPSQNSLASTTYYSSSQRMRWNNTHNESIMRSYYRVTELETNKTAYRHTLYQDFITAFPQLSHITEQRIADQRRLIILNKWITNSRLNEIKEEVAAELRSANAERIITTAFNTQRSEESENTNNNLSNTNLSLFTQPPDTSLTALTYDTVTQTTDEELLNILRNNTDTQQDEPSQRIPEVDNTFQEALNYFTNTDPTSRNYIPRQKATKKLAITTQYINKIILPQYVNDATTFNTLQTVLYCAAWTAAKVNGTKLSLPEHHTLPHTEQANKTPKRDNKPRWQRRLETRIKDLRTKIGRLTHYINGNRSSNLTKRVNKILHDYKVHSTHEENNTQLTHFLDTLKQKLSVLSSRLDRYNKCTLRKIQNKQFLSNEKQFYRKIRLNTADNSQHHTISSSPSPEEMREFWANIWEKSANYNEEAEWVRDEQQKFTHIQGMQFDAISFDTFKNIIDKSHNWKSPGSDQIHNYWYKKLTYLHTYLHHFINDFITNPQNMPTFITTGITYMIAKDKNDTLNPSKYRPITCLQTIYKIITSCIAHIIYNHTELNEILTEQQKGCKKYSQGCKEQLTIDSVILKQVKKHKTDLYSMYIDYKKAYDSVPHSWLLRILNIYKIHPTIIQFLESTMQTWTTQLKINTDAGTLHSEPIKIKRGIFQGDALSPLWFCLALNPLSNKLNSTDLGYTLTEHTNTETLSETVSHLMYMDDIKLYASSETDLEILANITEKFSLDINMEFGIDKCKINSVKRGQRYQHSYQLDTGEIITPLEENDTYKYLGYNQSNLIDHKHTKDNLKKQFRIRLNAILSTQLNSGSMIKAINTYAIPILTYSFGIINWSKTELKTLQRIINTSMTKHRKHHPRSCVQRLTLPRTDGGRGLIDIVNLHAKQITNLRAYFHSKSQTSLLHRLISQNDCKLTPLNLIDQNTQKCEKQTHKDTKLQEWIRKSLHGRHLQDLLHNNVDCKASNEWLKRGELFPETEGFIIAIQDQIIETRNYQKYIMKLPNSQNDICRRCNSSPETIQHITGACKAIVQTDYKYRHDQVANIIHQAIAQKYKLLTPPSTPYYKYNPETILENTSHKLYFDRAILTDKTVHYNRPDITLIDKLNKTAQLIDIAIPNTHNLQKTIAEKLSKYTDLKDEITRMWRLNKVNIVPIVLSTTGVIPVQLIPSLRSLDLPEYISTQLQKASILNTCRIVRKFLQSSSNS

SEQ ID NO: 357 - protein, 1121 aa, Nilaparvata lugens
MKWSRDMNVFAIRAYYLATKAETDHTQYRERLLQCWRELLPESELSAQRISDQVRVIMRRKFLSDADLANIKQEVLQQLNGEENHENLLDEALVLEDAVQENADVDTNIAVNAEEVVAPVTEALEIDEGRVEEELLSNVHKLAGIAMECRNQLKKIPYNRKAFSVVKTVDRILARHVNEITDISQVTHWIYCGALTVLQELRIKLVPRVKKSSSSEQQCKSKWKIRLEKKISDLRKRIGIVTSYLQNPGRASNKQKTQIDGIIVQYVGFIQKSKLHETLKLHMDLWKQKLAALANRCRRYTQAEDRGHQAASFANNESKFYKRLNGGVGKVKHPSAEALEDFWKSVWERPAVHEEDAYWMRQVENEAREIPVMAECIIRPEDVALAAKKAHNWKAPGPDGIQNYWLKNFSSLHPVVAKCFDDLLNSESEIPAGFASGLTYMVPKKDGELGPKDYRPITCLNSVYKLLTSIITTKIEKHITENCIIAPEQLGCKKGAKGCKELLVVDSFIAGQASAKQRNLSIAWIDYAKAFDSVPHSWLVHVLQLYKVSSGIVNFLKLAMTEWSVRLCIGDGVDQFQTGAIKVVRGIYQGDSLSPLWFCLALNPLSLLLRNSPYGYKLNVSRELTVSHSFYMDDLKLYAKSPEQLENLLQLVTTFSQSIKMKLGLEKCAVLHVKKGKVVNTAEGMLTLENEIGQLQIGQTYLGLHQHLKISRVEVFSRLEIEFKRRLSKVMKSKLPSKHLIKAINSWVIPSLTYSFGVLKWSDTRLEQMDRLVRTQMTKNRVHHPRSSMSRLYMPRKLGGRGLSRVSDLCAKQEKRLREYFISANTNLLREVCRLDENYTALNLRNPNGREPLTVHDYKAEWQQRELHGRYCKHLNSDHNNHDLSSRWLTDGSLFPETEGFIIAMQDQVVATNAYRRHIIRDLSISDKCRLCNAAVESIQHIVSGCSILAPKEYLRRHNNVAKIVHLKLQQEFDFFEEMPPYYSYSPPAFIERNQIKIYWDVQMITDRQVIHNKPDILMLNMNQKEALIIDVAIPADENCQRTRGEKLRKYQELAFELKDMYGLNNVRIIPIVISVNGLVLNSTVESCKAIDVSETLVGKMQKSVLLDTARIVRQTLQHIW

SEQ ID NO: 358 - protein, 1123 aa, Nilaparvata lugens
MKWSRDMNVFAIRAYYLATKAETDHTQYRERLLQCWRELLPESELSAQRISDQVRVIMRRKFLSDADLANIKQEVLQQLNGEENHENLLDEALVLEDAVQENADVDTNIAVNAEEVVAPVTEALEIDEGRVEEELLSNVHKLAGIAMECRNQLKKIPYNRKAFSVVKTVDRILARHVNEITDISQVTHWIYCGALTVLQELRIKLVPRVKKSSSSEQQCKSKWKIRLEKKISDLRKRIGIVTSYLQNPGRASNKQKTQIDGIIVQYVGFIQKSKLHETLKLHMDLWKQKLAALANRCRRYTQAEDRRHQAASFANNESKFYKRLNGGVGKVKHPSAEALEDFWKSVWERPAVHEEDAYWMRQVENEAREIPVMAECIIRPEDVALAAKKAHNWKAPGPDGIQNYWLKNFSSLHPVVAKCFDDLLNSESEIPAGFASGLTYMVPKKDGELGPKDYRPITCLNSVYKLLTSIITTKIEKHITENCIIAPEQLGCKKGAKGCKELLVVDSFIAGQASAKQRNLSIAWIDYAKAFDSVPHSWLVHVLQLYKVSSGIVNFLKLAMTEWSVRLCIGDGVDQFQTGAIKVVRGIYQGDSLSPLWFCLALNPLSLLLRNSPYGYKLNVSRELTVSHSFYMDDLKLYAKSPEQLENLLQLVTTFSQSIKMKLGLEKCAVLHVKKGKVVNTAEGMLTLENEIGQLQIGQTYKYLGLHQHLKISRVEVFSRLEIEFKRRLSKVMKSKLPSKHLIKAINSWVIPSLTYSFGVLKWSDTRLEQMDRLVRTQMTKNRVHHPRSSMSRLYMPRKLGGRGLSRVSDLCAKQEKRLREYFTSANTNLLREVCRLDENYTALNLRNPNGREPLTLHDYKAEWQQRELHGRYCKHLNSDHNNHDLSSRWLTDGSLFPETEGFIIAMQDQVVATNAYRRHIIRDLSISDKCRLCNAAVESIQHIVSGCSILAPKEYLRRHNNVAKIVHLKLQQEFGFFEEMPPYYSYSPPAFIERNQIKIYWDVQMITDRQVIHNKPDILMLNMNQKEALIIDVAIPADENCQRTRGEKLRKYQELAFELKDMYGLNNVRIIPIVISVNGLVLNSTVESCKAIDVSETLVGKMQKSVLLDTARIVRQTLQHIW

SEQ ID NO: 359 - protein, 1066 aa, Nilaparvata lugens
MRRKFLSDADLANIKQEVLQQLNGEENHENLLDEALVLEDAVQENADVDTNIAVNAEEVVAPVTEALEIDEGRVEEELLSNVHKLAGIAMECRNQLKKIPYNRKAFSVVKTVDRILARHVNEITDISQVTHWIYCGALTVLQELRIKLVPRVKKSSSSEQQCKSKWKIRLEKKISDLRKRIGIVTSYLQNPGRASNKQKTQIDGIIVQYVGFIQKSKLHETLKLHMDLWKQKLAALANRCRRYTQAEDRRHQAASFANNESKFYKRLNGGVGKVKHPSAEALEDFWKSVWERPAVHEEDAYWMRQVENEAREIPVMAECIIRPEDVALAAKKAHNWKAPGPDGIQNYWLKNFSSLHPVVAKCFDDLLNSESEIPAGFASGLTYMVPKKDGELGPKDYRPITCLNSVYKLLTSIITTKIEKHITENCIIAPEQLGCKKGAKGCKELLVVDSFIAGQASAKQRNLSIAWIDYAKAFDSVPHSWLVHVLQLYKVSSGIVNFLKLAMTEWSVRLCIGDGVDQFQTGAIKVVRGIYQGDSLSPLWFCLALNPLSLLLRNSPYGYKLNVSRELTVSHSFYMDDLKLYAKSPEQLENLLQLVTTFSQSIKMKLGLEKCAVLHVKKGKVVNTAEGMLTLENEIGQLQIGQTYKYLGLHQHLKISRVEVFSRLEIEFKRRLSKVMKSKLPSKHLIKAINSWVIPSLTYSFGVLKWSDTRLEQMDRLVRTQMTKNRVHHPRSSMSRLYMPRKLGGRGLSRVSDLCAKQEKRLREYFISANTNLLREVCRLDENYTALNLRNPNGREPLTVHDYKAEWQQRELHGRYCKHLNSDHNNHDLSSRWLTDGSLFPETEGFIIAMQDQVVATNAYRRHIIRDLSISDKCRLCNAAVESIQHIVSGCSILAPKEYLRRHNNVAKIVHLKLQQEFDFFEEMPPYYSYSPPAFIERNQIKIYWDVQMITDRQVIHNKPDILMLNMNQKEALIIDVAIPADENCQRTRGEKLRKYQELAFELKDMYGLNNVRIIPIVISVNGLVLNSTVESCKAIDVSETLVGKMQKSVLLDTARIVRQTLQHIW

SEQ ID NO: 360 - protein, 1117 aa, Nilaparvata lugens
MYLPSGPTIWLQKLKLIILNIGKGCCSVGMSFYRSLNSQLREYLIKLRVIMRRKFLSDADLANIKQEVLQQLNGEENHENLLDEALVLEDAVQENADVDTNIAVNAEEVVAPVTEALEIDEGRVEEELLSNVHKLAGIAMECRNQLKKIPYNRKAFSVVKTVDRILARHVNEITDISQVTHWIYCGALTVLQELRIKLVPRVKKSSYSKQQFKSKWKIRLEKKLRDLRKCIWIVTSYLKNPGRASNKQKTQIDGIIVQYVGFIQKSKLHETLKLHMDLWKQKLAVLANRCRRYTQAEDRRHQAASFANNESKFYKRLNGGVGKVKHPSAEALEDFWKSVWERPAVHEEDAYWMRQVENEAREIPVMAECIIRPEDVALAAKKAHNWKAPGPDGIQNYWLKNFSSLHPVVAKCFDDLLNSESEIPAGLASGLTYMVPKKDGELGSKDYRPITCLNSVYKFLTSIITTKIEKHITENCIIAPEQLGCKKGAKGCKELLVVDSFIAGQASAKQRNLSIAWIDYAKAFDSVPHSWLVHALQLYKVSSVIVNFLKLAMTEWSVRLCIGDGVDQFQTGAIKVVRGIYQGDSLSPLWFYLALNPLCLLLRNSSYGYKLNVSRELTVSHSFYKDDLKLYAKSPEQLENLLQLVTTFSQSINMKLGLEKCAVLHVKKGKVVNTAERMLTLENEIGQLQIGQTYKYLGLHQHLKISGVEVFSRLEIEFKRRLSKFMKSKLPPKHLIEAINSWVIPSLTYSFGILKWSDTHLERMDRLVRTQMTKNRVHHPRSSMSHLYMPRKLGGRGLSRVSDLCAKQEKRPREYFISANTNPLREVCRLDENYTALNLRNPNGREPLTVHDYKAEWQQRELHGRYCKHLNSDHNNHDLSSRWLTDRSLFPETEGFIIAMQDQVVATNAYRRHIIRDLSISDKCRLCNAAVESIQHIVSGCSILATKEYLRQHNNVAKIVHLKLQQEFDFFKEMPPYYSHSPPAFIERNQIKIYWDVQMITDRQVIHNKPDILMLNMNQKEALIIIDVAIPADENCQRTRGEKLRKYQELAFELKYMYGLNNVRIIPIVISVNGLVLNSTVESCKAIDVSETLVGKMQKSVLLDTARIVRQTLQHIW

SEQ ID NO: 361 - protein, 1120 aa, Nilaparvata lugens
MKWSRDMNVFAIRAYYLATKAETDHTQYRERLLQCWRELLPESELSAQRISDQVRVIMRRKFLSDADLANIKQEVLQQLNGEENLLDEALVLEDAVQENADVDTNIAVNAEEVVAPVTEALEIDEGRVEEELLSNVHKLAGIAMECRNLLKKIPYNRKAFSVVKTVDRILARHVNEITDISQVTHWIYCGALTVLQELRIKLVPRVKKSSSSEQQCKSKWKIRLEKKISDLRKRIGIVTSYLQNPGRASNKQKTQIDGIIVQYVGFIQKSKLHETLKLHMDLWKQKLAALANRCRRYTQAEDRRHQAASFANNESKFYKRLNGGVGKVRHPSAEALEDFWKSVWERPAVHEEDAYWMRQVENEAREIPVMAECIIRPEDVALAAKKAHNWKAPGPDGIQNYWLKNFSSLHPVVAKCFDDLLNSESEIPAGFASGLTYMVPKKDGELGPKDYRPITCLNSVYKLLTSIITTKIEKHITDNCIIAPEQLGCKKGAKGCKELLVVDSFIAGQASAKQRNLSIAWIDYAKAFDSVPHSWLVHVLQLYKVSSGIVNFLKLAMTEWSVRLCIGDGVGQFQTGAIKVVRGIYQGDSLSPLWFCLALNPLSLLLRNSPYGYKLNVSRELTVSHSFYMDDLKLYAKSPEQLENLLQLVTTFSQSIKMKLGLEKCAVLHVKKGKVVNTAEGMLTLENEIGQLQIGQTYKYLGLHQHLKISRVEVFSRLEIEFKRRLSKVMKSKLPSKHLIKAINSWVIPSLTYSFGVLKWSDTRLEQMDRLVRTQMTKNRVHHPRSSMSRLYMPRKLGGRGLSRVSDLCAKQEKRLREYFISANTNLLREVCRLDENYTALNLRNPNGREPLTVHDYKAEWQQRELHGRYCKHLNSDHNNHDLSSRWLTDGSLFPETEGFIIAMQDQVVATNAYRRHIIRDLSISDKCRLCNAAVESIQHIVSGCSILAPKEYLRRHNNVAKIVHLKLQQEFDFFEEMPPYYSYSPPAFIERNQIKIYWDVQMITDRQVIHNKPDILMLNMNQKEALIIDVAIPADENCQRTRGEKLRKYQELAFELKDMYGLNNVRIIPIVISVNGLVLNSTVESCKAIDVSETLVGKMQKSVLLDTARIVRQTLQHIW

SEQ ID NO: 362 - protein, 1123 aa, Nilaparvata lugens
MKWSRDMNVFAIRAYYLATKAETDHTQYRERLLQCWRELLPESELSAQRISDQVRVIMRRKFLSDADLANIKQEVLQQLNGEESHENLLDEALVLEDAVQENADVDTNIAVNAEEVVAPVNEALEIDEGRVEEELLSNVHKLAGIAMECRNQLKKMPYNRKAFSVVKTVDRILARHVNEITDISQVTHWIYCGALTVLQELRIKLVPRVKKSSSSEQQCKSKWKIRLEKKISDLRKHIGIVTSYLQNPGRASNKQKTKIDGIIVQYVGFIQKSKLHETLKLHMDLWKQKLAALANRCRRYTQAEDRRHQAASFANNESKFYKRLNGGVGKVKHPSAEALEDFWKSVWERPAVHEEDAYWMRQVENEAREIPVMAECIIRPEDVALAAKKAHNWKAPGPDGIQNYWLKNFSSLHPVVAKCFDDLLNSESEIPAGFASGLTYMVPKKDGELGPKDYRPITCLNSVYKLLTSIITTKIEKHITENCIIAPEQLGCKKGAKGCKELLVVDSFIAGQASAKQRNLSIAWIDYAKAFDSVPHSWLVHVLQLYKVSSGIVNFLKLAMTEWSVRLCIGDGVDQFQTGAIKVVRGIYQGDSLSPLWFCLALNPLSLLLRNSPYGYKLNVSRELTVSHSFYMDDLKLYAKSPEQLENLLQLVTTFSQSIKMKLGLEKCAVLHVKKGKVVNTAEGMLTLENEIGQLQIGQTYKYLGLHQHLKISRVEVFSRLEIEFKRRLSKVMKSKLPSKHLIKAINSWVIPSLTYSFGVLKWSDTRLEQMDRLVRTQMTKNRVHHPRSSMSRQYMPRKLGGRGLSRVSDLCAKQEKRLREYFTSANTNLLREVCRLDENYTALNLRNPNGREPLTLHDYKAEWQQRELHGRYCKHLNSDHNNHDLSSRWLTDGSLFPETEGFIIAMQDQVVATNAYRRHIIRDLSISDKCRLCNAAVESIQHIVSGCSILAPKEYLRRHNNVAKIVHLKLQQEFDFFEEMPPYYSYSPPAFIERNQIKIYWDVQMITDRQVIHNKPDILMLNMNQKEALIIDVPIPADENCQRTRGEKLRKYQELAFELKDMYGLNNVRIIPIVISVNGLVLNSTVESCKAIDVSETLVGKMQKSVLLDTARIVHQTLQHIW

SEQ ID NO: 363 - protein, 840 aa, Nilaparvata lugens
MDLWKQKLAALANRCRRYTQAEDRRHQAASFANNESKFYKRLNGGVGKVKHSSAEALEDFWKSVWERPAVHEEDAYWMRQVENEAREIPVMAECIIRPEDVALAAKKAHNWKAPGPDGIQNYWLKNFSSLHPVVAKCFDDLLNSESEIPAGFASGLTYMVPKKDGELGPKDYRPITCLNSVYKLLTSIITTKIEKHITENCIIAPEQLGCKKGAKGCKELLVVDSFIAGQASAKQRNLSIAWIDYAKAFDSVPHSWLVHVLQLYKVSSGIVNFLKLAMTEWSVRLCIGDGVDQFQTGAIKVVRGIYQGDSLSPLWFCLALNPLSLLLRNSPYGYKLNVSRELTVSHSFYMDDLKLYAKSPEQLENLLQLVTTFSQSIKMKLGLEKCAVLHVKKGKVVNTAEGMLTLENEIGQLQIGQTYKYLGLHQHLKISRVEVFSRLEIEFKRRLSKVMKSKLPSKHLIKAINSWVIPSLTYSFGVLKWSDTRLEQMDRLVRTQMTKNRVHHPRSSMSRLYMPRKLGGRGLSRVSDLCAKQEKRLREYFISANTNLLREVCRLDENYTALNLRNPNGREPLTVHDYKAEWQQRELHGRYCKHLNSDHNNHDLSSRWLTDGSLFPETEGFIIALQDQVVATNAYRRHIIRDLSISDKCRLCNAAVESIQHIVSGCSILAPKEYLRRHNNVAKIVHLKLQQGFDFFEEMPPYYSYSPPAFIERNQIKIYWDVQITDRQVIHNKPDILMLNMNEKEALIIDVAIPADENCQRTRGEKLRKYQELAFELKDMYGLNNVRIIPIVISVNGLVLNSTVESCKAIDVSETLVGKMQKSVLLDTARIVRQTLQHIW

SEQ ID NO: 364 - protein, 837 aa, Nilaparvata lugens
MDLWKQKLAVLANRCRRYTQAEDRRHQAASFANNESEFYKRLNGGVGKVKHPSAEALEYFWKSVWERPAVHEEDAYWMRQVENEAREIPVMAECIIRPEDVALAAKKAHNWKAPGPDGIQNYWLKNFSSLHPVVAKCFDDLLNSESEIPAGLTYMIPKKDGELGPKDYRPITCLNSVYKLLTSIITTKIEKHITDNCIIAPEQLGCKKGAKGCKELLVVDSFIAGQASAKQRNLSIAWIDYAKAFDSVPHSWLVHVLQLYKVCSGIVNFLKLAMTECSVRLCIGDGVNQFQTGAIKVVRGIYQGDSLSPLWFCLALNPLSLLLRNSPYGYKLNVSRELTVSHSFYMDDLKIYAKSPEQLENLLQLVTTFSQSIKMKLGLEKCSVLHVKKGKVVNTAEGMLTLENEIGQLQIGQTYKYLGLHQHLKISRVEVFSHLEIEFKRRLSKVMKSKLPSKHLINAINSWVIPSLTYSFGVLKWSDTRLEQMDRLVRTQMTKNRVHHPRSSMSRLYMPRKLGGRGLSRVSDLCAKQEKRLREYFISANTNLLREVCRLDENYTALNLRNPNGREPLTVHDYKAEWQQRELHGRYCKHLNSDHNNHDLSNRWLTDGSLFPETEGFIIAIQDQVVATNAYRRHIIRDLSISDKCRLCNAAVESIQHIVSGCSILAPKEYLRRHNNVAKIVHLKLEQEFDFFEEMPPYYSYSPPAFIERNQIKIYWDVQMITDRQVIHNKPDILMLNMNQKEALIIDVVIPADENCQITRGEKLRKYQELALELKDMYGLNNVRIIPIVISVNGLVLNSTVESCKAINVSETLVGKMQKSVLLDTARIVRQTLQHIW

SEQ ID NO: 365 - protein, 1303 aa, Laodelphax striatellus
MMIIIIIIIIIIIIIIIIIIIIIIIIIIIIIIIIIIIILFGDIGFISFFIIFQVDVRRKSYQLGLQPPGGILEFIAPRQVRNITREVRGDQADPLRTPHGQSGTGEGGPSGASPAQGTTRTRRYNFRNRFQINEPEPELVERDTSSESTDQGLEEVPPPPAQVRLPQPENRPRRMKWSREMNLAVIRAYYLATKAETDHTQYRERLLQCWRELVPESQLSAQRISDQVRVIKQRKFLSDAELANIKGEVLQQLNGERIDEGLVNEGQQDEREGRENIMDTNVAGVDDAEELAPCTNEAHGDDDESEEGRIEEILLNNVFKFAGMPMESRTQLRKVFYNKHTFHVVKLVDGILGRHTDRLTDICEVSHWMYCGALTVLQELGVKLLARGKRSSHSRQEKKSRWQKRLEGRINDLRKRIGIVTSYLQNPAGASEKQKTQIDEIIVQFIGPVQRDTLVETLALHMDQWKQKLAALANRCRRYRQAEARRQQTASFLNNEKNFYKSLNKDTSGNVEHSSVEAVEGFWKSIWERSVTHDEDAYWMEQVENSTQNLPNMAECVISTEDVALAAKKAHNWKVPGPDGIQNYWIKNFSSTHPVIAKCFCDLLNSRSEVPEGFASGLTYMVPKKEGVLSPKDYRPITCLNSIYKLMTSVITCKIEKHVTENSIVAPEQLGCKKGAKGCKELLVLDSFIAGHVIAKQRNVSVAWIDYAKAFDSVPHSWLLYVLQLYKVNAGIVNFLRSVMTGWRVRLCIGGGEEQIQTGSIKIARGIFQGDSLSPLWFCLALNPLSLLLRESSYGYKFEIRRELTVSHSFYMDDLKLYARSSEHLQSLLQLVTAFSQSINMQFGLDKCAILHVEKGHVKRARNEIVLLDDEIGQLGEGQTYKYLGFHQHLKISRADVFSKLEDEFKRRLNRVMKTKLASRNCIKAINSWVIPSLTYSFGVLKWSDTRLEQMDRLIRTTMTKNRMHHPRASMSRLYLPRKLGGRGLSKISDLCASQEKRLRDYFKNSNSHLLKSVCRLDNNYTALNMKDPQGREPTSMQTYKENWRQKELHGRYHGHLFLDLTHQEFSNKWLVVGNLFPETEGFICAIQDQVIATNAYRRHVMGDQSISDKCRLCNAAVESIQHITSGCSVLAPREYLKRHNNVARIVHLELQRKFHIIDQIPPYYLYSPPAFVTKNQIKIYWDVQMITDRRVPHNKPDILVMDMPRKEALIIDIAVPADENAQRTRGEKLRKYQELAFELKEMYGLSSVKIIPIVITVGGLMLKATAEACQTIDLSESLILKMQKSVLLDTARIVRQILQSTW

SEQ ID NO: 366 - protein, 1068 aa, Bradysia coprophila
MGQASGGMSENTDKYCLCLVDMNDRNMEMEKWILCKGCKILFHQICNFISDEEYDRIISEKDDWYCSNLKCQGLANLVASNEEGLVRRGPKRKCRNENVTLPSGLLFGSSIDDRVSCEICGFLAKNSRGLKIHMRIHERASVDSNVSSKDEDEVLHPSVEVNVSDVLGEFGLLLNQCRLSVPLTRVIQKSVRTVVCQELTRVIRDLVRKNDLDSWMKLMAFPYIVLSSKSKGSDGINVIRKNLVAFVECTDVNQALSKVLETKGVPFSFKAVDKESSVIKTATRKVSEGDVKGALRVLCSNESLAPQTVETAAKLQTKHPVDEGGTFEEVKLDFEISPTEVGDVVKAIRSFPLSSSGGIGGLRPRHLKDLTSFTCGDSANELLKAVSSLIDIIRSGLVQKDVLKVFFGASLTALNKGENDVRPIAVGLVWRRVAGKISNYKIREQLVRKLKPFQFGFGIKGGAEALVHAVREFCKTRHDKPMALVKFDFENAFNMLFRKFMLGEVKDVCPELFPLLQQAYRLVSNLYFADNPLLSQRGYQQGDPLGPTGFCIGIMRMTHSLLSRFNGWYLDDGTIGDELSTVLVDIQKVLSFYDVSGLRLNTKKCEVFFINATPDEEAHMYAEISALLPGIKKVDESSLELLGTPIFETGLKRMFSSKTESVKLMCDRLKLMDVHPALCVFRKSLSGCRFNYLMRTSRAYLLPDHLRSVDEMFRSTLEAIANVRLEGLSWDQASLPLSYGGIGIRRVEDLAIPAYLSSVYSSSELCDVILQKFNLKIINDQILQLIDEIPRNFVPETDTLKKEQRNWDLPKIKHQFDELFENGDLRTRARLLASSTKESSKWLQVIPSSQLGLLLDNNSARIAVGLRVGSKLCEEHKCICGKMVERDGLHGLSCAKCAEGKFARHDTMNNIFAHAFSSAGVPNIIQPPGVSRDDGKRPDGMTLIPWSHGKSLLWDVTVRDTMAASYINDSSKKARTIADKAERHKHNHYISLKQNYLLTPLAFETLGCMGPETKKFIDKLGSLMKKATGEAKSKDYLLQRLSIAIQRGNAACILGTLGKKKIDDFYLL

SEQ ID NO: 367 - protein, 916 aa, Bradysia coprophila
MRVHKRVSVEDATVQTTVPVDSESGCADSSVKPDISTVLQEFGLLLNQCRLSVPLTRVIQKSVRTVVCQELTKVIQDLVMKNDVDSWMRLIAFPFIVLGSKSKGTDGVNVIRSNLKVFKDCVNVNDTLNNVLETKGNSFKIKESVDKDSVVVKAAARKVSEGDISGAIRVLCSNESVAPQTIETAVKLRAKHPEDTGGIFEEVKVDIDFLRPRHLKDLISFTCGDSASHLLKAVSSLVDVIRSVKVEKDVAKFFFGASLTALSKGEADVRPIAVGLVWRRMAGKISNFKVRESLVEKLKPIQFGYGIQGGAEALVHSVRKFCKADHDRPMALVKLDFENAFNMLFRKFMLGEVRDVCPELFPLLQQAYRLVSNMYFVGDPLLSQRGFQQGDPLDPPGFCIGIMKMTHALLSRFNGWYLDDGTIGDELSVVLDDIQKVLSFCEVSGLRLNAKKCEVFFINATDDEEARMYAEISALLPGIKKVDESTLELLGSPVFETGLERMFSSKVESIKLMCDRLKLMDVHPALCVFRKSLSSCRFSYLMRASRAYLLPDKLRSVDKVFRSALESITNNRVEGLSWDQASLPLSFGGMGIRKVEDLAIPAYLSSVFSSSDLCDVILQRFDLRVIDEQIVQLINEIPQEFVPENDTLKKEQKNWDIPKIKNQFNELFENGDLKTRARLLASSTKESSKWLQVIPSSQLGLLLDNNSARIAVGLRLGTQICEEHKCLCGKTVEKDGLHGLSCVKCAEGKYVRHDIMNNIFAYAFSSAGVPNIVQPPGISRDDGKRPDGMTLIPWSHGRSLLWDVTVRDTMAASYINDSSKKARSIAEKAERHKHNHYVSLKQNYLLTPLAFETLGSMGPETKKFIDKLGSLMKKATGEVKSKEYLLQRISIAIQRGNAACILGTLGKKKIDDIYLL

SEQ ID NO: 368 - protein, 939 aa, Bradysia coprophila
MRVHKRVSVEDVVCSVPVDSESGCADSSVKTDISTVLQEFGLLLNQCRLSVPLTRVIQKSVRTVVCQELTRVIQDLVMKNDVDSWMRLIAFPFIVLGSKSKGTDGVNVIRSNLKVFKDCVNVNDTLNNVLETKGNSFRIKESVDKDSVVVKAATRKVSEGDISGAIRVLCSNESVAPQTIETAVKLRAKHPEDTGGIFEEVKVDIDLGLTTVDEVIKAIRSFPLSSSGGVGGLRPRHLKDLISFTCGDSASRLLKAVSSLMDVIRSGKVEKYVAKIFFGASLTALNKGEADVRPIAVGLVWRRMAGKISNFKVRESLVEKLKPIQFGYGIQGGAEALVHSVRKFCKADHDRPMALVKLDFENAFNMLFRKFMLGEVRDVCPELFPLLQQAYRLVSNLYFVGDPLLSQRGFQQGDPLGPPGFCIGIMKMTHALLSRFNGWYLDDGTIGDELSVVLDDIQRVLSFCEVSGLRLNAKKCEVFFINATDDEEARMYAEISALLPGIKKVDESTLELLGSPVFETGLERMFSSKVESIKLMCDRLKLMDVHPALCVFRKSLSSCRFSYLMRASRAYLLPDKLRSVDEVFRSALESITNNRVEGLSWDQASLPLSFGGMGIRKVEDLAIPAYLSSVFSSSDLCGVILQRFDLRVIDEQIVQLINEIPQEFVPENDTLKKEQKNWDIPKIKNQFNELFENGDLKTRARLLASSTKESSKWLQVIPSSQLGLLLDNNSARIAVGLRLGTQICEEHKCLCGKTVEKDGLHGLSCVKCAEGKYVRHDIMNNIFAYAFSSAGVPNIVQPPGISRDDGKRPDGMTLIPWSHGRSLLWDVTVRDTMAASYINDSSKKARSIAEKAERHKHNHYVSLKQNYLLTPLAFETLGCMGPETKKFIDKLGSLMKKATGEVKSKEYLLQRISIAIQRGNAACILGTLGKKKIDDIYLL

SEQ ID NO: 369 - protein, 1061 aa, Bradysia odoriphaga
MGQASGGMSADSDYVCCCLADNNMQNIENDDWITCKGCNKYFHKLCNLMLDEGNDGGIWYCLDEKCLELCGLGVVDCSSERSGRQRLGRKCKNKLKDNPSEVFLEESSADRVSCEVCGFLAKNNRGLKIHMNVHKRVMKADACSQGSNSVAERDVSDVLGEFGRLLNQCRLSVPLTRIIQKSVRTVVCQELTEVIETLVKKNDVQSWMRLIAFPYIVLSSKLKGKDGVNQIRSNIKLFKDCVDVNEALMGVLETRGVPFSLKESVDRDSIVVKTATRKVSEGDIKGAVRVLCSSESVAPQTVETAIKLQAKHPNDNGDVFGKVELDVDIGLTTADEVVRAIRSFPLSSSGGIGGMRPRHLKDLISFTCGDSANRLLKAICSLMDVVRSGKVQNDVSKVFFGASLTALNKGESDVRPIAVGLVWRRMAGKISNCKIRDVLVEKLKPVQFGFGVKGGAEALVHAVRRFCKAKHGKPMALVKFDFENAFNMLFRKFMLGEVEDICPELLPLLQQAYRLHSNLYFLDDPLLSQRGFQQGDPLGPPGFCIGIMKMTHSLLSRFNGWYLDDGCVGDELSTILVDIQNVLSFYDVSGLRLNASKCEVFFINATPDEEASMYAEISALLPGIKKVDESSLEMLGAPIFESGLKRMFSSKIEEIRLMCDRLKLMDVHTALCVFRKSMSSCRFSYLLRASEAYLLPDSLKAVDAIFRSTLEAITNTRVEGSSWDQASLPLSFGGLGVRRVEELAVPAYLSSIYSSSNLSNMILQKYSLEIIDEEILKLISEIPVDFIPENEVLRKEQRNWDLPRIKHQFNEMFESGDLKTRARLLASSTKESSKWLQVVPSSQLGLLLDNNTSRIAVGLRLGSQLCEEHKCICGEIVAKDGLHGLSCAKCAEGKFARHDSMNMIFSHGFSSAGIPNIIQPPGISRDNGKRPDGVTLIPWSHGRSLLWDVTVRDTMAASYITDSSKKARSIADKAERHKHNHYMKLKQNYLFTPLAFETLGCMGPETKKFVNKLGSLMKKATGEAKSKDYLLQRISIAIQRGNAACILGTLGKNRIDDFYLL

SEQ ID NO: 370 - protein, 1061 aa, Bradysia coprophila
MGQASGGMSGDSDYVCYCLVNNNMQNVENDDWIVCKGCNKYFHKLCSLMLDEGNDGGSWYCLAERCRGLCGLGVAECSSERSGRQRLGRKCKDKVKDSPSEVFLEESSGDRVSCEVCGFLAKNSRGLKIHMKVHKRVVKADACSQGSISVIERDISGALGDFGRLLNQCRLSVPLTRIIQKSVRTVVCQELTEAIETLVMKNDVRSWMRLIAFPYIVLSSKSKGKDGVNQIRSNVRFFKDCVDLNEALMVVLETRGVPFSLKEAVDRDSIVVKTATRKVSEGDIKGAVRVLCSSESVAPQTVETAVKLQAKHPVDNGDVFEQVEVDVDIGLTTVNEVVRAIRSFPLSSSGGIGGMRPRHLKDLISFTCGDSANRLLKAICSLMDVVRSGKVQNDVSKVFFGASLTALNKGESDVRPIAVGLVWRRMAGKISNFKVRDVLVEKLKPVQFGFGVKGGAEALVHSVRRFCKARHGKPMALVKFDFENAFNMLFRKFMSGEVEDICPELLPLLQQAYRLHSNLYFLDDPFLSQRGFQQGDPLGPPGFCIGIMKMTHSLLSRFNGWYLDDGCIGDELSTILVDIQNVLSFYEVSGLRLNSSKCEVFFINATPDEEACMYAEISALLPGIKKVDESSLEMLGAPIFESGLKKMFSSKMQEIKLMCDRLRLMDVHPALCVFRKSLSSCRFSYLLRASEAYLLSDSLKAVDEIFRSTLEAITNTRVEGSSWDQASFPLSFGGLGVRRVEELAVPAYLSSIYSSSNLSNMILQKFGLEIIDEEILKFISEIPIEFIPENEVLRKEQRNWDLPKIKHQFNEMFESGDLKTRARLLASSTKESSKWLQVVPSSQLGLLLDNNTSRIAVGLRLGSQLCEEHKCVCGEIVAKDGLHGLSCAKCAEGKFARHDSMNMIFSHGFSSAGIPNIIQPPGISRDDGKRPDGVTLIPWSHGRSLLWDVTVRDTMAASYITDSSKKARSIADRAERHKHNHYMKLKQNYLFTPLAFETLGCMGPETKKFVDKLGSLMKKATGEVRSKDYLLQRISIAIQRGNAACILGTLGKSRIDDFYLL

SEQ ID NO: 371 - protein, 1068 aa, Bradysia coprophila
MGQASGGMSENTDKYCLCLVDMNDRNMEMEKWILCKGCKILFHQICNFISDEEYDRIISEKGDWYCSNLKCQGLANLVASNEEGLVRRGPKRKCRNENITLPSGLLFGSSIDDRVSCEICGFLAKNSHGLKIHMRIHERASVDSNVSSKDEDEVLHPSVEVNVSDVLGEFGLLLNQCRLSVPLTRVIQKSVRTVVCQELTRVIRDLVRKNDLDSWMKLMAFPYIVLSSKSKGSDGINVIRKNLVAFVECADVNQALSKVLETKGVPFSFKAVDKESSVIKTATRKVSEGDVKGALRVLCSNESLAPQTVETAAKLQTKHPVDEGGTFEEVKLDFEISPTEVGDVVKAIRSFPLSSSGGIGGLRPRHLKDLTSFTCGDSANELLKAVSSLIDIIRSGLVQKDVLKVFFGASLTALNKGENDVRPIAVGLVWRRVAGKISNYKIREQLVRKLKPFQFGFGIKGGAEALVHAVREFCKTRHDKPMALVKFDFENAFNMLFRKFMLGEVKDVCPELFPLLQQAYRLVSNLYFADNPLLSQRGYQQGDPLGPTGFCIGIMRMTHSLLSRFNGWYLDDGTIGDELSTILVDIQKVLSFYDVSGLRLNTKKCEVFFINATPDEEAHMYAEISALLPGIKKVDESSLELLGTPIFETGLKRMFSSKTESVKLMCDRLKLMDVHPALCVFRKSLSGCRFNYLMRTSRAYLLPDHLRSVDEMFRSTLEAITNVRLEGLSWDQASLPLSYGGIGIRRVEDLAIPAYLSSVYSSSELCDVILQKFNLKIINDQILQLIDGIPRNFVPETDTLKKEQRNWDLPKIKHQFDELFENGDLRTRARLLASSTKESSKWLQVIPSSQLGLLLDNNSARIAVGLRVGSKLCEEHKCICGKMVERDGLHGLSCAKCAEGKFARHDTMNNIFAHAFSSAGVPNIIQPPGVSRDDGKRPDGMTLIPWSHGKSLLWDVTVRDTMAASYINDSSKKARTIADKAERHKHNHYISLKQNYLLTPLAFETLGCMGPETKKFIDKLGSLMKKATGEAKSKDYLLQRLSIAIQRGNAACILGTLGKKKIDDFYLL

SEQ ID NO: 372 - protein, 1071 aa, Bradysia coprophila
MGQASGGMSDNPDHVCFCPVKENDKNAQNIDTKNWTLCKGCNKYFHQLCTLMREEKNNKESWYCIDCECQELSGLCLTEDGNGKLGRRRIGRKCKERPKDSTGVYLEEDDVDRVSCDVCGFLAKNSRGLSIHMRVHKRVSVEDVVCSVPVDSESGCADSSVKTDISTVLQEFGLLLNQCRLSVPLTRVIQKSVRTVVCQELTRVIQDLVMKNDVDSWMRLIAFPFIVLGSKSKGTDGVNVIRSNLKVFKDCVNVNDTLNNVLETKGNSFRIKESVDKESVVVKAATRKVSEGDISGAIRVLCSNESVAPQTIETAVKLRAKHPEDTGGIFEEVKVDIDLGLTTVDEVIKAIRSFPLSSSGGVGGLRPRHLKDLISFTCGDSASRLLKAVSSLVDVIRSGKVEKDVAKIFFGASLTALNKGEADVRPIAVGLVWRRMAGKISNFKVRESLVEKLKPIQFGYGIQGGAEALVHSVRKFCKADHDRPMALVKLDFENAFNMLFRKFMLGEVRDVCPELFPLLQQAYRLVSNLYFVGDPLLSQRGFQQGDPLGPPGFCIGIMKMTHTLLSRFNGWYLDDGTIGDELSVVLDDIQRVLSFCEVSGLRLNAKKCEVFFINATDDEEARMYAEISALLPGIKKVDESTLELLGSPVFETGLERMFSSKVESIKLMCDRLKLMDVHPALCVFRKSLSSCRFSYLMRASRAYLLPDKLRSVDEVFRSALESITNNRVEGLSWDQASLPLSFGGMGIRKVEDLAIPAYLSSVFSSSDLCGVILQRFDLRVIDEQIVQLINEIPQEFVPENDTLKKEQKNWDIPKIKNQFNELFENGDLKTRARLLASSTKESSKWLQVIPSSQLGLLLDNNSARIAVGLRLGTQICEEHKCLCGKTVEKDGLHGLSCVKCAEGKYVRHDIMNNIFAYAFSSAGVPNIVQPPGISRDDGKRPDGMTLIPWSHGRSLLWDVTVRDTMAASYINDSSKKARSIAEKAERHKHNHYVSLKQNYLLTPLAFETLGCMGPETKKFIDKLGSLMKKATGEVKSKEYLLQRISIAIQRGNAACILGTLGKKKIDDIYLL

SEQ ID NO: 373 - protein, 1071 aa, Bradysia coprophila
MGQASGGMSDNPDHVCFCPVKENDKNAQNIDTKNWTLCKGCNKYFHQLCTLMREEKNNKESWYCIDCECQELSGLCLTEDGNGKLGRRRIGRKCKERPKDSTGVYLEEDDVDRVSCDVCGFLAKNSRGLSIHMRVHKRVSVEDVVCSVPVDSESGCADSSVKTDISTVLQEFGLLLNQCRLSVPLTRVIQKSVRTVVCQELTRVIQDLVMKNDVDSWMRLIAFPFIVLGSKSKGTDGVNVIRSNLKVFKDCVNVNDTLNNVLETKGNSFRIKESVDKDSVVVKAATRKVNEGDISGAIRVLCSNESVAPQTIETAVKLRAKHPEDTGGIFEEVKVDIDLGLTTVDEVIKAIRSFPLSSSGGVGGLRPRHLKDLISFTCGDSASRLLKAVSSLVDVIRSGKVEKDVAKIFFGASLTALNKGEADVRPIAVGLVWRRMAGKISNFKVRESLVEKLKPIQFGYGIQGGAEALVHSVRKFCKADHDRPMALVKLDFENAFNMLFRKFMLGEVRDVCPELFPLLQQAYRLVSNLYFVGDPLLSQRGFQQGDPLGPPGFCIGIMKMTHALLSRFNGWYLDDGTIGDELSVVLDDIQRVLSFCEVSGLRLNAKKCEVFFINATDDEEARMYAEISALLPGIKKVDESTLELLGSPVFETGLERMFSSKVESIKLMCDRLKLMDVHPALCVFRKSLSSCRFSYLMRASRAYLLPDKLRSVDEVFRSALESITNNRVEGLSWDQASLPLSFGGMGIRKVEDLAIPAYLSSVFSSSDLCGVILQRFDLRVIDEQIVQLINEIPQEFVPENDTLKKEQKNWDIPKIKNQFNELFENGDLKTRARLLASSTKESSKWLQVIPSSQLGLLLDNNSARIAVGLRLGTQIYEEHKCLCGKTVEKDGLHGLSCVKCAEGKYVRHDIMNNIFAYAFSSAGVPNIVQPPGISRDDGKRPDGMTLIPWSHGRSLLWDVTVRDTMAASYINDSSKKARSIAEKAERHKHNHYVSLKQNYLLTPLAFETLGCMGPETKKFIDKLGSLMKKATGEVKSKEYLLQRISIAIQRGNAACILGTLGKKKIDDIYLL

SEQ ID NO: 374 - protein, 1068 aa, Bradysia coprophila
MGQASGGMSENTDKYCLCLVDMNDRNMEMEKWILCKGCKILFHQICNFISDEEYDRIISEKGDWYCSNLKCQGLANLVASNEEGLVRRGPKRKCRNENVTLPSGLLFGSSIDDRVSCEICGFLAKNSRGLKIHMRIHERASVDSNVSSKDEDEVLHPSVEVNVSDVLGEFGLLLNQCRLSVPLTRVIQKSVRTVVCQELTRVIRDLVRKNDLDSWMKLMAFPYIVLSSKSKGSDGINVIRKNLVAFVECTDVNQALSKVLETKGVPFSFKAVDKESSVIKTATRKVSEGDVKGALRVLCSNESLAPQTVETAAKLQTKHPVDEGGTFEEVKLDFEISPTEVGDVVKAIRSFPLSSSGGIGGLRPRHLKDLTSFTCGDSANELLKAVSSLIDIIRSGLVQKDVLKVFFGASLTALNKGENDVRPIAVGLVWRRVAGKISNYKIREQLVRKLKPFQFGFGIKGGAEALVHAVREFCKTRHDKPMALVKFDFENAFNMLFRKFMLGEVKDVCPELFPLLQQAYRLVSNLYFADNPLLSQRGYQQGDPLGPTGFCIGIMRMTHSLLSRFNGWYLDDGTIGDELSTVLVDIQKVLSFYDVSGLRLNTKKCEVFFINATPDEEAHMYAEISALLPGIKKVDESSLELLGTPIFETGLKRMFSSKTESVKLMCDRLKLMDVHPALCVFRKSLSGCRFNYLMRTSRAYLLPDHLRSVDEMFRSTLEAITNVRLEGLSWDQASLPLSYGGIGIRRVEDLAIPAYLSSVYSSSELCDVILQKFNLKIINDQILQLIDEIPRNFVPETDTLKKEQRNWDLPKIKHQFDELFENGDLRTRARLLASSTKESSKWLQVIPSSQLGLLLDNNSARIAVGLRVGSKLCEEHKCICGKMVERDGLHGLSCAKCAEGKFARHDTMNNIFAHAFSSAGVPNIIQPPGVSRDDGKRPDGMTLIPWSHGKSLLWDVTVRDTMAASYINDSSKKARTIADKAERHKHNHYISLKQNYLLTPLAFETLGCMGPETKKFIDKLGSLMKKATGEAKSKDYLLQRLSIAIQRGNAACILGTLGKKKIDDFYLL

SEQ ID NO: 375 - protein, 1064 aa, Bradysia coprophila
MGQTSSGLPDISDCICLCLDNNKDENIENWISCKGCDNWFHRKCNLKIGDDSAVIDEDWYCSGIDCQKLFFSLKNSKKRPVRERLGRECKGKVRGSALGIPSVEASVSERVTCSVCGFLAKNTRGLNIHMSKHERNERVIDDVSKDEGISSNRSGEESISDMLDDFGVLLNRCRVSVPLTRIIQKSVRIAVCQELSKEIESLVRKNDVVSWMRLLAFPYIVLNNKSKGTGGINVIRSNLNVFRNCTDINEALSNVLRSAGIPFTLDKSTDRDSVAIKVATRKVNEGDIRGAVRVLCSNNTVAPQTSETVSKLKAKHPDGNGEVFEEIELLSTLSATTVEDVAKAIRSFPLSSSGGFGGLRPRHLKDLTSFTCGEAANRLLKSIASLVDVVKYGSAQIDIAKIFFGASLTALLKGEDDIRPIAVGIVWRRLTGKIACFNIRANLVEKLKPVQLGFGVKGGAEALVHAVRAFCTAEHKGPLALVKFDFGNAFNMLFRKFMLGEVKDICPELLPLLQQAYRLFTNLYYLDEPLLSKRGFQQGDPLGPPGFCIGIMRMTHSLSSRLNGWYLDDGTIADKLSVILDDIRKVLDFCELSGLPLNTNKCEVYFINASEEEEAKMFAEISALLPGIRQVDESSLEILGSPVFESGLERMFASKVETIKLMCDRLKLMDVHPALCIFRKSLGSCRFNYLLRTSRAFMLRDHLRTVDEIFRSTLEAIANVRISDFSWDQASLPLVFGGLGIRKVEDLAVPAYLSSVYSSSDLSNELLKNFNIHIINDNILGLIEQVPRDFIPENDENKKVQKNWDTPMIRSKFCEMFESSEPITRARLLASSTKESSKWLQVVPSSKLGLLLDNNAARIAVGLRIGSQLCEEYKCICGKMVKKDGLHGLSCNMTGAITPRHDDVNGIFSHAFSSAGVPTILQPPGISRSDGKRVDGMTIIPWSHGKSLLWDVTIRDTLAPSYINESSKKSGSIAEKAERLKYNHYIDLKENYLFTPIAFESLGCMGLETKKFVYKLGSLMKAASGEPRSTDYLLQKISIAIQRGNAACILGTLGRSRVDDFYLL

SEQ ID NO: 376 - protein, 1077 aa, Bradysia odoriphaga
MGQASGGTPALSDFICLCLGNENDNENIENWIFCKGCINFFHRKCNFISDVEYNRIIGDGCDWYCNSSECQDLMKAIRDGCKAKRPVRERLRRKCKENFPDRFPESDCVLTKDESSFGRVICDSCGFIAKNSRGLSIHMRKHRIGFSSVDDASGSRNDSDGCRNAFSNVEGDSDVLNDFGWLLNRCRLTVPLTRIIQKSVRTVVCEELTREIEFLMKKDDLGSWMRVLAFPYVVLSSKSKGKDGVNVIRSNLSYFRSCTDINGALSEVLREKGVPFKVERSVDRNSVAIKTATRKVSEGDIRGAVRVLCSDEVVAPQNFETVTKLRAKHPDDDGGVFEETKLESSLPLTEVEDVIRAIRSFPMSSSGGIDGLRPRHLKDLISYTCGDAANRLLKAIAAFMDVIKGGKVQSEVAKVLFGASLTALLKGESDVRPIAVGVVWRRLAGKIACSNVREKLVEKLKPFQWGFGVEGGAEALVHAVRKFCMNDHAEPMVLVKFDFRNAFNMLFRKFMLGEVKDICPELLPLLQQAYRLPSNLYFTDEPLFSKRGYQQGDPLGPPGFCIGIMRMTHSLMSRLNGWYLDDGTIGDVLSAVLQDIKKVLSFCEISGLPLNASKCEVFFVNASAEDEASMYADISALLPGIKKVDESSLEILGSPIFELGLERMFSSKIESIRLMCDRLKLMDVHPALCIFRKSLSSCRFNYLLRSCKAFLLSDKLKAVDEIFRSTLEAITNTRVDGFSWDQASLPLSFGGMGIRKVEDLAVPAYLSSVYSSSDSSNELLRNFNLQIIDDNILHMIEAIPQDYIPDNDILRKEQKNWDLPRIKGKFSEMFDSSEPTARARLLASSTKESSKWLQVVPSSQLGLLLDNNSARIAVGLRLGSQLCEEHKCICGKTVTKDGLHGLSCNKSGGWISGHDEVNKIFSHAFSSAGLPNLVQPPGISRDDGKRPDGMTLIPWSHGKPILWDVTIRDTLAPSYISQSSKKSGSIADNAERFKHNHYIRLKENYLFTPIAFESLGCMGPETNTFIKKLGSLMRKASGEPRSMDYLLQKVSIAIQRRNASCILGTLGRSRIDDFYLL

SEQ ID NO: 377 - protein, 1066 aa, Bradysia coprophila
MGQTSSGQPQLSDCICLCLVDENDENIENWIFCAGCGKWYHRKCNLVNDDGANSLVNGNDWYCPVAKCQKVFSSLNKDVDVGRPVRGRLDRKCKGKVAVSALDFSSEEVVSDRVVCSACGFLAKNARGLKVHMARHKGVSDVVNPSVGVDGFSGSSGKVGSSECLEDFGVLLNRCRLSVPLTRIIQKSVRIVVCQELAAVVERLVKRNDVESWMRLLAFPYIVLNNRSKGKGGINVIRHNLGVFRNCVDVVKALTDVLNDASVPFVVSKVVDRDSVVVKVATRKVGEGDVKGAVRVLCSSESVAPQSIETVTKLKGKHPDDNGEVFEEVKLDSNLQATDVKDVLGAIRSFPLSSSGGIGGLRPRHLKDLVSFTCGDFGNRLLKAIASLTDVIKRGKVQQDVCKIFFGASLTALMKGEDDVRPIAVGIVWRRLAGKVACCNVRDSLVKKLKPVQFGFGVPGGAEALVHAVRRFCTVQHDKPMALVKFDFGNAFNMLFRKFMLGEVRDVCPELLALMQQSYRHFSNLYFLDETLLSRRGFQQGDPLGPPGFCIGIMKMTHSLDARLNGWYLDDGSIGDVLSVVLGDIRKILEFCDLSGLPLNAKKCEVFFVSASEGEAAHMYSEISSLLPGIKRVDESSLEMLGSPVFELGLERMFSAKVESIKLMCDRLTLMDVHPALCVFRKSLGSSRFNYLLRSSKAFLLGDRLRAVDEIFRSTLEAIANVKMSDFSWDQASLPLSFGGIGVRKVEDIAMPAYLSSVYSTLELSSEILRKFSFQVIETSVLELIEEIPRDFVPEGDEKKKKQKNWDLPMIKSKFDEMFDSSEPVARARLLASSTKESSKWLQVVPSSQLGLLLDNNSARIAVGLRLGSGLCEEHKCVCGGMVQKDGLHGLSCKMKIKKIAAHDEVNKVFSHAFSSAGFPTMLQPPGMSRDDGKRPDGMTLIPWSHGKSLIWDVTIRDTLAPSYINESSKKQRSIADNAERFKHNHYKRLKENYLFTPLAFETLGCMGPETKKFIEKLGKIIKATSGEPRSMDYLLQKISIAIQRGNAACILGTLGTDRVDDFYVL

SEQ ID NO: 378 - protein, 1077 aa, Bradysia odoriphaga
MGQASGGTPALSDFICLCLGNENDNENIENWIFCKGCINFFHRKCNFISDVEYNRIIGDGCDWYCNSSECQDLMKAIRDGCKAKRPVRERLRRKCKENFPDRFPESDCFLTKDESSFGRVICDSCGFIAKNSRGLSIHMRKHRIGFSSVDDASGSRNDSDGCRNAFSNVEGDSDVLNDFGWLLNRCRLTVPLTRIIQKSVRTVVCEELTREIEFLMKKDDLGSWMRVLAFPYVVLSSKSKGKDGVNVIRSNLSYFRSCTDINGALSEVLREKGVPFKVEKSVDRNSVAIKTATRKVSEGDIRGAVRVLCSDEVVAPQNFETVTKLRAKHPDDDGGVFEETKLESSLPLTEVEDVIRAIRSFPMSSSGGIGGLRPRHLKDLISYTCGDAANRLLKAIAAFMDVIKGGKVQSEVAKVLFGASLTALLKGESDVRPIAVGVVWRRLAGKIACSNVREKLVEKLKPFQWGFGVEGGAEALVHAVRKFCMNDHAEPMVLVKFDFRNAFNMLFRKFMLGEVKDICPELLPLLQQAYRLPSNLYFTDEPLFSKRGYQQGDPLGPPGFCIGIMRMTHSLMSRLNGWYLDDGTIGDVLSAVLQDIKKVLSFCEISGLPLNASKCEVFFVNASAEDEASMYADISALLPGIKKVDESSLEILGSPIFELGLERMFSSKIESIRLMCDRLKLMDVHPALCIFRKSLSSCRFNYLLRSCKAFLLSDKLKAVDEIFRSTLEAITNTRVDGFSWDQASLPLSFGGMGIRKVEDLAVPAYLSSVYSSSDSSNELLRNFNLQIIDDNILHMIEAIPQDYIPDNDILRKEQKNWDLPRIKGKFSEMFDSSEPTARARLLASSTKESSKWLQVVPSSQLGLLLDNNSARIAVGLRLGSQLCEEHKCICGKTVTKDGLHGLSCNKSGGWISGHDEVNKIFSHAFSSAGFPNLVQPPGISRDDGKRPDGMTLIPWSHGKPILWDVTIRDTLAPSYISQSSKKSGSIADNAERFKHNHYIRLKENYLFTPIAFESLGCMGPETNTFIKKLGSLMRKASGEPRSMDYLLQKVSIAIQRRNASCILGTLGRSRIDDFYLL

SEQ ID NO: 379 - protein, 1071 aa, Bradysia coprophila
MGQASDGSPRSSDFICFCLVANDEDDNVENWIICKGCENWYHKKCHSFGDGGCSDGEDWYCSAFKCQKVFSLLKDRNNDGGERNVRERLVRKCKGKKAVRSASESFGLGGEASFGRVTCSMCGFLAKNAHGLSIHERKHRRVDDVAPKSGGGFSGGSAVVEDVSEMLNDFGLLLNRCRVSVPLTRIIQKSVRIAVCQELCREIECLLSKNDVGSWMRLLAFPYVVLNSKSKGKGGINVIRSNLNVFRNCTDVNEALSNVLRDASVPFTVGKSSSDDSVAIKVATRKVGEGDIRGAVRVLCSADSVAPQTLETVSKLRDKHPDGDGEVFEEVGEADLRSSLTPTSVEDVVKAIRSFPLSSSGGIGGLRPRHLKDLTSFTCGDSANRLLRATASLIDVVKYGKVQRDITKVFFGASLTALMKGEDDVRPIAVGIVWRRLTGKVACFNVRDSLVEKLKPFQFGFGVKGGAEALVHAVRSFCTAEHEEPMALVKFDFGNAFNMLFRKFMLGEVRDVCPELLPLLQQAYSHFSNLYYLDEVLLSRRGYQQGDPMGPPGFCIGIMRMTHSLSSRLNGWYLDDGTIADKLSVILADIRRVLDFCVLSGLPLNTKKCEVFFVNASIEDEARMSADISALLPGIRRVDESFLEILGSPIFESGLERVFSSKVESLRIMCDRLKLMDVHPALCIFRKSLGSCRFSYLLRTCRTFSLRDRLKSVDEIFRSTLEAITNVRLSDFAWDQASLPLVFGGLGIRKVEDLAMPAYLSSVYSSSDLSNEILSKFNLRIIDDDISSIVDTIPNDFIPDNDEMRKVQRNWDLPVIRSSFSEMLDSSEPVTRARLLASSTKESSKWLQVVPSSQLGLLLDNNAARIAVGLRLGSQLCEEYKCNCGAVVKKDGLHGLSCKLKIGIIAKHDSVNNVFGHAFSSAGFPNILQPPGISRDDGKRPDGMTVVPWSHGKSLLWDVTIRDTLAPSYISESSKKAGSIADKAERFKHNHYIRLKENYLFTPLAFESLGCMGPETRKFIDKLGSLMKRASGEPRSKDYLLQKISIAIQRGNAACILGTLGSNRADDFYLL

SEQ ID NO: 380 - protein, 1066 aa, Bradysia coprophila
MGQTSSGQPQLSDCICLCLVDENDENIENWIFCAGCGKWYHRKCNLVNDDGANSLVNGNDWYCPVAKCQKVFSSLNKDVDVGRPVRGRLDRKCKGKVAVSALDFSSEEVVSDRVVCSACGFLAKNARGLKVHMARHKGVSDVVNPSVGVDGFSGSSGKVGSSECLEDFGVLLNRCRLSVPLTRIIQKSVRIAVCQELTAVVERLVKRNDVESWMRLLAFPYIVLNNRSKGKGGINVIRHNLGVFRNCVDVVKALTDVLNDASVPFVVSKVVDRDSVVVKVATRKVGEGDVKGAVRVLCSSESVAPQSIETVTKLKGKHPDDNGEVFEEVKLDSNLQATDVKDVLGAIRSFPLSSSGGIGGLRPRHLKDLVSFTCGDFGNRLLKAIASLTDVIKRGKVQQDVCKIFFGASLTALMKGEDDVRPIAVGIVWRRLAGKVACCNVRDSLVKKLKPVQFGFGVPGGAEALVHAVRRFCTVQHDKPMALVKFDFGNAFNMLFRKFMLGEVRDVCPELLALMQQSYRHFSNLYFLDETLLSRRGFQQGDPLGPPGFCIGIMKMTHSLDARLNGWYLDDGSIGDVLSVVLGDIRKILEFCDLSGLPLNAKKCEVFFVSASEGEAARMYSEISSLLPGIKRVDESSLEMLGSPVFELGLERMFSAKVESIKLMCDRLTLMDVHPALCVFRKSLGSSRFNYLLRSSKAFLLGDRLRAVDEIFRSTLEAIANVKVSDFSWDQASLPLSFGGIGVRKVEDIAMPAYLSSVYSTLELSSEILRKFSFQVIETSVLELIEEIPRDFVPEGDEKKKKQKNWDLPTIKSKFDEMFDSSEPVARARLLASSTKESSKWLQVVPSSQLGLLLDNNSARIAVGLRLGSGLCEEHKCVCGGMVQKDGLHGLSCKMKIKKIAAHDEVNKVFSHAFSSAGFPTMLQPPGMSRDDGKRPDGMTLIPWSHGKSLIWDVTIRDTLAPSYINESSKKQRSIADNAERFKHNHYKRLKENYLFTPLAFETLGCMGPETKKFIEKLGKIIKATSGEPRSMDYLLQRISIAIQRGNAACILGTLGTDRVDDFYVL

SEQ ID NO: 381 - protein, 1060 aa, Bradysia coprophila
MGQTSSGLPDISDCICLCLDNNKDENIENWISCKGCDNWFHRKCNLKIGDDSAVIDEDWYCSGIDCQKLFFSLKNSKKRPVRERLVRECKGKVRGSALGIPSVEASVSERVTCSVCGFLAKNTRGLNIHMSKHERNERVIDDVGISSNRSGEESISDMLDDFGVLLNRCRVSVPFTRIIQKSVRIAVCQELSKEIESLVRKNDVVSWMRLLAFPYIVLNSKSKGTGGINVIRSNLNVFRNCADINEALSNVLRSAGIPFTLDKSTDRDSVAIKVATRKVNEGDIRGAVRVLCSNDTVAPQTSETVSKLKAKHPDDNGEVFEEIELLSTLSATTVEDVAKAIRSFPLSSSGGFGGLRPRHLKDLTSFTCGEAANRLLKSIASLVDVVKYGSAQIDIAKIFFGASLTALLKGEDDIRPIAVGIVWRRLTGKIACYNVRANLVEKLKPVQLGFGVKGGAEALVHAVRAFCTAEHKGPLALVKFDFGNAFNMLFRKFMLGEVKDICPELLPLLQQAYRLFTNLYYLDEPLLSKRGFQQGDPLGPPGFCIGIMRMTHSLSSRLNGWYLDDGTIADKLSVILDDIRKVLVFCELSGLPNNANKCEVYFINASEEEEAKMFAEISALLPGIRQVDESSLEILGSPIFESGLERMFASKVETIKLMCDRLKLMDVHPALCIFRKSLGSCRFNYLLRTSRAFMLRDHLRTVDEIFRSTLEAIANVRISDFSWDQASLPLVFGGLGIRKVEDLAVPAYLSSVYSSSDLSNELLKNFNIHIINDNILGLIEQVPRDFIPENDENKKVQKNWDTPMIRSKFCEMFESSEPITRARLLASSTKESSKWLQVVPSSKLGLLLDNNAARIAVGLRIGSQLCEEYKCICGKMVKKDGLHGLSCNMTGAITPRHDDVNGIFSHAFSSAGVPTILQPPGISRSDGKRVDGMTIIPWSHGKSLLWDVTIRDTLAPSYINESSKKSGSIAEKAERLKHNHYIDLKENYLFTPIAFESLGCMGPETKKFVYKLGSLMKAASGEPRSTDYLLQKISIAIQRGNAACILGTLGRSRVDDFYLL

SEQ ID NO: 382 - protein, 1064 aa, Bradysia coprophila
MGQTSSGLPGISDCICLCLDNNKDENIENWISCKGCDNWFHRKCNLKIGDDSAVIDEDWYCSGIDCQKLFFSLKNSKKRPVRERLVRECKGKVRGSALGIPSVEASVSERVTCSVCGFLAKNTRGLNIHMSKHERNERVIGDVSKDEGISSNRSGEESISDMLDDFGVLLNRCRVSVPLTRIIQKSVRIAVCQELSKEIESLVRKNDVVSWMRLLAFPYIVLNNKSKGTCGINIIRSNLNVFRNCTDINEALSNVLRSAGIPFTLDKSTDRDSVAIKVATRKVNEGDIRGAVRVLCSNSTVAPQTSETVSKLKAKHPDDNGEVFEEIELLSTLSATTVEDVAKAIRSFPLSSSGGFGGLRPRHLKDLTSFTCGEAANRLLKSIASLVDVVKYGSAQIDIAKKFFGASLTALLKGEDDIRPIAVGIVWRRLTGKIACYNIRANLVEKLKPVQLGFGVKGGAEALVHAVRAFCTAEHKGPLALVKFDFGNAFNMLFRKFMLGEVKDICPELLPLLQQAYRLFTNLYYLDEPLLSKRGFQQGDPLGPPGFCIGIMRMTHSLSSRLNGWYLDDGTIADKLSVILDDIRKVLVFCELSGLPLNTNKCEVYFINASEEEEAKMFAEISALLPGIRQVDESSLEILGSPIFESGLERMFASKVEMIKLMCDRLKLMDVHPALCIFRKSLGSCRFNYLLRTSRAFMLRDHLRTVDEIFRSTLEAIANVRISDFSWDQASLPLVFGGLGIRKVEDLVVPAYLSSVYSSSDLSNELLKNFNIHIINDNILGLIEQVPRDFIPENDENKKVQKNWDTPMIRSKFCEMFESSEPITRARLLASSTKESSKWLQVVPSSKLGLLLDNNAARIAVGLRIGSQLCEEYKCICGKMVKKDGLHGLSCNMTGAITPRHDDVNGIFSHAFSSAGVPTILQPPGISRSDGKRVDGMTIIPWSHGKSLLWYVTIRDTLAPSYINESSKKSGSIAEKAERLKHNHYIDLKENYLFTPIAFESLGCMGPETKKFVYKLGSLMKAASGEPRSTDYLLQKISIAIQRGNAACILGILGRSRVDDFYLL

SEQ ID NO: 383 - protein, 1064 aa, Bradysia coprophila
MGQTSSGLPDISDCICLCLDNNKDENIENWISCKGCDNWFHRKCNLKIGDDSAVIDEDWYCSGIDCQKLFFSLKNSKKRPVRERLGRECKGKVRGSALGIPSVEASVSERVTCSVCGFLAKNTRGLNIHMSKHERNERVIDDVSKDEGISSNRSGEESISDMLDDFGVLLNRCRVSVPLTRIIQKSVRIAVCQELSKEIESLVRKNDVVSWMRLLAFPYIVLNNKSKGTGGINVIRSNLNVFRNCTDINEALSNVLRSAGIPFTLDKSTDRDSVAIKVATRKVNEGDIRGAVRVLCSNNTVAPQTSETVSKLKAKHPDGNGEVFEEIELLSTLSATTVEDVAKAIRSFPLSSSGGFGGLRPRHLKDLTSFTCGEAANRLLKSIASLVDVVKYGSAQIDIAKIFFGASLTALLKGEDDIRPIAVGIVWRRLTGKIACFNIRANLVEKLKPVQLGFGVKGGAEALVHAVRAFCTAEHKGPLALVKFDFGNAFNMLFRKFMLGEVKDICPELLPLLQQAYRLFTNLYYLDEPLLSKRGFQQGDPLGPPGFCIGIMRMTHSLSSRLNGWYLDDGTIADKLSVILDDIRKVLDFCELSGLPLNTNKCEVYFINASEEEEAKMFAEISALLPGIRQVDESSLEILGSPVFESGLERMFASKVETIKLMCDRLKLMDVHPALCIFRKSLGSCRFNYLLRTSRAFMLRDHLRTVDEIFRSTLEAIANVRISDFSWDQASLPLVFGGLGIRKVEDLAVPAYLSSVYSSSDLSNELLKNFNIHIINDNILGLIEQVPRDFIPENDENKKVQKNWDTPMIRSKFCEMFESSEPITRARLLASSTKESSKWLQVVPSSKLGLLLDNNAARIAVGLRIGSQLCEEYKCICGKMVKKDGLHGLSCNMTGAITPRHDDVNGIFSHAFSSAGVPTILQPPGISRSDGKRVDGMTIIPWSHGKSLLWDVTIRDTLAPSYINESSKKSGSIAEKAERLKHNHYIDLKENYLFTPIAFESLGCMGPETKKFVYKLGSLMKAASGEPRSTDYLLQKISIAIQRGNAACILGTLGRSRVDDFYLL

SEQ ID NO: 384 - protein, 1064 aa, Bradysia odoriphaga
MGQTSNGFAIIEDCICLCLVDNKKDDNHENWVCCKGCEKWYHKKCNLINNCDVLFDDDDWYCSNVECQKVSGPGVVPCRVRPVRERLNRKCKDKEVVSASVVESVGFSLSDRVSCEVCGFLAKNARGLSIHMGKHKRVEVDDMSGSKGKGSVTPVAVDVPGLVESFGSLLNRCRVSVPLTRIIQKSVRTAVCQELCLVLENLLQKNDVDSWMKLLAFPYIVLCNKSKGKDGVNVIRSNLKLFRDCRDVNVALSEVLSNASVPFRVNKSPDKDSVAVKVATRKVSEGDIKGAIRVLCSRDSVAPQNLDTVSKLRAKHPDDNGEVFEEVELRSSLEATTVEDIVKAIRSFPLSSSGGIGGLRPRHLKDLTSFTCGESANRLLRAVASLVDLIKFGNVHKDVAKVFFGASLTALMKGEDDVRPIAVGVVWRRLAGKVACYNVRNNLVRKLKPFQLGFGVKGGAEALVHAVRSFCTAKHDKPMALVKFDFGNAFNNMFRKFMLGEVEDICPELLPLLQQCYRLFSNLYYLDETLLSKRGFQQGDPLGPPGFCIGIMRMTHSLLSRLNGWYLDDGSVGDVLSVVLEDIRKVLDFCALSGLPLNANKCEVFFVNASEGDKANMYAEISALLPGIKVVDESSLEILGSPIFESGLERMFSSKIEEIKVMCERLKLMDVHPALCVFRKSLGSCRFNYLLRTSKAFSLNAYLKEVDEVFRSTLEAITNVRLLDFSWDQATLPLAQGGLGIRKVEELALPAYLSSVYSTSSLSDEILSRFNIKVIDDSVLGLVSSIPSEFVPDSDDERKVQRNWDLPLVNSKFSEMFESSESVDRARLLASSTKESSKWLQVVPSSQLGLLLDSNAARIAVGLRLGSQLCEEYRCVCGELVKKDGLHGLSCKLKTGITPRHDSVNREFSYAFSAADVPTLLQPPGISRDDGKRPDGMTLIPWSHGKSLLWDVTVRDTLAPSYIGETSKKARSIAEKAERLKHNHYRKLKENYLFTPLAFESLGCMGPETKKFVTKLGSLMKKASGEKRSTDYLLQRISIAIQRGNAACILGTLGRNRVDDFYLL

SEQ ID NO: 385 - protein, 1066 aa, Bradysia coprophila
MGQTSSGQPQLSDCICLCLVDENDENIENWIFCAGCGKWYHRKCNLVNDDGANSLVNGNDWYCPVAKCQKVFSSLNKDVDVGRPVRGRLDRKCKGKVAVSALDFSSEEVVSDRVVCSACGFLAKNARGLKVHMARHKGVSDVVNPSVGVDGFSGSSGKVGSSECLEDFGVLLNRCRLSVPLTRIIQKSVRIAVCQELTAVVERLVKRNDVESWMRLLAFPYIVLNNRSKGKGGINVIRHNLGVFRNCVDVVKALTDVLNDASVPFVVSKVVDRDSVVVKVATRKVGEGDVKGAVRVLCSSESVAPQSIETVTKLKGKHPDDNGEVFEEVKLDSNLQATDVKDVLGAIRSFPLSSSGGIGGLRPRHLKDLVSFTCGDFGNRLLKAIASLTDVIKRGKVQQDVCKIFFGASLTALMKGEDDVRPIAVGIVWRRLAGKVACCNVRDSLVKKLKPVQFGFGVPGGAEALVHAVRRFCTVQHDKPMALVKFDFGNAFNMLFRKFMLGEVRDVCPELLALMQQSYRHFSNLYFLDETLLSRRGFQQGDPLGPPGFCIGIMKMTHSLDARLNGWYLDDGSIGDVLSVVLGDIRKILEFCDLSGLPLNAKKCEVFFVSASEGEAARMYSEISSLLPGIKRVDESSLEMLGSPVFELGLERMFSAKVESIKLMCDRLTLMDVHPALCVFRKSLGSSRFNYLLRSSKAFLLGDRLRAVDEIFRSTLEAIANVKMSDFSWDQASLPLSFGGIGVRKVEDIAMPAYLSSVYSTLELSSEILRKFSFQVIETSVLELIEEIPRDFVPEGDEKKKKQKNWDLPTIKSKFDEMFDSSEPVARARLLASSTKESSKWLQVVPSSQLGLLLDNNSARIAVGLRLGSGLCEEHKCVCGGMVQKDGLHGLSCKMKIKKIAAHDEVNKVFSHAFSSAGFPTMLQPPGMSRDDGKRPDGMTLIPWSHGKSLIWDVTIRDTLAPSYINESSKKQRSIADNAERFKHNHYKRLKENYLFTPLAFETLGCMGPETKKFIEKLGKIIKATSGEPRSMDYLLQRISIAIQRGNAACILGTLGTDRVDDFYVL

SEQ ID NO: 386 - protein, 1063 aa, Bradysia coprophila
MSQSSDGLSHLSDFVCLCLVNNNDDENIEDWISCVGCKNWYHRKCYLISDEEYNTIIGGCEGWHCPSSKCQKVFSSFKNKNGSVSKRPVRERLVRECKVKSVGSSSGLLPLSGDHEFGRVTCSACGFLAKNAHGLSIHMRKHKRLGTIDVACNNADIGSGEASVEEDIPEILSAFGLLLNQCRVSVPLTRVIQKSVRIAVCQELSGTIEDLVQKNDVCSWMRLLAFPYIVLCNKSKGKGGINVIRSNLDVFRKCSDINGALSDVLNREGIPFKLDKSVSKDDVAIKVATRKVSEGDIKGAVRVLCSKESVAPQTTETASKLKAKHPDDNGEVFDEVELVGITLPATGIEDIVRAIRSFPLSSSGGIGGLRPRHLKDLISFTCGESANRLLRAIASLVDIVKYGKVQHDVCRIFFGASLTALMKGEDDVRPIAVGIVWRRLTGKIACYNVRDNLVQKLKPFQLGFGVRQFCTADHGEPIALVKFDFGNAFNNMFRKFMLGEVKDICPELLPLLQQSYRLISNLYFLDEPLFSKRGFQQGDPLGPPGFCIGIMRMTHSLSSRLNGWYLDDGCVGDVLSVVLSDIRKVLAFCELSGLPLNTNKCEVFFINASGDDETRMYAEISALLPGIKKVDESTLEILGSPIFESGLERMFSSKIEAIKLMCDRLKLMDVHPALCVFRKSLGSCRFNYLLRSSKAFLLVDRLKEVDEIFRSTLEAITNVKMGDFQWSQASLPLSFGGLGIRKVEDLASPAYLSSVYSSSELSNQLLEKFDFKIIDDAILGLIEVIPRDFVPQSDENKKVQKNWDIMRIMDKFGCMLESSEPVTRARLLASSTKESSKWLQVVPSSQLGLLLDNNTARISVGLRLGSQLCEEHKCLCSKMVKKDGLHGLSCKKSGGWIPGHDEINKIFSHAFSSAGFPNIIQPPGISRDDGKRPDGVTLIPWSHGRPILWDVTVRDTLAPSYVNESSKKAGAIADNAERHKHNHYQLLKENYFFTPIAFESLGSMGPETRIFIKKLGSLMRRASGESRSMDYLLQKVSIAIQRRNASCILGTLGTNRIDDFYLL

SEQ ID NO: 387 - protein, 1071 aa, Bradysia odoriphaga
MGQASGGMSDNLDHICFCPVKENDKNAQNIDTKNWTLCKGCNKCFHQLCTLMREEGNDKGSWYCLDCECQKMSGLCLTEDGNGKSGRRRFGRKCKERPKDSSGVCLEEGGVDRVSCDVCGFLAKNSRGLSIHMRVHKRVSVEELVCSVESESGCADSSVNPDISTVLQEFGLLLNQCRLSVPLTRIIQKSVRTVVCQELTKVIQDLVVNNDVHSWMKLIAFPFIVLSSKSKGSDGVNVIRSNLKVFKNCVNVNNTLNNILETKGNPFRIKESVDKDSVVIKAATRKVSEGDISGAIRVLCSNESVAPQTIETAAKLQAKHPEDTGGIFEEMEVGVDLGLTTVDEVVKAIRSFPLSSSGGVGGLRPKHLKDLTSYTCGDSGSNLLKAISSLMDMIRSGKVEKDVAKIFFGASLTALNKGETDVRPIAVGLVWRRMAGKISNFKVKESLVEKLKPFQFGFGVKGGAEALIHSVRKFCQAKHDRPMALVKFDFENAFNMMFRKFMLGEVRDVCPELFPLLQQAYRLMSNLYFVGDPLLSQRGFQQGDPLGPPGFCIGIMRMTHSLLSRFNGWYLDDGTIGDELSVVLDDDDIQKVLSFYDVSGLRLNAKKCEVFFINATHDEEAHMYAKISALLPGIKKVDESTLELLGSPIFEAGLERMFSSKVESIKLMCDRLKLMDVHPALCVFRKSLSSCRFSYFMRASRTYLLPDKLRSVDEVFRSTLESITNNRVEGLSWDQASLPLSFGGMGIRKVEDLAIPAYLSSVFSSSDLCDMILQKFDLRIIDEQIMQLINEIPREFVPENDTLKKEQKNWDIPKIKNQFNELFENGDLKTRARLLASSTKESSKWLQVIPSSQLGFLLDNNSARIAVGLRLGSQICEEHKCLCGKTVEKDGLHGLSCVKCAEGKFARHDNMNTIFSHAFSSAGVPNIVQPPGISRDDGKRPDGVTLIPWSHGRSLLWDVTVRDTMAASYINDSSKKARSIAEKAERHKHNHYISLKQNYLLTPLAFETLGCMGPETKKFIDKLGALMKKATGEVKSKEYLLQRISIAIQRGNAACILGTLGKKKIDDIYLL

SEQ ID NO: 388 - protein, 1232 aa, Montipora efflorescens
MAETSQAQTSMRRGRRLKWTEAMNIKLLECKRKAIELVQSNVPPRNSTGRMKGYMSVMKELWDESEFANDLNLSSQNLRDQAARIEKSFGNVRATIREEVKADNGESLFDAVYLERNEGQDLEQEELYEINNNSVQEENLHTQVNHQTAVNNNTPSQISTEVNTIVQMARPIFASVSASPGDFSNRLIDTRTKKIPTRGDIVNISSAVEELMKLNNKINTIDLAQDPFVYLWLINCVLYAVVAAFLIVKGWTRKYTSQTGKGKVEDKQKKMYERQAGEIRKNISIATAEIERIKSNRKITTKGRRNQAKLLESCKVISVAALVSYMEREKSKLRKLKKSFVRRKKLYEARQVNRKFQQDPGSVYSCFGKMLEKQQENEKPRYDRTLLQGQQDERRKFEDIEEASEFWKALWEGTGSENAGMEWIGEVREAMREVVPEIPTTEFKLTGDKVGQTIRKKKNWSAPGPDLLANFWWKKVDVLHQDVARSFEATAVCERDFPLWFSGGKTSLLPKPGEFTKDNQRPITCLNTLYKWYTSCLLVDASHHLLSYGLMQGDQRGAKQDCSGTVDNLLIDRMVCQDAQRGHRNLSMAWIDVSKAYDSVDHRWLVEMFKLHRFPKWFGCLIGKLSRSWNTRIVTETKQGCESSEIIHFKKGLPQGDSLCPTLFTLCLNPIAWKLRATSGYKLSKPIVCKVTHLLYIDDLKIYASSENNLERVMRTVKGGMDCIGLRWNEKKCAVVHVKRGCVKQTENMEIDELKSIKSLGEESTYKFLGVLENSKQEDKLVLENASKEYLRRLAIIWSSPLSDHSRVVATNQYALPVLSYLMWTQTWPLAQLQQVDREARKIIVQFGGKHPQGSTAILYMSRKCGGRGLRSVETTYKDIKIKAAMKLYYNPDPSMEAVRLFEEKSVRGGRHSAIKDARRYAEELGLHLKLEYPEPMCVTDDGKEVNGKKVKGCIAKVRQEEVRAKVKEEKWQGKMICNRWEDVHLEQGDCFAWLSCWKAAPTHVVVGIQELYEQLLPTKVFYHRKVGTSGSGEEKCRMCGKATESVPHILAGCGALAQTLYLARHNNALKILFFQVIRALDLVTSEVPWFSKIQPKPMYENERAIAYWDIPLYADNTHVKANRIDATIVDKENKKVSVIEMSCPWIENREEKDAEKTTKYGPLRWELEQRYPEYRVSQFNIIVDVLGGYSRDVRKALKELVGDKSDTIALQIQKSVITSSLNIARRFKLLK

SEQ ID NO: 389 - protein, 1270 aa, Montipora cactus
MIKCLASVSSRKLVRLVTLETTKSVFSNSFLLNKLPNVMAETSQAQTSTRRGRRLKWTEAMNMKLLECKRKAIELVQSNVPPRNSTGRMKGYMAVMKELWDESEFANDLNLSSQNLRDQAARIEKSFGNVRATIREEVKADNGESLFDAVYLERNEGQDLEQEELYEINNNSVQEENLHTQVNHQTAVNNNTPSQISTEVNTIVQMARPIFASVSASPGDFSNRLIDTRTKKIPTRGDIVNISSAVEELMKLNNNINTIDLAQDPFVYLWLINCVLYAVVAAFLIVKGWTRKYTSQTGKGKVEDKQKKMYERQAGEIRKNISIAKAEIERIKSNRKITTKGRRNQAKLLESCKVISVAALVSYMEREKSKLRKLKKSFVRRKKLYEARQVNRKFQQDPGSVYSCFGKMLEKQQENEKPRYDRTLLQGQQDERRKFEDIEEASEFWKALWEGTRKGNAGMEWIEDVTEARREVVPEIPTTEFKLTGDKVGQTIRKKKNWSAPGPDLLANFWWKKVDVLHQDVARSFEATAVCERDFPLWFSGGKTSLLPKPGEFTKDNQRPITCLNTLYKWYTSCLLVDASHHLLSYGLMQGDQRGAKQDCSGTVDNLLIDRMVCQDAQRGHRNLSMAWIDVSKAYDSVDHRWLVEMFKLHRFPEWFGFLIGKLSRSWNTRIVTETKQGCESSEIIHFKKGLPQGDSLCPTLFTLCLNPIAWKLRATSGYKLSKPIVCKVTHLLYIDDLKIYASSENNLERVMRTVKGGMDCIGLRWNEKKCAVVHVKRGCVKQTENMEIDELKSIKSLGEESTYKFLGVLENSKQEDKLVLENASKEYLRRLAIIWSSPLSDHSRVVATNQYALPVLSYLMWTQTWPLAQLQQVDREARKIIVQFGGKHPQGSTAILYMSRKCGGRGLRSVETTYKDIKIKAAMKLYYNPDPSMEAVRLFEEKSVRGGRHSAIKDARRYAEELGLHLKLEYPEPMCVTDDGKEVNGKKVKGCIAKVRQEEVRAKVKEEKWQGKMICNRWEDVHLEQGDCFAWLSCWKAAPTQVVVGIQELYEQLLPTKVFYHRKVGTSGSGEEKCRMCGKATESVPHILAGCGALAQTLYLARHNNALKILFFQVIRALDLVTSEVPWFSKIQPKPMYENERAIAYWDIPLYADNTHVKANRIDATIVDKENKKVSVIEMSCPWIENREEKDAEKTTKYGPLRWELEQRYPEYRVSQFNIIVDVLGGYSRDVRKALKELVGDKSDTIALQIQKSVITSSLNIARRFKLLK

SEQ ID NO: 390 - protein, 1002 aa, Montipora efflorescens
MKLNNKINTIDLAQDPFVYLWLINCVLYAVVAAFLIVKGWTRKYTSQTGKGKVEDKQKKMYERQAGEIRKNISIAKAEIERIKSNRKITTKGRRNQAKLLESCKVISVAALVSYMEREKSKLRKLKKSFVRRKKLYEARQVNRKFQQDPGSVYSCFGKMLEKQQENEKPRYDRTLLQGQQDERRKFEDIEEASEFWKALWEGTGSENAGMEWIGEVREAMREVVPEIPTTEFKLTGDKVGQTIRKKKNWSAPGPDLLANFWWKKVDVLHQDVARSFEATAVCERDFPLWFSGGKTSLLPKPGEFTKDNQRPITCLNTLYKWYTSCLLVDASHHLLSYGLMQGDQRGAKQDCSGTVDNLLIDRMVCQDAQRGHRNLSMAWIDVSKAYDSVDHRWLVEMFKLHRFPEWFGFLIGKLSRSWNTRIVTETKQGCESSEIIHFKKGLPQGDSLCPTLFTLCLNPIAWKLRATSGYKLSKPIVCKVTHLLYIDDLKIYASSENNLERVMRTVKGGMDCIGLRWNEKKCAVVHVKRGCVKQTENMEIDELKSIKSLGEESTYKFLGVLENSKQEDKLVLENASKEYLRRLAIIWSSPLSDHSRVVATNQYALPVLSYLMWTQTWPLAQLQQVDREARKIIVEFGGKHPQGSTAILYMSRKCGGRGLRSVETTYKDIKIKAAMKLYYNPDPSMEAVRLFEEKSVRGGRHSAIKDARRYAEELGLHLKLEYPEPMCVTDDGKEVNGKKVKGCIAKARQEEVRAKVKEEKWQEKMICNRWEDVHLEQGDCFAWLSCWKAAPTHVVVGIQELYQQLLPTKVLYHRKVGTSGSGEERCRMCGKATESVPHILAGCGALAQTLYLARHNNALKILLFQVIRALDLVTSEVPWFSKIQPKPMYENERAIAYWDIPLYADNTHVQANRIDATIVDKENKKVSVIEMSCPWIENREEKDAEKTTKYGPLRWLMMMMMMMMMMMMMMMMMMMMMMIIIIIVAPMLEFRALYSYVNREMR

SEQ ID NO: 391 - protein, 962 aa, Montipora cactus
MYERQAGEIRKNISIAKAEIERTKSNRKITTKGRRNQAKLLESCKVISVAALVSYMEREKSKLRKLKKSFVRRKKLYEARQVNRKFQQDPGSVYSCFGKMLEKQQENEKPRYDRTLLQGQQDERRKFEDIEEASEFWKALWEGTGNENAGMEWIGEVREAMREVVPEIPTTEFKLTGDKVGQTIRKKKNWSAPGPDLLANFWWKKVDVLHQDVARSFEATAVCERDFPLWFSGGKTSLLPKPGEFTKDNQRPITCLNTLYKWYTSCLLVDASHHLLSYGLMQGDQRGAKQDCSGTVDNLLIDRMVCQDAQRGHRNLSMAWIDVSKAYDSVDHRWLVEMFKLHRFPEWFGFLIGKLSRSWNTRIVTETKQGCESSEIIHFKKGLPQGDSLCPTLFTLCLNPIAWKLRATSGYKLSKPIVCKVTHLLYIDDLKIYASSENNLERVMRTVKGGMDCIGLRWNEKKCAVVHVKRGCVKQTENMEIDELKSIKSLGEESTYKFLGVLENSKQEDKLVLENASKEYLRRLAIIWSSPLSDHSRVVATNQYALPVLSYLMWTQTWPLAQLQQVDREARKIIVQFGGKHPQGSTAILYMSRKCGGRGLRSVETTYKDIKIKAAMKLYYNPDPSMEAVRLFEEKSVRGGRHSAIKDARRYAEELGLHLKLEYPEPMCVTDDGKEVNGKKVKGCIAKVRQEEVRAKVKEEKWQGKMICNRWEDVHLEQGDCFAWLSCWKAAPTQVVVGIQELYEQLLPTKVFYHRKVGTSGSGEEKCRMCGKATESVPHILAGCGALAQTLYLARHNNALKILFFQVIRALDLVTSEVPWFSKIQPKPMYENERAIAYWDIPLYADNTHVKANRIDATIVDKENKKVSVIEMSCPWIENREEKDAEKTTKYGPLRWELEQRYPEYRVSQFNIIVDVLGGYSRDVRKALKELVGDKSDTIALQIQKSVITSSLNIARRFKLLK

SEQ ID NO: 392 - protein, 902 aa, Acropora yongei
MRGRLEKFERIYISIAKAEIERIRSNRKITTKGRRNQAKLLQSCKVISVAALVSYMEKEKSKLRKLKKSFVRRKKLYEAREVNRKFQQDPGSVYSCFGKMLEKQQENEKPRYDQTLLQGQQDGSRKFENIEEASEFWKALWEGTGNGNAGMEWIEDVRDAMKEVVPEIPTTEFKLTGDKVGQTIRKKKNWSAPGPDLLANFWWKKVDVLHQDVARSFEATAVCKKDFPLWFSGGKTSLLPKPGEFTKDNQRPITCLNTLYKWYTSCLLVDASHHLLSYGLMQGDQRGAKQGCSGTVDNLLIDRTVCQDAQRGHRNLSMAWIDVSKAYDSVDHRWLVEMFKLHRFPEWFGFLIGKLSRSWNTRIVTETKQGCESSEVIHFKKGLPQGDSLCPTLFTLCLNPIAWKLRATSGYKLSKPIACKVTHLLYIDDLKMYASSENNLERVMRTVKGGMDCIGLRWNEEKCAVAHVRRGCVNQTENMEIDELKSIKSLGEESTNKFLGVLENSKQEDKLVLENASKEYLRRLAIIWSSPLSDHSRVVATNQYALPVLSYLMWTQTWPLAQLQQVDREARKIIVEFGGKHPQGSTAILYMSRKCGGRGLRSVETTYKDIKIKAAMKLYYNPDPSMEAVRLFEEKSVRGARHSVIKDARRYAEELGLHLRLEYPEPTCVTDDGKEVNGKKVKGCIAKARQEEVRAKVKEEKWQGKMICNRWEDVHLEQGDCFAWLSCWKAAPTHVVFGIQELYQQLLPPKVFYHRKVGTSGSGEERCQMCGKAAESVPHILSGCGALAQTLYLARHNNALEILFFQVIRALDLLTSEVPWFSKIQPKPMYENERAMAYWDIPLYADNTHLKANRIDATIVDKENKKVSVIEMSCPWVENREEKDAEKTTKYGSSSRDILNIV

SEQ ID NO: 393 - protein, 973 aa, Montipora capitata
MYERQAGEIRKMYERQAGEIRKNISIAKAEIQRIKSNRKITTKGRRNQAKLLESCKVISVAALVSYMEREKSKLRKLKKSFVRRKKLYEARQVNRKFQQDPRSVYSCFGKMLEKQQENEKPRYDRTLLQGQQDERRKFEDIEEASEFWKALWEGTGSGNAGMEWIGEVREAMREVVPEIPTTELKLTGDKVGQTIRKKKNWSAPGPDLLANFWWKKVDVLHQDVARSFEATAVCERDFPLWFSGGKTSLLPKPGEFTKDNQRPITCLNTLYKWYTSCLLVDASHHLLSYGLMQGDQRGAKQDCLGTVDNLLIDRMVCQDAQRGHRNLSMAWIDVSKAYDSVDHRWLVEMFKLHRFPEWFGFLIGKLSRSWNTRIVTETKQGCESSEIIHFKKGLPQGDSLCPTLFTLCLNPIAWKLRATSGYKLSKPIVCKVTHLLYIDDLKIYASSENNLERVMRTVKGGMDCIGLRWNEKKCAVVHVKRGCVKQTENMEIDELKSIKSLGEESTYKFLGVLENSKQEDKLVLENASKEYLRRLAIIWSSPLSDHSRVVATNQYALPVLSYLMWTQTWPLAQLQQVDREAKKIIVEFGGKHPQGSTAILYMSRKCGGRGLRSVETTYKDIKIKAAMKLYYNPDPSMEAVRLFEEKSVRGGRHSAIKDARRYAEELGLHLKLEYPEPMCVTDDGKEVNGKKVKGCIAKARQEEVRAKVKEEKWQGKMICNRWEDVHLEQGDCFAWLSCWKAAPTHVVVGIQELYEQLLPTKVFYHRKVGTSGSGEERCQMCGKATESVPHILAGCGALAHTLYLARHNNALKILFFQVIRALDLVISEVPWFSKIQPKPMYENERAIAYWDIPLYADNTHVKANRIDATIVDKENKKVSVIEMSCPWIENREEKDAEKTTKYGPLRWELEQRYPEYRVTQFNIIVDVLGGYSRDVRKALKELVGDKSDTIALQIQKSVITSSLHSARRFKLLK

SEQ ID NO: 394 - protein, 1232 aa, Montipora cactus
MAETSQAQTSTRRGRRLKWTEAMNIKFLKCKRKAIELVQSNVPPRNSTGRMKGYMAVMKELWDESEFANDLNLSSQNLRDQAARTEKSFGNVRATIREEVNADNGESLFDAVYLERNEGQDLEQEELYEINNNSVQEENLHTQVNHQTAVNNNTPSQISTEVNTIVQMARPIFASVSASPGDFSNRPIDTRTKKIPTRGDIVNISSAVEELMKLNNKINTIDLAQDPFVYLWLINCVLYAVLAAFLIVKGWTRKYTSQTGKGKVEDKQKEMYERQAGEIRKNISIAKAEIERIKSNRKTATKGRRNQAKLLESCKVISVAALVSYMEREKSKLRKLKKSFVRRKKLYEARQVNRRFQQDPGSVYSCFGKMLEKKQENEKPRYDRTLLQAQQDERRKFEDIEQASEFWKALWEGTGSGNAGMEWIGEVREAMREVVPEIPTTEFKLTGDKVGQTIRKKKNWTAPGPDLLANFWWKKVDVLHQDVARSFEATAVCERDFPLWFSGGKTSLLPKPGKFTKDNQRPITCLNTLYKWYTSCFLVDASHHLLSYGLMQGDQRGAKQDCSGTVDNLLIDRMVCQDAQRGHRNLSMAWIDVCKAYDSVDHRWLVEMFKLHRFPEWFGFLIGKLSRSWNTRIVTETKQGCESSEIIRFKKGLPQGDSLCPTLFTMCLNPIAWKLRATSGYKLSKPIDCKVTHLLYIDDLKIYASSENNLERVMRTVKGGMDCIGLRWNEKKCAVVHVKRGCVKQTENMEIDELKSIKSLGEESTYKFLGVLENSKQEDKLVLENASKEYLRRLAIVWSSPLSDHSRVVATNQYALPVLSYLMWTQTWPLAQLQQVDREARKIIVQFGGKHPQGSTAILYMSRKCGGRGLRSVETTYKDIKIKAAMKLYYNPDPSMEAVRLFEEKSVRGGRHSAIKDAGRYAEELGLHLKLEYPEPMCVTDDGKEVNGKKVKGCIAKACQEEVRAKVKEEKWQGKMICNRWEDVHLEQGDCFAWLSCWKAAPRHVVGDIQELYQQLLPTKVFYHRKVGTSGSGEERCRMCGKATESVPHILAGCEALAQTLHLARHNNALKISFFQVIRALDLVTSEVPWFSKIQPKPMYENEREIAYWDIPLYADNTHVKANRIDATIVDKENKKVSVIEMSCPWIENREEKDAEKTTKYGPLRWELEQRYPDYRVTQFNIIVDVLGGYSRDVRKALKELVGDKSDTIALQIQKSVITSSLNIARHFKLLK

SEQ ID NO: 395 - protein, 875 aa, Montipora cactus
MYERQAGEIRKNISIAKAEIERIKSNRKITTKGRRNQAKLLESCKVISVAALVSYMEREKSKLRKLKKSFVRRKKLYEARQVNRKFQQDPGSVYSCFGKMLEKQQENEKPRYDRTLLQGQQDERRKFEDIEEASEFWKALWEGTGNENAGMEWIGEVREAMREVVPEIPTTEFKLTGDKVGQTIRKKKNWSAPGPDLLANFWWKKVDVLHQDVARSFEATAVCERDFPLWFSGGKTSLLPKPGEFTKDNQRPITCLNTLYKWYTSCLLVDASHHLLSYGLMQGDQRGAKQDCSGTVDNLLIDRMVCQDAQRGHRNLSMAWIDVSKAYDSVDHRWLVEMFKLHRFPEWFGFLIGKLSRSWNTRIVTETKQGCESSEIIHFKKGLPQGDSLCPTLFTLCLNPIAWKLRATSGYKLSKPIVCKITHLLYIDDLKIYASSENNLERVMRTVKGGMDCIGLRWNEKKCAVVHVKRGCVKQTDNMEIDELKSIKSLGEESTYKFLGVLENSKQEDKLVLENASKEYLRRLAIIWSSPLSDHSRVVATNQYALPVLSYLMWTQTWPLAQLQQVDRDARKIIVQFGGKHPQGSTAILYMSRKCGGRGLRSVETTYKDIKIKAAMKLYHNPDPSMEAVRLFEEKAVRGGRHSAIKDARRYAEELGLHLKLEYPEPMCVTDDGKEVNGKKVKGCIAKVRQEEVRAKVKEEKWQGKMICNRWEDVHLEQGDCFAWLSCWKAAPTQVVVGIQELYEQLLPTKVFYHRKVGTSGSGEEKCRMCGKATESVPHILAGCGALAQTLYLARHNNALKILFFQVIRALDLVTSEVPWFSKIQPKPMYENERAIAYWDIPLYADNTHVKANRIDATIVDKENKKVAVIEMSCP

SEQ ID NO: 396 - protein, 1270 aa, Montipora cactus
MIKCLAAVSSRKLVRLVTLETTKSVFSNSFLLNKLPNVMAETSQAQTSMRRGRRLKWTEAMNIKLLECKRKAIELVQSNVPPRNSTGRMKGYMSVMKELWDESEFANDLNLSSQNLRDQAARIEKSFGNVRATIREEVKADNGESLFDEVYLERNEGQDLEQEELYEINNNSVQEENLHTQVNHQTAVNNNTPSQISTEVNTIVQMARPIFASVSASLGDFSNRLIDTRTKKILTRGNIVNISSAVEELMKLNNNINTIDLAQDPFVYLWLINCVLYAVVAAFLIVKGWTRKYTSQTGKGKVEDKQKKMYERQAGEIRKNISIAKAEIERIKSNRKITTKGRRNQAKLLESCKVISVAALVSYMEREKSKLRKLKKSFVRRKKLYEARQVNRKFQQDPGSVYSCFGKMLEKQQENEKPRYDRTLLQGQQDERRKFEDIEEASEFWKALWEGTGSGNSGMEWIGEVREAMREVVPEIPTTEFKLTGDKGGQTIRKKKNWSAPGPDLLANFWWKKVDVLHQDVARSFEATAVCERDFPLWFSGGKTSLLPKPGEFTKDNQRPITCLNTLYKWYTSCLLVDASHHLLSYGLMQGDQRGAKQDCSGTVDNLLIDRMVCQDAQRGHRNLSMAWIDVSKAYDSVDHRWLVEMFKLHRFPEWFGFLIGKLSRSWNTRIVTETKQGCESSEIIHFKKGLPQGDSLCPTLFTLCLNPIAWKLRATSGYKLSKPIVCKVTHLLYIDDLKIYASSENNLERVMRTVKGGMDCIGLRWNEKKCAVVHVKRGCVKQTENMEIDELKSIKSLGEESTYKFLGVLENSKQEDKLVLENASKEYLRRLAIIWSSPLSDHSRVVATNQYALPVLSYLMWTQTWPLAQLQQVDREARKIIVQFGGKHPQGSTAILYMSRKCGGRGLRSVETTYKDIKIKAAMKLYHNPDPSMEAVRLFEEKAVRGGRHSAIKDARRYAEELGLHLKLEYPEPMCVTDDGKEVNGKKVKGCIAKVRQEEVRAKVKEEKWQGKMICNRWEDVHLEQGDCFAWLSCWKAAPTQVVVGIQELYEQLLPTKVFYHRKVGTSGSGEEKCRMCGKATESVPHILAGCGALAQTLYLARHNNALKILFFQVIRALDLVTSEVPWFSKIQPKPMYENERAIAYWDIPLYADNTHVKANRIDATIVDKENKKVSVIEMSCPWVENREEKDAEKTTKYGPLRWELEQRYPEYRVKQFNIIVDVLGGYSRDVRKALKELVGDKSDTIALQIQKSVITSSLNIARRFKLLK

SEQ ID NO: 397 - protein, 1231 aa, Montipora capitata
MAETSQAQTSKRRGRRLKWTEAMNIKLLECKRKAIELVQSNVPPRNSTGRMKGYMAVMKELWDESEFANDLNLSSQNLRDQAARIEKSFGNVRATIREEVNADNGESLFDAVYSERNEGQDLEQEELYEINNNSVQEENLHTQVNHQTAVNNNTPSQISTEVNTIVQMARPIFASVSASPGDFSNRLIDTRTKKIPTRGDIVNISSAVEELMKLNNKINTIDLAQDPFVYLWSINCVLYAVVAAFLIVKGWTRKYTSQTGKGKVEDKQKELYERQAGEIRKNISIAKAEIERIKSNRKITTKGRRNQAKLLESCKVISVAALVSYMEREKSKLRKLKKSFVRRKKLYEARQVNRKFQQDPGSVYSCFGKMLEKQQENEKPRYDRTLLQGQQDERRKFEDIEEASEFWKALWEGTGSGNAGMEWIGEVREAMREVVPEIPTTEFKLTGDKVGQTIRKKNWSAPGPDLLANFWWKKVDVLHQDVARSFEATAVCERDFPLWFSGGKTSLLPKPGEFTKDNQRPITCLNTLYKWYMSCLLVDASHHLLSYGLMQGDQRGAKQDCSGTVDNLLIDRMVCQDAQRGHRNLSMAWIDVSKAYDSVDRRWLVEMFKLHRFPEWFGFLIGKLSRSWNTRIVTETKQGFESSEIIHFKKGLPQGDSLCPTLFTLCLNPIAWKWRATSSYKLSKPIVCKVTHLLYIDDLKIYASSENNLERVMRTVKGGMDCIGLRWNEKKCAVAHVKRGCVKQTENMEIDELKSIKSLGEESTYKFLGVLENSKQEDKLVLENASKEYLRRLAIIWSSPLSDHSRVVATNQYAQPGLSYLMWTQTWPLAQLQQVDREARKIIVEFGGKHPQGSTAILYMSRKCGGRGLRSVEKTYKDIKIKAAMKLYYNPDPSMEAVRLFEEKSVRGGRHSAIKDARRYAEELGLHLKLEYPEPMCITDDGKEVNGKKVKGCIAKARQEEVRAKVKEEKWQGKMISNRWEDVHLEQGDCFAWLSCWKAAPTHVVVGIQELYEQLLPTKVFYHRKVGTSGSGEERCRMCGKATESVPHILAGCGALAQTLYLARHNNALKILFFQVIRALDLVTSEVPWFSKIQPKPMYENERAIAYWDIPLYADNTHVKANRIDATIVDEENKKVSVIEMSCPWIENREEKDAEKTTKYGPLRWELEQRYPEYRVTQFNIIVDVLGGYSRDVRKALKELVGDKSDTIALQIQKSIITSSLNIARCFKLLK

SEQ ID NO: 398 - protein, 1232 aa, Acropora yongei
MAETLQAQYSTRRGRRLKWTEAMNIKLLECKRKAIDLVVSNDPPRSSTGRIKGYMAVMKELWDESEFANDLNLSSQNLRDQAARIEKSLGNVRATIREEVNADSNESLFDAVYLECNDGQDLAQEELHEINNNSVQEENLHTQVNHQTAVNINSPSQISTEVNTIVQMARPIFASVSASPGDFSNRLIDTGTKKILTRDDIVNISSAVEELMKLNNKINTIDLAQDLFVYLWITNCVLYAAVAAFLIVKGWTRKNTSQTGKSKAEDNQKEMYERQAGEIRKNISIAKAEIERIRSNRRITTKGRRNQAKLLESCKVISVAALVSYVEKEKSKLRKLKKSFVRRKKLYEAREVNRKFQQDPGSVYSCFGKMLEKQQENKKPRYDQTLLQGQQDGSRKFENIEEASEFWKALWEGTGNGNAGMEWIEDVREAMKEVVPEIPTTEFKLTGDKVGQTIRKKKNWSAPCPDLLANFWWKKVDVLHQDVARSFEATAVCKEDFPLWFSGGKTSLLPKPGEFTKDNQRPITCLNTLYKWYTSCLLVDSSHHLLSYGLMQGDQRGAKQGCSGTVDNLLIDRMVCQDAQRGHRNLSMACIDVSKAYDSVDHRWLVEMFKLHRFPEWFGFLIGKLSRSWNTRIVTETKQGCESSEIIHFKKGLPQGDSLCQTLFILCFNPIAWKLRATSGYTLSKPIACKVTHLLYIDDLKMYASSENNLERVMRTVKGGMDCIGLRWNEKKCAVVHVRRGCVNQTENMEIDELKSIKSLGEESTYKFLGVLENSKQEDKLVLENASKEYLRRLAIIWSSPLSDHSRVVATNQYALPVLSYLMWTQTWPLAQLQQVDREARKIIVEFGGKHPQGSTAILYMSRKCGGRGLSSVETTYKDIKIKAAMKLYYNPDPSMEAVRLFEEKSVRGARHSVIKDARSYAEELGPHLRLEYPEPTCVTDDGKEVNGKKVKGCIAKARQEEVRAKVKKEKWQGKMICNRWEDVHLEQGDCFAWLSCWKAAPTHVVVGIQELYQQLLPTKVFYHRKVGISGSGEERCRMCGKATESVPHILSGCGALAQTLYLARHINALKILFFQVIRALDLVTSEVPWFSKIHSKPMYENERAIAYWDIPLYADNTHLKANRIDATIVDKENKKVSVIEMSCPWVENREEKDAEKTTKYGPLRWELEQRFPEYRVTQFYIIVDVLGGYPIDVRKALKELVRDKSDTIALQIQKSVITSSLNIARRFKLLK

SEQ ID NO: 399 - protein, 907 aa, Montipora efflorescens
MEREKSKLRKLKKSFVRRKKLYEARQVNRKFQQDPGSVYSCFGKMLEKQQENEKPRYDRTLLQGQQDERRKFEDIEEASEFWKALWEGTGSENAGMEWIGEVREAMREVVPEIPTTEFKLTGDKVGQTIRKKKNWSAPGPDLLANFWWKKVDVLHQDVARSFEATAVCERDFPLWFSGGKTSLLPKPGEFTKDNQRPITCLNTLYKWYTSCLLVDASHHLLSYGLMQGDQRGAKQDCSGTVDNLLIDRMVCQDAQRGHRNLSMAWIDVSKAYDSVDHRWLVEMFKLHRFPEWFGFLIGKLSRSWNTRIVTETKQGCESSEIIHFKKGLPQGDSLSPTLFTLCLNPIAWKLRATSGYKLSKPIVCKVTHLLYIDDLKIYASSENNLERVMRTVKGGMDCIGLRWNEKKCAVVHVKRGCVKQTENMEIDELKSIKSLGEESTYKFLGVLENSKQEDKLVLENASKEYLRRLAIIWSSPLSDHSRVVATNQYALPVLSYLMWTQTWPLAQLQQVDREARKIIVQFGGKHPQGSTAILYMSRKCGGRGLRSVETTYKDIKIKAAMKLYYNLDPSMEAVRLFEEKAVRGGRHSAIKDARRYAEELGLHLKLEYPEPMCVTDDGKEVNGKKVKGCIAKVRQEEVRAKVKEEKWQGKMICNRWEDVHLEQGDCFAWLSCWKAAPTQVVVGIQELYEQLLPTKVFYHRKVGTSGSGEEKCRMCGKATESVPHILAGCGALAQTLYLARHNNALKILFFQVIRALDLVTSEVPWFSKIQPKPMYENERAIAYWDIPLYADNTHVKANRIDATIVDKENKKVSVIEMSCPWIENREEKDAEKTTKYGPLRWELEQRYPEYRVSQFNIIVDVLGGYSRDVRKALKELVGDKSDTIALQIQKSVITSSLNIARRFKLLK

SEQ ID NO: 400 - protein, 1228 aa, Acropora florida
MTGKRNSAEEIANNQSKTRLKWTEAMNTKLLECKREAKDLVQSKDPPRKEDGKKQGYMAIMKQLWDNSEFVDLNISTQNLRDQAARIEKSLGSAGATIREELNTANDLLQPNVDNQETSSKDLEQDNYEFNNDTISPRNLHPTNAQVPEENETPAEVKKIFQAAKLVFASVAADPGDFSNRLLDSRTKKRPTNQDIININAAIEQLMKQNDVNNAPDPAQNPFVFLWLANCVIYSVVVAFLVLKGWKKKVNSGTKAMKKSPDERMKEIYEAQAGEIRKNISIAAAEIERLRANRKLTSKGKKNRAKLLKNCKSLSVADLVVYMEKEKSKLRKLKRNFWRVKRLEEARKLNQKFYVDPGSIYATFGKMLESQADIDKPKYDRVTQGTQVNNHMFTNIDEASSFWRSLWEEKGSGDTEAEWIEEVREAMEDVVPEVPTDGWNLNAEQVSKIIKRKKNWSAPGPDRIANFWWKKATILHKEIATCFQATAQLEDLQFPLWFSEGKTTLIPKPGEFRSDNQRPITCLNNLYKWYTSCLLAQANQHIETYGLIQREQRGARGNCSGTVDNLLIDRMVCEDAQRGRRNLSMAWIDVAKAYDSVDHGWLSEMFTLHRFPLWFAKVMEKLTNSWNTKIVAQTTQGKEISPTIRFKKGLPQGDALCPILFILCLNPIAWKVRATEGYSLSKPISTKITHLLYIDDMKLFAASENKLKRVMTVAKNGMESTGLKWNEKKCAVIHVKRGQVEQGNGDMKIADLKPIKCLDQHNTYKFLGVFENTKQEDKQVLEAAAKTYLQRLSIIWSSPLSDHAKVVASNQYALPVLTYLMWTQTWPIANIQQLDREGRKIIVQNGGNHPKGSTAILYMTRKLGGRGLKSVENEYKNTKIKAAVKLYCNADPMMAVVRSFEELAVQNGRHSIIKDAKKYAEELDLHLRLSFPNPVAVADGKEVEAKKVKQAIHKARQQEAQSTVSEERWQGKLIKNRWDDERVKLEECFAWLSSWKNAPTHTIAGVQELYQQLLPTKVYYNRKTKSQVTDEKCRLCGDSLENVQHILSGCSALAQTKYLQRHNNAFKILFFEVLRSLDLITKVEPWFSQVTPKPLYENEHATAFWDVPLFADTTQVKANRIDATVIDKTSKQVRVIEMSCPWLENRESKDFEKTKKYSQLRLELTNRYPEYKVNQYNIIMDVLGGCSKEVEKNIKELVGDECESIMHQMQKAILSSSLHIARMFKLSA

SEQ ID NO: 401 - protein, 1022 aa, Acropora florida
MKQNDVNNAPDPAQNPIVFLWLANCVIYSVVVAFLVLKGWKKKVNSGTKAMKKSPDERMKEIYEAQAGEIRKNISIAAAEIERLRANRKLTSKGKKNRAKLLKNCKSLSVADLVVYMEKEKSKLRKLKRNFWRVKRLEEARKLNQKFYVDPGSIYATFGKMLESQADIDKPKYDRVTQGTQVNNHMFTNIDEASSFWRSLWEEKGSGDTEAEWIEEVREAMEDVVPEVPTDGWNLNAEQVSKIIKRKKNWSAPGPDRIANFWWKKATILHKEIATCFQATAQLEDLQFPLWFSEGKTTLIPKPGEFRSDNQRPITCLNNLYKWYTSCLLAQANQHIETYGLIQREQRGARGNCSGTVDNLLIDRMVCEDAQRGRRNLSMAWIDVAKAYDSVDHGWLSEMFTLHRFPLWFAKVMEKLTNSWNTKIVAQTTQGKEISPTIRFKKGLPQGDALCPILFILCLNPIAWKVRATEGYSLSKPISTKITHLLYIDDMKLFAASENKLKRVMTVAKNGMESTGLKWNEKKCAVIHVKRGQVEQGNGDMKIADLKPIKCLDQHNTYKFLGVFENTKQEDKQVLEAAAKTYLQRLSIIWSSPLSDHAKVVASNQYALPVLTYLMWTQTWPIANIQQLDREGRKIIVQNGGNHPKGSTAILYMTRKLGGRGLKSVENEYKNTKIKAAVKLYCNADPMMAVVRSFEELAVQNGRHSIIKDAKKYAEELDLHLRLSFPNPVAVADGKEVEAKKVKQAIHKARQQEAQSTVSEERWQGKLIKNRWDDERVKLEECFAWLSSWKNAPTHTIAGVQELYQQLLPTKVYYNRKTKSQVTDEKCRLCGDSLENVQHILSGCSALAQTKYLQRHNNAFKILFFEVLRSLDLITKVEPWFSQVTPKPLYENEHATAFWDVPLFADTTQVKANRIDATVIDKTSKQVRVIEMSCPWLENRESKDFEKTKKYSQLRLELTNRYPEYKVNQYNIIMDVLGGCSKEVEKNIKELLGDKCESIMRQMQKAILSSSLHIARMFKLSA

SEQ ID NO: 402 - protein, 1228 aa, Acropora florida
MTGKRNSAEEIANNQSKTRLKWTEAMNTKLLECKREAKDLVQSKDPPRKEDGKKQGYMAIMKQLWDNSEFVDLNISTQNLRDQAARIEKSLGSAGATIREELNTANDLLQPNVDNQETSSKDLEQDNYEFNNDTISPRNLHPTNAQVPEENETPAEVKKIFQAAKLVFASVAADPGDFSNRLLDSRTKKRPTNQDIININAAIEQLMKQNDVNNAPDPAQNPFVFLWLANCVIYSVVVAFLVLKGWKKKVNSGTKAMKKSPDERMKEIYEAQAGEIRKNISIAAAEIERLRANRKLTSKGKKNRAKLLKNCKSLSVADLVVYMEKEKSKLRKLKRNFWRVKRLEEARKLNQKFYVDPGSIYATFGKMLESQADIDKPKYDRVTQGTQVNNHMFTNIDEASSFWRSLWEEKGSGDTEAEWIEEVREAMEDVVPEVPTDGWNLNAEQVSKIIKRKKNWSAPGPDRIANFWWKKATILHKEIATCFQATAQLEDLQFPLWFSEGKTTLIPKPGEFRSDNQRPITCLNNLYKWYTSCLLAQANQHIETYGLIQREQRGARGNCSGTVDNLLIDRMVCEDAQRGRRNLSMAWIDVAKAYDSVDHGWLSEMFTLHRFPLWFAKVMEKLTNSWNTKIVAQTTQGKEISPTIRFKKGLPQGDALCPILFILCLNPIAWKVRATEGYSLSKPISTKITHLLYIDDMKLFAASENKLKRVMTVAKNGMESTGLKWNEKKCAVIHVKRGQVEQGNGDMKIADLKPIKCLDQHNTYKFLGVFENTKQEDKQVLEAAAKTYLQRLSIIWSSPLSDHAKVVASNQYALPVLTYLMWTQTWPIANIQQLDREGRKIIVQNGGNHPKGSTAILYMTRKLGGRGLKSVENEYKNTKIKAAVKLYCNADPMMAVVRSFEELAVQNGRHSIIKDAKKYAEELDLHLRLSFPNPVAVADGKEVEAKKVKQAIHKARQQEAQSTVSEERWQGKLIKNRWDDERVKLEECFAWLSSWKNAPTHTIAGVQELYQQLLPTKVYYNRKTKSQVTDEKCRLCGDSLENVQHILSGCSALAQTKYLQRHNNAFKILFFEVLRSLDLITKVEPWFSQVTPKPLYENEHATAFWDVPLFADTTQVKANRIDATVIDKTSKQVRVIEMSCPWLENRESKDFEKTKKYSQLRLELTNRYPEYKINQYNIIMDVLGGCSKEVEKNIKQLVGDKCESIMRQMQKAILSSSLHIARMFKLSA

SEQ ID NO: 403 - protein, 906 aa, Acropora gemmifera
MEKEKSKLRKLMRNFWRVKRLEEARKLNQKFYVDPGSIYATFGKMLESQADIDKPKYDRVTQGTQVNNHMFTNIDEASSFWRSLWEEKGSGDTEAEWIEEVREAMEDVVPEVPTDGWNLNAEQVSKIIKRKKNWSAPGPDRIANFWWKKATILHKEIATCFQATAQLEDLQFPLWFSEGKTTLIPKPGEFRSDNQRPITCLNNLYKWYTSCLLAQANQHIETYGLIQREQRGARGNCSGTVDNLLIDRMVCEDAQRGRRNLSMAWIDVAKAYDSVDHGWLSEMFTLHRFPLWFAKVMEKLTNSWNTKIVAQTTQGKEISPTIRFKKGLPQGDALCPILFILCLNPIAWKVRATEGYSLSKPISTKITHLLYIDDMKLFAASENKLKRVMTVAKNGMESTGLKWNEKKCAVIHVKRGQVEQGNGDMKIADLKPIKCLDQHNTYKFLGVFENTKQEDKQVLEAAAKTYLQRLSIIWSSPLSDHAKVVASNQYALPVLTYLMWTQTWPIANIQQLDREGRKIIVQNGGNHPKGSTAILYMTRKLGGRGLKSVENEYKNTKIKAAVKLYCNADPMMAVVRSFEELAVQNGRHSIIKDAKKYAEELDLHLRLSFPNPVAVADGKEVEAKKVKQAIHKARQQETQSTVSEERWQGKLIKNRWDDEKVKLEECFAWLSSWKNAPTHTIAGVQDLYQQLLPTKVYYNRKTKSQVTDEKCRLCGDSLENVQHILSGCSALAQTKYLQRHSNAFKILFFEVLRSLDLITKVEPWFLQVTPKPLYENEHATAFWDVPLFADTTQVKANRIDATVIDKTSKQVRVIEMSCPWLENRESKDFEKTTKYSQLRLELTNRYPAYKVNQYNIIMDVLGGCSKEVEKNIKELLGDKCESIMRQMQKAILSSSLNIARMFKLSA

SEQ ID NO: 404 - protein, 919 aa, Montipora cactus
MMMMMIIIIIIIIINCKSLSVADLVVYMEKEKSKLRKLKRNFWRVKRLEEAMKLNQKFYADPGSIYATFGKMLESQADIDKPKYDRVAQGTQVNNHTFTNIDEASSFWRSLWEEKGSGDTEAEWIEEVREAMEDVVPEVPTDGWNLNAEQVSKIIKRKKNWSATILHKEIATCFQATAQLKDLQFPLWFSEGKTTLIPKPGEFRSDNQRPITCLNNLYKWYTSCLLAQANQHIETYGLIQREQRGARGNCSGTVDNLLIDRMVCEDAQRGRRNLSMAWIDVAKAYDSVDHGWLSEMFTLHRFPIWFAKVMEKLANSWNTRIVAQTTQGKEISPTIRFKKGLPQGDALCPMLFILCLNPIAWKVRATEGYRLSKPISTTITHLLYIDDMKLFAASENKLKRVMTVAKKGMESTGLKWNEKKCAVIHVKRGQVEQGSGDMKIADLKPIKCLDQHNTYKFLGVLENTKQEDKQVLEAAAKTYLQRLSIIWSSPLSDHTKVVASNQYALPVLTYLMWTQTWLIANIQQLDREGRKIIVENGGNHPKGSTAILYMSRKLGGRGLKSVENEYKNTKIKAAVKLYCNADPMMAVVRSFEELAVQSGRHSIIKDAKKYAEELDLQLWLNFPNPVAVADGKEVEAKRVKQAIYKARQQETQSTISEERWQGKLIKNRWDDGKVKLEECFAWLSSWKNAPTHTIAGVQELYQQLLPTKVYYNRKTKSQVTDEKCRPCGDSLENVQHILSGCSALAQTKYLQRHNNAFKILFFEVLRSLDLITKVEPWFSQVTPKPLYENEHATAFWDVPLFADTTQVKANRIDATVIDKTSKQVRVIEMSCPWLENRESKDFEKTTKYSQLRLELTNRYPEYKVNQYNIIMDVLWGCSKEVEKNVKELVGDKCESIMRQMQKAILSSSLHIARMFKLSV

SEQ ID NO: 405 - protein, 779 aa, Acropora acuminata
MKKITEAHEELAIALTKIINNEQSLPQWLCEGKCIMIPKTENPKAKDHRPITLLNTMYKLVTSVIDARLRKHQGQYNYMQIDQRGCTTGSMGCVDNLLIDKAVLEDAQFGRKNLSCTWIDVKKAFDSINHNWLKFCLQIHSIPTKIAQFISNTIKHWKITLEVKTAVSKEYIGPIQLKQGILQGDSFCVRLFTVCLNPIAWHIRSTEGYSLSQSVKEKITHLLYVDDLKTYHKSHNKAALMARTLKDKFQDIGLYWGLDKCATVNVVRGKIVQSTNVSLNNDEQLRTLDKNDKYKFLGKYENSTQLDDIVCEEVSEEFLKRLTVIWSSNISIPRKVKASNTFALPVIQYHMWSSDWPINTLKQLDRECRKIIQEYGGLHVSESTKAMYLPTKEGGRGLKEVEMTYKVTKIKTANYIIHSQDPRIQLVKRFEERKATKGLKSVLKDAKKYAEELDVAFTYDETKTTLTSQGKTTEVEKASPKLIGEFLTPIINNRYKTEYKDQKWLGALTTLQYDDVDIAADSLALLQTWKNIPDIVLSVNTSIRQQLLPTATYKKYKLHQQVEDIKCRMCGQKQETVSHIMCACSTIAQSLYTSRHDKMLRPFYHYLLHLYDFENDHSKPWYEQRPPSAVIENDKAKIMWNTAFYLPEPPEDGANKIDMALHDIQKKEWLLLEGTVCGIGKIADRTSKKQMKYRDLRSGIKQMYPQHKVTQVNIVFDFLGNYYKDLKTQVHNHVILRNTDKQQISSKITSEKETRYLLQKSQKWILSQNVEIVKRLYRN

SEQ ID NO: 406 - protein, 944 aa, Acropora gemmifera
MWMQREMKSKITKDNLLQLKEKKINQLRVNKIKLNKKLEGFKRRNANKWFDNNEGKFYDHCRTIIKNDPGNKRPTYTEPINDNNQTSDTELTKNDFEQFWRPIWEENKETNLDAKWIKEVKEAINEVIPPPSDDLITIQESDIKSSICSKRNWSSPGVDKITNYWMKKITEAHEGLAIALTKIINNEQSLPQWLCEGKCIMIPKTENPKAKDHRPITLLNTMYKLVTSVIDARLRKHQGQYNYMQIDQRGCTTGSMGCVDNLLIDKAVLEDAQFGRKNLSCTWIDVKKAFDSINHNWLKFCLQIHSIPTKIAQFISNTIKHWKITLEVKTAVSKEYIGPIQLKQGILQGDSFCVRLFTVCLNPIAWHIRSTEGYSLSQSVKEKITHLLYVDDLKTYHKSHNKAALMARTLKDKFQDIGLYWGLDKCATVNVVRGKIVQSTNVSLNNDEQLRTLDKNDKYKFLGKYENSTQLDDIVCEEVSEEFLKRLTVIWSSNISIPRKVKASNTFALPVIQYHMWSSDWPINTLKQLDRECRKIIQEYGGLHVSESTKAMYLPTKEGGRGLKEVEMTYKVTKIKTANYIIHSQDPRIQLVKRFEERKATKGLKSVLKDAKKYAEELDVAFTYDETKTTLTSQGKTTEVEKASPKLIGEFLTPIINNRYKTEYKDQKWLGALTTLQYDDVDIAADSLALLQTWKNIPDIVLSVNTSIRQQLLPTATYKKYKLHQQVEDIKCRMCGQKQETVSHIMCACSTIAQSLYTSRHDKMLRPFYHYLLHLYDFENDHSKPWYEQRPPSAVIENDKAKIMWNTAFYLPEPPEDGANKIDMALHDIQKKEWLLLEGTVCGIGKIADRTSKKQMKYRDLRSGIKQMYPQHKVTQVNIVFDFLGNYYKDLKTQVHNHVILRNTDKQQISSKITSEKETRYLLQKSQKWILSQNVDIVKRLYRN

SEQ ID NO: 407 - protein, 1194 aa, Montipora capitata
MGRKRLRIFRKSSQNLRDQYANIMKKTDLNKNTMRNELQQQCANEPERTEQSVNEPERNSNNTQQTEQRTIGIRMNNDQQAPRETNIISTTQEQHHNQDPTQEPRLPDKYATLAQNARAMFQQIKQQGPGTWSERMQTTFTKKCPNSEDTQALNEIFKTLITTKPETDPSTYLWEANSAIYSLAVAWKNNTGKKQQQHNNITRGKQQKPKWQQRIENEIGILRKKLSQITEESRRISSNGRLTRKLKENRMWMQREMKSKITKDNLLQLKEKKINQLRVNKIKLNKKLEGFKRRNANKWFDNNEGKFYAHCRTIIKNDPVNKRPTYTEPINDNNQTSDTELTKNDFEQFWRPIWEENKETNLDAKWIKEVKEAINEVIPPPSDDLITIQESDIKSSICSKRNWSSPGVDKITNYWMKKITEAHEGLAIALTKIINNEQSLPQWLCEGKCIMIPKTENPKAKDHRPITLLNTMYKLVTSVIDARLRKHQGQYNYMQIDQHGCTTGSMGCVDNLLIDKAVLEDAQFGRKSLSCTWIDVKKAFDSINHNWLKFCLQIHSTPTKIAQFISNTIKHWKITLEVKTAVSKEYIGPIQLKQGILQGDSFCVRLFTVCLNPIAWHIRSTEGYSLSQSVKEKITHLLYVDDLKTYHKSHNKAALMARALKAKFQDIGLYWGLDKCATVNVVRGKIVQSTNVSLNNDEQLRTLDKNDKYKFLGKYENSTQLDDIVCEEVSEEFLKRLTVIWSSNISIPRKVKASNTFALPVIQYHMWSSDWPINTLKQLDRECRKIIQEYGGLHVSESTKAMYLPTKEGGRGLKEVEMTYKVTKIKTANYIIHSQDPRIQLVKRFEERKATKGLKSVLKDAKKYAEELDVAFTYDETKTTLTSQGKTTEVEKASPKLIGEFLTPIINNRYKTEYKDQKWLGALTTLQYDDVDIAADSLALLQTWKNIPDIVLSVNTSIRQQLLPTATYKKYKLHQQVEDIKCRMCGQKQETVSHIMCACSTIAQSLYTSRHDKMLRPFYHYLLHLYDFENDHSKPWYEQRPPSAVIENDKAKIMWNTALYLPEPPEDGANKIDMALHDIQKKEWLLLEGTVCGIGKIADRTSKKQMKYRDLRSGIKQMYPQHKVTQVNIVFDFLGNYYKDLKTQVHNHVILRNTDKQQISSKITSEKETRYLLQKSQKWILSQNVEIVKRLYRN

SEQ ID NO: 408 - protein, 1075 aa, Acropora florida
MFQQIKQQGPGTWSERTQTTFTKKCPNSEDTQALNEIFKTLITTKPETDPSTYLWEANSAIYSLAVAWKNNTGKKQQQHNNITKGKQQKPKWQQRIENEIGILRKKLSQITEELRRISSNGRLTRKLKENRMWMQREMKSKITKDNLLQLKEKKINQLRVNKIKLNKKLEGFKRRNANKWFDNNEGKFYDHCRTIIKNDPGNKRPTYTEPINDNNQTSDTELTKNDFEQFWRPIWEENKETNLDAKWIKEVKEAINEVIPPPSDDLITIQESDIKSSICSKRNWSSPGVDKITNYWMKKITEAHEGLAIALTKIINNEQSLPQWLCEGKCIMIPKTENPKAKDHRPITLLNTMYKLVTSVIDARLRKHQGQYNYMQIDQRGCTTGSMGCVDNLLIDKAVLEDAQFGRKNLSCTWIDVKKAFDSINHNWLKFCLQIHSIPTKIAQFISNTIKHWKITLEVKTAVSKEYIGPIQLKQGILQGDSFCVRLFTVCLNPIAWHIRSTEGYSLSQSVKEKITHLLYVDDLKTYHKSHNKAALMARTLKDKFQDIGLYWGLDKCATVNVVRGKIVQSTNVSLNNDEQLRTLDKNDKYKFLGKYENSTQLDDIVCEEVSEEFLKRLTVIWSSNISIPRKVKASNTFALPVIQYHMWSSDWPINALKQLDRECRKIMQEYGGLHVSESTKAMYLPTKEGGRGLKEVEMTYKVTKIKTANYIIHSQDPRIQLVKRFEERKATKGLKSVLKDAKKYAEELDVAFTYDETKTTLTSQGKTTEVEKASPKLIGEFLTPIINNRYKTEYKDQKWLGALTTLQYDDVDIAADSLALLQTWKNIPDIVLSVNTSIRQQLLPTATYKKYKLHQQVEDIKCRMCGQKQETVSHIMCACSTIAQSLYTSRHDKMLRPFYHYLLHLYDFENDHSKPWYEQRPPSAVIENDKAKIMWNTAFYLPEPPEDGANKIDMALHDIQKKEWLLLEGTVCGIGKIADRTSKKQMKYRDLRSGIKQMYPQHKVTQVNIVFDFLGNYYKDLKTQVHNHVILRNTDKQQISSKITSEKETRYLLQKSQKWILSQNVEIVKRLYRN

SEQ ID NO: 409 - protein, 965 aa, Astreopora myriophthalma
MNFNNNVLMNQNEQSKALTSLNEILITHSKQNKELLVLGRIMTNKPQERLTSRQLKNNINIKENRMWMQREMKSKITKDNLLQLKEKKINQLRVNKIKLNKKLEGFKRRNANKWFDNNEGKFYDHCRTIIKNDPVNKRPTYTEPINDNNQTSDTELTKNDFEQFWRPIWEENKETDLDAKWIKEVKEAINEVIPPPSDDLITIQESDIKSSICSKRNWSSPGVDKITNYWMKKITEAHEGLAVALTKIINNEQSLPQWLCEGKCIMIPKTENPKAKDHRPITLLNTMYKLVTSVIDARLRKHQEQYNYMQIDQRGCTTGSMGCVDNLLIDKAVLEDAQFGRKNLSCTWIDVKKAFDSINHNWLKFCLQIHSIPTKIAQFISNTIKHWKITLEVKTAVSKEYIGPIQLKQGILQGDSFCVRLFTVCLNPIAWHIRSTEGYSLSQSVKEKITHLLYVDDLKTYHKSHNKAALMARTLKDKFQDIGLYWGLDKCATVNVVRGKIVQSTNVSLNNDEQLRTLDKNDKYKFLGKYENSTQLDDIVCEEVSEEFLKRLTVIWSSNISIPRKVKASNTFALPVIQYHMWSSDWPINTLKQLDRECRKIIQEYGGLHVSESTKAMYLPTKEGGRGLKEVEMTYKVTKIKTANYIIHSQDPRIQLVKRFEERKATKGLKSVLKDAKKYAEELDVAFTYDETKTTLTSQGKTTEVEKASPKLIGEFLTPIINNRYKTEYKDQKWLGALTTLQYDDVDIAADSLALLQTWKNIPDIVLSVNTSIRQQLLPTATYKKYKLHQQVEDIKCRMCGQKQETVSHIMCACSTIAQSLYTSRHDKMLRPFYHYLLHLYDFENDHSKPWYEQRPPSAVIENDKAKIMWNTAFYLPEPPEDGANKIDMALHDIQKKEWLLLEGTVCGIGKIADRTSKKQMKCRDLRSGVKQMYPQHKVTQVNIVFDFLGNYYKDLKTQVHNHVI

SEQ ID NO: 410 - protein, 779 aa, Astreopora myriophthalma
MKKITEAHEGLAVALTKIINNEQSLPQWLCEGKCIMIPKTENPKAKDHRPITLLNTMYKLVTSVIDARLRKHQEQYNYMQIDQRGCTTGSMGCVDNLLIDKAVLEDAQFGRKNLSCTWIDVKKAFDSINHNWLKFCLQIHSIPTKIAQFISNTIKHWKITLEVKTAVSKEYIGPIQLKQGILQGDSFCVRLFTVCLNPIAWHIRSTEGYSLSQSVKEKITHLLYVDDLKTYHKSHNKAALMARTLKDKFQDIGLYWGLDKCATVNVVRGKIVQSTNVSLNNDEQLRTLDKNDKYKFLGKYENSTQLDDIVCEEVSEEFLKRLTVIWSSNISIPRKVKASNTFALPVIQYHMWSSDWPINTLKQLDRECRKIIQEYGGLHVSESTKAMYLPTKEGGRGLKEVEMTYKVTKIKTANYIIHSQDPRIQLVKRFEERKATKGLKSVLKDAKKYAEELDVAFTYDETKTTLTSQGKTTEVEKASPKLIGEFLTPIINNRYKTEYKDQKWLGALTTLQYDDVDIAADSLALLQTWKNIPDIVLSVNTSIRQQLLPTATYKKYKLHQQVEDIKCRMCGQKQETVSHIMCACSTIAQSLYTSRHDKMLRPFYHYLLHLYDFENDHSKPWYEQRPPSAVIENDKAKIMWNTAFYLPEPPEDGANKIDMALHDIQKKEWLLLEGTVCGIGKIADRTSKKQMKYRDLRSGIKQMYPQHKVTQVNIVFDFIGNYYKDLKTQVHNHVILRNTDKQQISSKITSEKETRYLLQKSQKWILSQNVEIVKRLYRN

SEQ ID NO: 411 - protein, 1160 aa, Montipora capitata
MRNELQQQCANEPERTEQSVNEPERNSNNTQQTEQRTIGIRMNNDQQAPRETNISTTQEQHHNQDSTQEPRLPDKYATLAQNARAMFQQIKQQGPGTWSERMQTTFTKKCPNSEDTQALNEIFKTLITTKPETDPSTYLWEANSAIYSLAVAWKNNTGKKQQQHNNITKGKQQKPKWQQRIENEIGILRKKLSQITEESRRISSNGRLTRKLKENRMWMQREMKSKITKDNLLQLKEKKINQLRVNKIKLKKKLEGFKRRNANKWFDNNEGKFYDHCRTIIKNDPVNKRPTYTEPINDNNQTSDTELTKNDFEQFWRPIWEENKETNLDAKWIKEVKEAINEVIPPPSDDLITIQESDIKSSICSKKNWSSPGVDKITNYWMKKITEAHEGLAIALTKIINNEQSLPQWLCEGKCIMIPKTENPKAKDHRPITLLNTMYKLVTSVIDARLRKHQGQYNYMQIDQRGCTTGSMGCVDNLLIDKAVLEDAQFGRKNLSCTWIDVKKAFDSINHNWLKFCLQIHSIPTKIAQFISNTIKHWKITLEVKTAVSKEYIGPIQLKQGILQGDSFCVRLFTVCLNPIAWHIRSTEGYSLSQSVKEKITHLLYVDDLKTYHKSHNKAALMARALKDKFQDIGLYWGLDKCATVNVVRGKIVQSTNVSLNNDEQLRTLDKNDKYKFLGKYENSTQLDDIVCEEVSEEFLKRLTVIWSSNISIPRKVKASNTFALPVIQYHMWSSDWPINTLKQLDRECRKIIQEYGGLHVSESTKAMYLPTKEGGRGLKEVEMTYKVTKIKTANYIIHSQDPRIQLVKRFEERKATKGLKSVLKDTKKYAEELDVAFTYDETKTTLTSQGKTTEVEKASPKLIGEFLTPIINNRYKTEYKDQKWLGALTTLQYDDVDIAADSLALLQTWKNIPDIVLSVNTSIRQQLLPTATYKKYKLHQQVEDIKCRMCGQKQETVSHIMCGCSTIAQSLYTSRHDKMLRPFYHYLLHLYDFENDHSKPWYEQRPPSAVIENDKAKIMWNTAFYLPEPPEDGANKIDMALHDIQKKEWLLLEGTVCGIGKIADRTSKKQMKYRDLRSGIKQMYPQHKVTQVNIVFDFLGNYYKDLKTQVHNHVILRNTDKQQISSKITSEKETRYLLQKSQKWILSQNVEIVKRLYRN

SEQ ID NO: 412 - protein, 944 aa, Acropora tenuis
MWMQREMKSKITKDNLLQLKEKKINQLRVNKIKLNKNLEGFKRRNANKWFDNNEGKFYDHCRTIIKNDPVNKRPTYTEPINDNNQTSDTELTKNDFEQFWRPIWEENKETNLDAKWIKEVKEAINEVIPPPSDDLITIQESDIKSSICSKRNWSSPGVDKITNYWMKKITEAHEGLAIALTKIINNEQSLPQWLCEGKCIMIPKTENPKAKDHRPITLLNTMYKLVTSVIDARLRKHQEQHNYMQIDQRGCTTGSMGCVDNLLIDKAVLEDAQFGRKNLSCTWIDVKKAFDSINHNWLKFCLQIHSIPTKIAQFISNTIKHWKITLEVKTAVSKEYIGPIQLKQGILQGDSFCVRLFTVCLNPIAWHIRSTEGYSLSQSVKEKITHLLYVDDLKTYHKSHNKAALMARTLKDKFQDIGLYWGLDKCATVNVVRGKIVQSTNVSLNNDEQLRTLDKNDKYKFLGKYENSTQLDDIVCEEVSEEFLKRLTVIWSSNISIPRKVKASNTFALPVIQYHMWSSDWPINTLKQLDRECRKIIQEYGGLHVSESTKAMYLPTKEGGRGLKEVEMTYKVTKIKTANYIIHSQDPRIQLVKRFEERKATKGLKSVLKDAKKYAEELDVAFTYDETKTTLTSQGKTTEVEKASPKLIGEFLTPIINNRYKTEYKDQKWLGALTTLQYDDVDIAADSLALLQTWKNIPDIVLSVNTSIRQQLLPTATYKKYKLHQQVEDIKCRMCGQKQETVSHIMCACSTIAQSLYTSRHDKMLRPFYHYLLHLYDFENDHSKPWYEQRPPSAVIENDKAKIMWNTAFYLPEPPEDGANKIDMALHDIQKKEWLLLEGTVCGIGKIADRTSKKQMKYRDLRSGIKQMYPQHKVTQVNIVFDFLGNYYKDLKTQVHNHVILRNTDKQQISSKITSEKETRYLLQKRQKWILSQNVEIVKRLYRN

SEQ ID NO: 413 - protein, 1075 aa, Acropora yongei
MFQQIKQQGPGTWSERTQTTFTKKCPNSEDTQALNEIFKTLITTKPETDPSTYLWEANSAIYSLAVAWKNNTGKKQQQHNNTTKGKQQKPKWQQRIENEIGILRKKLSQITEELRRISSNGRLTRKLKENRMWMQREMKSKITKDNLLQLKEKKINQLRVNKIKLNKKLEGFKRRNANKWFDNNEGKFYDHCRTIIKNDPVNKRPTYTEPINDNNQTSDTELTKNDFEQFWRPIWEGNKETNLDAKWIKEVKEAINEVIPPPSDDLITIQESDIKSSICGKRNWSSPGVDKITNYWMKKITEAHEGLAIALTKIINNEQSLPQWLCEGKCIMIPKTENPKAKDHRPITLLNTMYKLVTSVIDARLRKHQEQYNYMQIDQRGCTTGSMGCVDNLLIDKAVLEDAQFGRKNLSCTWIDVKKAFDSINHNWLKFCLQIHSIPTKIAQFISNTIKHWKITLEVKTAVSKEYIGPIQLKQGILQGDSFCVRLFTVCLNPIAWHIRSTEGYSLSQSVKEKITHLLYVDDLKTYHKSHNKAALMARALKDKFQDIGLYWGLDKCATVNVVRGKIVQSTNVSLNNDEQLRTLDKNDKYKFLGKYENSTQLDDIVCEEVSEEFLKRLTVIWSSNISIPRKVKASNTFALPVIQYHMWSSDWPINTLKQLDRECRKIIQEYGGLHVSESTKAMYLPTKEGGRGLKEVEMTYKVTKIKTANYMIHSQDPRIQLVKRFEERKATKGLKSVLKDAKKYAEELDVAFTYDQTKTTLTSQGKTTEVEKASPKLIGEFLTPIINNRYKAEYKDQKWLGALTTLQYDDVDIAADSLALLQKWKNIPDIVLSVNTSIRQQLLPTATYKKYKLHQQVEDIKCRMCGQKQETVSHIMCACSTIAQSLYTSRHDKMLRPFYHYLLHLYDFENDHSKPWYEQRPPSAVIENDKAKIMWNTAFYLPEPPEDGANKIDMALNDIQKKEWLLLEGTVCGIGKIADRTSKKQMKYRDLRSGIKQMYPQHKVTQVNIVFDFLGNYYKDLKTQVHNHVILRNTDKQQISSKITSEKETRYLLQKSQKWILSQNVEIVKRLYRN

SEQ ID NO: 414 - protein, 944 aa, Acropora microphthalma
MWMQREMKSKITKDNLLQLKEKKINQLRVNKIKLNKKLEGFKRRNANKWFDNNEGKFYDHCRTIIKNDPGNKRPTYTEPINDNNQTSDTELTKNDFEQFWRPIWEENKETNLDAKWIKEVKEAINEVIPPPSDDLITIQESDIKSSICSKRNWSSPGVDKITNYWMKKITEAHEGLAIALTKIINNEQSLPQWLCEGKCIMIPKTENPKAKDHRPITLLNTMYKLVTSVIDARLRKHQGQYNYMQIDQRGCTTGSMGCVDNLLIDKAVLEDAQFGRKNLSCTWIDVKKAFDSINHNWLKFCLQIHSIPTKIAQFISNTIKHWKITLEVKTAVSKEYIGPIQLKQGILQGDSFCVRLFTVCLNPIAWHIRSTEGYSLSQSVKEKITHLLYVDDLKTYHKSHNKAALMARTLKDKFQDIGLYWGLDKCATVNVVRGKIVQSTNVSLNNDEQLRTLDKNDKYKFLGKYENSTQLDDIVCEEVSEEFLKRLTVIWSSNISIPRKVKASNTFALPVIQYHMWSSDWPINTLKQLDRECRKIIQEYGGLHVSESTKAMYLPTKEGGRGLKEVEMTYKVTKIKTANYIIHSQDPRIQLVKRFEERKATKGLKSVLKDAKKYAEELDVAFTYDETKTTLTSQGKTTEVEKASPKLIGEFLTPIINNRYKTEYKDQKWLGALTTLQYDDVDIAADSLALLQTWKNIPDIVLSVNTSIRQQLLPTATYKKYKLHQQVEDIKCRMCGQKQETVSHIMCACSTIAQSLYTSRHDKMLRPFYHYLLHLYDFENDHSKPWYEQRPPSAVIENDKAKIMWNTAFYLPEPPEDGANKIDMALHDIQKKEWLLLEGTVCGIGKIADRTSKKQMKYRDLRSGIKQMYPQHKVTQVNIVFDFLGNYYKDLKTQVHNHVILRNTDKQQISSKITSEKETRYLLQKSQKWILSQNVKIVKRLYRN

SEQ ID NO: 415 - protein, 1232 aa, Acropora millepora
MNFALIEARNEAEELHKSPQCPRKSNGRKIGIMELTKTIWEGKGYESLGKSSQNLRDQYANIMKKTDLNKNTMRNELKQQCANEPERTEQSVNEPERNSNNTQQTEQRTIGIRTNNDQQAPRETNISTTQEQHHNQDSTQEPHLPNKYATLAQNARAMFQQIKQQGPGTWSERTQTTFTKKCPNSEDTQALNEIFKTLITTKPETDPSTYLWEANSAIYSLAVAWKNNTGKKQQQHNNITKGKQQKPKWQQRIENEIGILRKKLSQITEELRRISSNGRLTRKLKENRMWMQREMKSKITKDNLLQLKEKKINQLRVNKIKLNKKLEGFKRRNANKWFDNNEGKFYDHCRTIIKNDPGNKRPTYTEPINDNNQTSDTELTKNDFEQFWRPIWEENKETNLDAKWIKEVKEAINEVIPPPSDDLITIQESDIKSSICSKRNWSSPGVDKITNYWMKKITEAHEGLAIALTKIINNEQSLPQWLCEGKCIMIPKTENPKAKDHRPITLLNTMYKLVTSVIDARLRKHQGQYNYMQIDQRGCTTGSMGCVDNLLIDKAVLEDAQFGRKNLSCTWIDVKKAFDSINHNWLKFCLQIHSIPTKIAQFISNTIKHWKITLEVKTAVSKEYIGPIQLKQGILQGDSFCVRLFTVCLNPIAWHIRSTEGYSLSQSVKEKITHLLYVDDLKTYHKSHNKAALMARTLKDKFQDIGLYWGLDKCATVNVVRGKIVQSTNVSLNNDEQLRTLDKNDKYKFLGKYENSTQLDDIVCEEVSEEFLKRLTVIWSSNISIPRKVKASNTFALPVIQYHMWSSDWPINTLKQLDRECRKIIQEYGGLHVSESTKAMYLPTKEGGRGLKEVEMTYKVTKIKTANYIIHSQDPRIQLVKRFEERKATKGLKSVLKDAKKYAEELDVAFTYDETKTTLTSQGKTTEVEKASPKLIGEFLTPIINNRYKTEYKDQKWLGALTTLQYDDLDIAADSLALLQTWKKIPDIVLSVNISIRQQLLPTATYKKYKLHQQVEDIKCRMCGQKQETVSHIMCACSTIAQSLYTSRHDKMLRPFYHYLLHLYDFENDHSKPWYEQRPPSAVIENDKAKIMWNTAFYLPEPPEDGANKIDMALHDIQKKEWLLLEGTVCGIGKIADRTSKKQMKYRDLRSGIKQMYPQHKVTQVNIVFDFLGNYYKDLKTQVHNHVILRNTDKQQISSKITSEKETRYLLQKSQKWILSQNVEIVKRLYRN

SEQ ID NO: 416 - protein, 944 aa, Acropora yongei
MWMQREMKSKITKDNLLQLKEKKVNQLRVNKIKLNKKLEGFKRRNANKWFDNKEGNCYDHCRTIIKNDPVNKRPTYTEPINDNNQTSDTELTKNDFEQFWRPIWEENKETNLDAKWIKEVKEAINEGIPPPSDDLITIQESDIKSSICSKRNWSSPGVDKITNYWMKKITEAHEGLAIALTKIINNEQSLPQWLCEGKCIMISKTENPKAKDHRPITLLNTMYKLVTSVIDARLRKHQEQHNYMQIDQHGCTTGSMGCVDNLLIDKAVLEDAQFGRKNLSCTWIDVKKAFDSINHNWLKFCLQIHSIPTKIAQFISNTIKLWKINLEVKTAISKEYIGSIQLKQGILQGDSFCVRLFTVCLNPIAWHIRSTEGYSLSQSVKEKITHLLYVDDLKTYHKSHNKAALMARTLKDKFQDIGLYWGLDKCATVNVVRGKIVQSTNVSLNNDEQLRTLDKNDKYKFLGKYENSTQLDDIVCEEVSEEFLKRLTVIWSSNISIPRKVKASNTFALPVIQYHMWSSDWPINTLKQLDRECRKIIQEYGGLHVSESTKAMYLPTKEGGRGLKEVEMTYKVTKIKTANYIIHSQDPRIQLVKRFEERKATKGLKSVLKDAKKYAEELDVAFTYDETKTTLTSQGKTTEVEKASPKLIGEFLTPIINNRYKAEYKDQKWLGALTTLQYDDVDIAADSLALLQTWKNIPDIVLSVNTSIRQQLLPTATYKKYKLHQQVEDIKCRMCGQKQETVSHIMCACSTIAQSLYTSRHDKMLRPFYHHLLHLYDFENDHSKPWYEQRPPSAVIENDKAKIMWNTAFYLPEPPEDGANKIDMALHDIQKKEWLLLEGTVCGIGKIADRTSKKQMKYRDLRSGIKQMYPQHKVTQVNIVFDFLGNYYKDLKTQVHNHVILRNTDKQQISSKITSEKETRYLLQKSQKWILSQNVENVKRLYRN

SEQ ID NO: 417 - protein, 779 aa, Acropora intermedia
MKKTTEAHEGLAIALTKITNNEQSLPQWLCEGKCIMIPKTENPKAKDHRPITLLNTMYKLVTSVIDARLRKHQGQYNYMQIDQRGCTTGSMGCVDNLLIDKAVLEDAQFGRKNLSCTWIDVKKAFDSINHNWLKFCLQIHSIPTKIAQFISNTIKHWKITLEVKTAVSKEYIGPIQLKQGILQGDSFCVRLFTVCLNPIAWHIRSTEGYSLSQSVKEKITHLLYVDDLKTYHKSHNKAALMARTLKDKFQDIGLYWGLDKCATVNVVRGKIVQSTNVSLNNDEQLRTLDKNDKYKFLGKYENSTQLDDIVCEEVSEEFLKRLTVIWSSNISIPRKVKASNTFALPVIQYHMWSSDWPINTLKQLDRECRKIIQVYGGMHDSESTKAIYIPTKEGGRGLKEVEITYKVTKIKTANYIIHSQDPRIQLVKRFEERKATKGLKSVLKDAKKYAEELDVAFTYDETKKTLTSQGKATEVEKASPKLIGEFLTPIINNRYKTEYKDLKWLGALTTLQYDDVDIAADSLALLQTWKNIPDIVLSVNTSIRQQLLPTATYKKYKLHQQVEDIKCRMCGQKQETVSHIMCACSTIAQSLYTSRHDKMLRPFYHYLLHLYDFENDHSKPWYEQRPPSAVIENDKAKIMWNTAFYLPEPPEDGANKIDTALHDIQKKEWLLLEGTVCGIGKIADRTSKKQMKCRDLRSGIKQMYPQHKVTQVNIVFDFLGNYYKDLKTQVHNHVILRNTDKQQKSSKITSEKETRYLLQKSQKWILSQNVEIVKRLYRN

SEQ ID NO: 418 - protein, 942 aa, Acropora selago
MQREMKSKITKDNLLQLKEKKINQLRVNKIKLNKKLEGFKRRNANKWFDNNEGKFYDHCRTIIKNDPGNKRPTYTEPINDNNQTSDTELTKNDFEQFWRPIWQENKETNLDAKWIKEVKEAINEVIPPPSDDLITIQESDIKSSICSKRNWSSPGVDKITNYWMKKITEAHEGLAIALTKIINNEQSLPQWLCEGKCIMIPKTENPKAKDQRPITLLNTMYTLVTSVIDARLRKHQGQYNYMQIDQRGCTTGSMGCVDNLLIDKAVLEEAQFGRKNLSCTWIDVKKAFDSINHNWLKFCLQIHSIPTKIAQFISNTIKHWKITLEVKTAVSKEYIGPIQLKQGILQGDSFCVRLFTVCLNPIAWHIRSTEGYSLSQSVKEKITHLLYVDDLKTYHKSHNKAALMARTLKDKFQDIGLYWGLDKCATVNVVRGKIVQSTNVSLNNDEQLRTLDKNDKYKFLGKYENSTQLNDIVCEEVSEEFLKRLTVIWSSNISIPRKVKASNTFALPVIQYHMWSSDWPINTLKQLDRECRKIIQEYGGLHVSKSTKAMYLPTKEGGRGLKEVEMTYKVTKIKTANYIIHSQDPRIQLVKRFEERKATKGLKSVLKDAKKYAEELDVAFTYDETKTTLTSQGKTAEVEKASPKLIGEFLTPIINNRYKTEYKDQKWLGALTTLQYDDVDIAANSLALLQTWKNIPDIMLSVNTSIRQQLLPTATYKKYKLHQQVEDIKCRMCGQKQETVSHIMCACSTIAQSLYASRHDKMLRPFYHYLLHLYDFENDHSKPWYEQRPPSAVIENDKAKIMWNTAFYLPEPPEDGANKIDMALHDIQKKEWLLHEGTVCGIGKIADRTSKKQMKYRDLRSGIKQMYSQHKVTQVNIVFDFLGNYYKDLKTQVHNHVILRNTDKQQISSKITIEKETRYLLQKSQKWILSQNVEIVKRLYRN

SEQ ID NO: 419 - protein, 944 aa, Acropora microphthalma
MWMQREMKSKITKDNLLQLKEKKINQLRVNKIKLNKKLEGFKRRNANKWFDNNEGKFYDHCRTIIKNDPGNKRPTYTEPINDNNQTSDTELTKNDFEQFWRPIWEENKETNLDAKWIKEVKEAINEVIPPPSDDLITIQESDIKSSICSKRNWSSPGVDKITNYWMKKITEAHEGLAIALTKIINNEQSLPQWLCEGKCIMIPKTENPKAKDHRPITLLNTMYKLVTSVIDARLRKHQGQYNYMQIDQRGCTTGSMGCVDNLLIDKAVLEDAQFGRKNLSCTWIDVKKAFDSINHNWLKFCLQIHSIPTKIAQFISNTIKHWKITLEVKTAVSKEYIGPIQLKQGILQGDSFCVRLFTVCLNPIAWHIRSTEGYSLSQSVKEKITHLLYVDDLKTYHKSHNKAALMARTLKDKFQDIGLYWGLDKCATVNVVRGKIVQSTNVSLNNDEQLRTLDKNDKYKFLGKYENSTQLDDIVCEEVSEEFLKRLTVIWSSNISIPRKVKASNTFALPVIQYHMWSSDWPINTLKQLDRECRKIIQEYGGLHVSESTKAMYLPTKEGGRGLKEVEMTYKVTKIKTANYIIHSQDPRIQLVKRFEERKATKGLKSVLKDAKKYAEELDVAFTYDETKTTLTSQGKTTEVEKASPKLIGEFLTPIINNRYKTEYKDQKWLGALTTLQYDDVDIAADSLALLQTWKNIPDIVLSVNTSIRQQLLPTATYKKYKLHQQVEDIKCRMCGQKQETVSHIMCACSTIAQSLYTSRHDKMLRPFYHYLLHLYDFENDHSKPWYEQRPPSAVIENDKAKIMWNTAFYLPEPPEDGANKIDMALHDIQKKEWLLLEGTVCGIGKIADRTSKKQMKYRDLRSGIKQMYPQHKVTQVNIVFDFLGNYYKDLKTQVHNHVILRNTDKQQISSKITSEKETRYLLQKSQKWILSQNVEIVKRLYRN

SEQ ID NO: 420 - protein, 1287 aa, Acropora millepora
MRLLAVLVLILNNIYKINMPRQQLAQHARNQPNTSSLEDGQTSAVEHRARTKWTVEMNFALIEARNEAEELHKSPQCPRKSNGRKIGIMELTKTIWEGKGYESLGKSSQNLRYQYANIMKTDLNKNTMRNELQQQCANEPERTEQSVNEPERNSNNTQQTEQRTIGIRTNNDQQAPRETNISTTQEQHHNQDSTQEPHLPNKYATLAQNARAMFQQIKQQGPGTWSERTQTTFTKKCPNSEDTQALNEIFKTLITTKPETDPSTYLWEANSAIYSLAVAWKNNTGKKQQQHNNITKGKQQKPKWQQRIENEIGILRKKLSQITEELRRISSNGRLTRKLKENRMWMQREMKSKITKDNLLQLKEKKINQLRVNKIKLNKKLEGFKRRNANKWFDNNEGKFYDHCRTIIKNDPGNKRPTYTEPINDNNQTSDTELTKNDFEQFWRPIWEENKETNLDAKWIKEVKEAINEVIPPPSDDLITIQESDIKSSICSKRNWSSPGVDKITNYWMKKITEAHEGLAIALTKIINNEQSLPQWLCEGKCIMIPKTENPKAKDHRPITLLNTMYKLVTSVIDARLRKHQGQYNYMQIDQRGCTTGSMGCVDNLLIDKAVLEDAQFGRKNLSCTWIDVKKAFDSINHNWLKFCLQIHSIPTKIAQFISNTIKHWKITLEVKTAVSKEYIGPIQLKQGILQGDSFCVRLFTVCLNPIAWHIRSTEGYSLSQSVKEKITHLLYVDDLKTYHKSHNKAALMARTLKDKFQDIGLYWGLDKCATVNVVRGKIVQSTNVSLNNDEQLRTLDKNDKYKFLGKYENSTQLDDIVCEEVSEEFLKRLTVIWSSNISIPRKVKASNTFALPVIQYHMWSSDWPINTLKQLDRECRKIIQEYGGLHVSESTKAMYLPTKEGGRGLKEVEMTYKVTKIKTANYIIHSQDPRIQLVKRFEERKATKGLKSVLKDAKKYAEELDVAFTYDETKTTLTSQGKTTEVEKASPKLIGEFLTPIINNRYKTEYKDQKWLGALTTLQYDDLDIAADSLALLQTWKKIPDIVLSVNISIRQQLLPTATYKKYKLHQQVEDIKCRMCGQKQETVSHIMCACSTIAQSLYTSRHDKMLRPFYHYLLHLYDFENDHSKPWYEQRPPSAVIENDKAKIMWNTAFYLPEPPEDGANKIDMALHDIQKKEWLLLEGTVCGIGKIADRTSKKQMKYRDLRSGIKQMYPQHKVTQVNIVFDFLGNYYKDLKTQVHNHVILRNTDKQQISSKITSEKETRYLLQKSQKWILSQNVEIVKRLYRN

SEQ ID NO: 421 - protein, 1288 aa, Acropora tenuis
MRLLAILVLILNNIYKINMPRQQLAQHARNQPNTSSLEDGQTSAVEHRARTKWTVEMNFALIEARNEAEELHKSPQCPRKSNGRKIGIMELTKTIWKEKGYESLGKSSQNLRDQYANIMKKTDLNKNTMRNELQQQCANEPERTEQSVNEPERNSNNTQQTEQRTIGIRTNNDQQAPRETNISTTQEQHHNQDSTQEPRLPDKYATLAQNARAMFQQIKQQGPGTWSERTQTTFTKKCPNSEDTQALNEIFKTLITTKPETDPSTYLWEANSAIYSLAVAWKNNTGKKQQQHNNTTKGKQQKPKWQQRIENEIGILRKKLSQITEESRRISSNGRLTRKLKENRMWMQREMKSKITKDNLLQLKEKKINQLRVNKIKLNKKLEGFKRRNANKWFDNNEGKFYDHCRTIIKNDPVNKRPTYTEPINDNNQTSDTELTKNDFEQFWRPIWEGNKETNLDAKWIKEVKEAINEVIPPPSDDLITIQESDIKSSICGKRNWSSPGVDKITNYWMKKITEAHEGLAIALTKIINNEQSLPQWLCEGKCIMIPKTENPKAKDHRPITLLNTMYKLVTSVIDARLRKHQEQYNYMQIDQRGCTTGSMGCVDNLLIDKAVLEDAQFGRKNLSCTWIDVKKAFDSINHNWLKFCLQIHSIPTKIAQFISNTIKHWKITLEVKTAVSKEYIGPIQLKQGILQGDSFCVRLFTVCLNPIAWHIRSTEGYSLSQSVKEKITHLLYVDDLKTYHKSHNKAALMARTLKDKFQDIGLYWGLDKCATVNVVRGKIVQSTNVSLNNDEQLRTLDKNDKYKFLGKYENSTQLDDIVCEEVSEEFLKRLTVIWSSNISIPRKVKASNTFALPVIQYHMWSSDWPINTLKQLDRECRKIIQEYGGLHVSESTKAMYLPTKEGGRGLKEVEMTYKVTKIKTANYIIHSQDPRIQLVKRFEERKATKGLKSVLKDAKKYAEELDVAFTYDETKTTLTSQGKTTEVEKASPKLIGEFLTPIINNRYKTEYKDQKWLGALTTLQYDDVDIAADSLALLQTWKNIPDIVLSVNTSIRQQLLPTATYKKYKLHQQVEDIKCRMCGQKQETVSHIMCACSTIAQSLYTSRHDKMLRPFYHYLLHLYDFENDHSKPWYEQRPPSAVIENDKAKIMWNTAFYLPEPPEDGANKIDMALHDIQKKEWLLLEGTVCGIGKIADRTSKKQMKYRDLRSGIKQMYPQHKVTQVNIVFDFLGKYYKDLKTQVHNHVILRNTDKQQISSKITSEKETRYLLQKSQKWILSQNVEIVKRLYRN

SEQ ID NO: 422 - protein, 1213 aa, Acropora cytherea
MRLLAILVLILNNIYKINMPRQQLAQHARNQPNTSSLEDGQTSAVEHRARTKWTVEMNFALIEERNEAEELHKSPQCPRKSNGRKIGIMELTKTIWEGKGYESLGKSSQNLRDQYANIMKKTDLNKNTMRKELQQQCANEPERTEQSVNEAERNSNNTQQTEQRTIGIRTNNDQQAPRETNISTTQEQHHNQDSTQEPRLPNKYATLAQNARAMFQQIKQQGPGTWSERTQTTFTKKCPNSEDTQALNEIFKTLITTKPETDPSTYLWEANSAIYSLAVAWKNNTGKKQQQHNNSTKGKQQKPKWQQRIENEIGILRKKLSQITEELRRISSNGRLTRKLKENRMWMQREMKSKITKDNLLQLKEKKINQLRVNKIKLNKKLEGFKRRNANKWFDNNEGKFYDHCRTIIKNDPGNKRPTYTEPINDNNQTSDTELTKNDFEQFWRPIWEENKETNLDAKWIKEVKEAINEVIPPPSDDLITIQESDIKSSICSKRNWSSPGVDKITNYWMKKITEAHEGLAIALTKIINNEQSLPQWLCEGKCIMIPKTENPKAKDHRPITLLNTMYKLVTSVIDARLRKHQGQYNYMQIDQRGCTTGSMGCVDNLLIDKAVLEDAQFGRKNLSCTWIDVKKAFDSINHNWLKFCLQIHSIPTKIAQFISNTIKHWKITLEIKTAVSKEYIGPIQLKQGILQGDSFCVRLFTVCLNPIAWHIRSTEGYSLSQSVKEKITHLLYVDDLKTYHKSHNKAALLARTLKDKFQDMGLYWGLDKCATVNVVRGKIVQSTNVSLNNDEQLRTLDKNDKYKFLGKYENSTQLDDIVCEEVSEEFLKRLTVIWSSNISIPRKVKASNTFALPVIQYHMWSSDWPINTLKQLDRECRKIIQEYGGLHVSESTKAMYLPIKEGGRGLKEVEMTYKVTKIKTANYIIHSQDPRIQLVKRFEERKATKGLKSVLKDAKKYAEELDVAFTYDETKTTLTSQGKTTEVEKASPKLIGEFLTPIINNRYKTEYKDQKWLGALTTLQYDDVDIAADSLALLQTWKNIPDIVLSVNTSIRQQLLPTATYKKYKLHQQVEDIKCRMCGQKQETVSHIMCACSTIAQSLYTSRHDKMLRSFYHYLLHLYDFENDHSKPWYEQRPPSAVIENDKAKIMWNTAFYLPEPPEDGANKIDMALHDIQKKEWLLIEGTVCGIGKIADRTSKKQMKYRDLRSGIKQIK

SEQ ID NO: 423 - protein, 1287 aa, Acropora millepora
MRLLAILVLILNNIYKINMPRQQLAQHARNQPNTSSLEDGQTSAVEHRARTKWTVEMNFALIEARNEAEELHKSPQCPRKSNGRKIGIMELTKTIWEGKGYESLGKSSQNLRYQYANIMKTDLNKNTMRNELQQQCANEPERTEQSVNEPERNSNNTQQTEQRTIGIRTNNDQQAPRETNISTTQEQHHNQDSTQEPHLPNKYATLAQNARAMFQQIKQQGPGTWSERTQTTFTKKCPNSEDTQALNEIFKTLITTKPETDPSTYLWEANSAIYSLAVAWKNNTGKKQQQHNNITKGKQQKPKWQQRIENEIGILRKKLSQITEELRRISSNGRLTRKLKENRMWMQREMKSKITKDNLLQLKEKKINQLRVNKIKLNKKLEGFKRRNANKWFDNNEGKFYDHCRTIIKNDPGNKRPTYTEPINDNNQTSDTELTKNDFEQFWRPIWEENKETNLDAKWIKEVKEAINEVIPPPSDDLITIQESDIKSSICSKRNWSSPGVDKITNYWMKKITEAHEGLAIALTKIINNEQSLPQWLCEGKCIMIPKTENPKAKDHRPITLLNTMYKLVTSVIDARLRKHQGQYNYMQIDQRGCTTGSMGCVDNLLIDKAVLEDAQFGRKNLSCTWIDVKKAFDSINHNWLKFCLQIHSIPTKIAQFISNTIKHWKITLEVKTAVSKEYIGPIQLKQGILQGDSFCVRLFTVCLNPIAWHIRSTEGYSLSQSVKEKITHLLYVDDLKTYHKSHNKAALMARTLKDKFQDIGLYWGLDKCATVNVVRGKIVQSTNVSLNNDEQLRTLDKNDKYKFLGKYENSTQLDDIVCEEVSEEFLKRLTVIWSSNISIPRKVKASNTFALPVIQYHMWSSDWPINTLKQLDRECRKIIQEYGGLHVSESTKAMYLPTKEGGRGLKEVEMTYKVTKIKTANYIIHSQDPRIQLVKRFEERKATKGLKSVLKDAKKYAEELDVAFTYDETKTTLTSQGKTTEVEKASPKLIGEFLTPIINNRYKTEYKDQKWLGALTTLQYDDLDIAADSLALLQTWKKIPDIVLSVNISIRQQLLPTATYKKYKLHQQVEDIKCRMCGQKQETVSHIMCACSTIAQSLYTSRHDKMLRPFYHYLLHLYDFENDHSKPWYEQRPPSAVIENDKAKIMWNTAFYLPEPPEDGANKIDMALHDIQKKEWLLLEGTVCGIGKIADRTSKKQMKYRDLRSGIKQMYPQHKVTQVNIVFDFLGNYYKDLKTQVHNHVILRNTDKQQISSKITSEKETRYLLQKSQKWILSQNVEIVKRLYRN

SEQ ID NO: 424 - protein, 944 aa, Acropora intermedia; identical to SEQ ID NO: 419

SEQ ID NO: 425 - protein, 1219 aa, Acropora awi
MRLLAILVLILNNIYKINMPRQQLAQHARNQPNTSSLEDGQTSAVEHRARTKWTVEMNFALIEARNEAEELHKSPQCPRKSNGRKIGIMELTKTIWEGKGYESLGKSSQNLRDQYANIMKKTDLNKNTMRNELQQQCANEPERTEQSVNEPERNSNNTQQTEQRTIGIRTNNDQQAPRETNISTTQEQHHNQDSTQEPRLPNKYATLAQNARAIFQQIKQQGPGTWSERTQTTFTKKCPNSEDTQALNEIFKTLITTKPETDPSTYLWEANSAIYSLAVAWKNNTGKKQQQHNNITKGKQQKPKWQQRIENEIGILRKKLSQITEELRRISSNGRLTRKLKENRMWMQREMKSKITKDNLLQLKEKKINQLRVNKIKLNKKLEGFKRRNANKWFDNNEGKFYDHCRTIIKNDPGNKRPTYTEPINDNNQTSDTELTKNDFEQFWRPIWEENKETNLDAKWIKEVKEAINEVIPPPSDDLITIQESDIKSSICSKRNWSSPGVDKITNYWMKKITEAHEGLAIALTKIINNEQSLPQWLCEGKCIMIPKTENPKAKDHRPITLLNTMYKLVTSVIDARLRKHQGQYNYMQIDQRGCTTGSMGCVDNLLIDKAVLEDAQFGRKNLSCTWIDVKKAFDSINHNWLKFCLQIHSIPTKIAQFISNTIKHWKITLEVKTAVSKEYIGPIQLKQGILQGDSFCVRLFTVCLNPIAWHIRSTEGYSLSQSVKEKIPHLLYVDDLKTYHKSHNKAALMARTLKDKFQDIGLYWGLDKCATVNVVRGKIVQSTNVSLNNDEQLRTLDKNDKYKFLGKYENSTQLDDIVCEEVSEEFLKRLTVIWSSNISIPRKVKASNTFALPVIQYHMWSSDWPINTLKQLDRECRKIIQEYGGLHVSESTKAMYLPTKEGGRGLKEVEMTYKVTKIKTANYIIHSQDPRIQLVKRFEERKATKGLKSVLKDAKKYAEELDVAFTYDETKTTLTSQGKTTEVEKASPKLIGEFLTPIINNRYKTEYKDQKWLGALTTLQYDDVDIAADSLALLQTWKNIPDIVLSVNTSIRQQLLPTATYKKYKLHQQVEDIKCRMCGQKQETVSHIMCACSTIAQSLYTSRHDKMLRPFYHYLLHLYDFENDHSKPWYEQRPPSAVIENDKAKIMWNTAFYLPEPPEDGANKIDMALHDIQKKEWLLLEGTVCGIGKIADRTSKKQMKYRDLRSGIKQMYPQHKVT

SEQ ID NO: 426 - protein, 1232 aa, Acropora nasuta
MNFALIEARNEAEELHKSPQCPRKSNGRKIGIMELTKTIWEGKGYESLGKSSQNLRDQYANIMKKTDLNKNTMRNELQQQCANEPERTEQSVNEPERNSNNTQQTEQRTIGIRTNNDQQAPRETNISTTQEQHHNQDSTQEPRLPNKYATLAQNARAMFQQIKQQGPGTWSERTQTTFTKKCPNSEDTQALNEIFKTLITTKPETDPSTYLWEANSAIYSLAVAWKNNTGKKQQQHNNITKGKQQKPKWQQRIENEIGILRKKLSQITEELRRISSNGRLTRKLKENRMWMQREMKSKITKDNLLQLKEKKINQLRVNKIKLNKKLEGFKRRNANKWFDNNEGKFYDHCRTIIKNDPGNKRPTYTEPINDNNQTSDTELTKNDFEQFWRPIWEENKETNLDAKWIKEVKEAINEVIPPPSDDLITIQESDIKSSICSKRNWSSPGVDKITNYWMKKITEAHEGLAIALTKIINNEQSLPQWLCEGKCIMIPKTENPKAKDHRPITLLNTMYKLVTSVIDARLRKHQGQYNYMQIDQRGCTTGSMGCVDNLLIDKAVLEDAQFGRKNLSCTWIDVKKAFDSINHNWLKFCLQIHSIPTKIAQFISNTIKHWKITLEVKTAVSKEYIGPIQLKQGILQGDSFCVRLFTVCLNPIAWHIRSTEGYSLSQSVKEKITHLLYVDDLKTYHKSHNKAALMARTLKDKFQDIGLYWGLDKCATVNVVRGKIVQSTNVSLNNDEQLRTLDKNDKYKFLGKYENSTQLDDIVCEEVSEEFLKRLTVIWSSNISIPRKVKASNTFALPVIQYHMWSSDWPINTLKQLDRECRKIIQEYGGLHVSESTKAMYLPTKEGGRGLKEVEMTYKVTKIKTANYIIHSQDPRIQLVKRFEERKATKGLKSVLKDAKKYAEELDVAFTYDETKTTLTSQGKTTEVEKASPKLIGEFLTPIINNRYKTEYKDQKWLGALTTLQYDDVDIAADSLALLQTWKNIPDIVLSVNTSIRQQLLPTATYKKYKLHQQVEDIKCRMCGQKQETVSHIMCACSTIAQSLYTSRHDKMLRPFYHYLLHLYDFENDHSKPWYEQRPPSVVIENDKAKIMWNTAFYLPEPPEDGANKINMALHDIQKKEWLLLEGTVCGIGKIVDRTSKKQMKYRDLRSGIKQMYPQHKVTQVNIVFDFLGNYYKDLKTQVHNHVILRNVDKQQISSKITSEKETRYLLQKSQKWILSQNVEIVKRLYRN

SEQ ID NO: 427 - protein, 1285 aa, Acropora awi
MRLLAILVLILNNIYKINMPRQQLAQHARNQPNTSSLEDGQTSAVEHRARTKWTVEMNFALIEARNEAEELHKSPQCPRKSNGRKIGIMELTKTIWEGKGYESLGKSSQNLRDQYANIMKKTDLNKNTMRNELQQQCANEPERTEQSVNEPERNSNNTQQTEQRTIGIRTNNDQQAPRETNISTTQEQHHNQDSTQEPRLPNKYATLAQNARAMFQQIKQQGPGTWSERTQTTFTKKCPNSEDTQALNEIFKTLITTKPETDPSTYLWEANSAIYSLAVAWKNNTGKKQQQHNNITKGKQQKPKWQQRIENEIGILRKKLSQITEELRRISSNGRLTRKLKENRMWMQREMKSKITKDNLLQLKEKKINQLRVNKIKLNKKLEGFKRRNANKWFDNNEGKFYDHCRTIIKNDPGNKRPTYTEPINDNNQTSDTELTKNDFEQFWRPIWEENKETNLDAKWIKEVKEAINEVIPPPSDDLITIQESDIKSSICSKRNWSSPGVDKITNYWMKKITEAHEGLAIALTKIINNEQSLPQWLCEGKCIMIPKTENPKAKDHRPITLLNTMYKLVTSVIDARLRKHQGQYNYMQIDQRGCTTGSMGCVDNLLIDKAVLEDAQFGRKNLSCTWIDVKKAFDSINHNWLKFCLQIHSIPTKIAQFISNTIKHWKITLEVKTAVSKEYIGPIQLKQGILQGDSFCVRLFTVCLNPIAWHIRSTEGYSLSQSVKEKIPHLLYVDDLKTYHKSHNKAALMARTLKDKFQDIGLYWGLDKCATVNVVRGKIVQSTNVSLNNDEQLRTLDKNDKYKFLGKYENSTQLDDIVCEEVSEEFLKRLTVIWSSNISIPRKVKASNTFALPVIQYHMWSSDWPINTLKQLDRECRKIIQEYGGLHVSESTKAMYLPTKEGGRGLKEVEMTYKVTKIKTANYIIHSQDPRIQLVKRFEERKATKGLKSVLKDAKKYAEELDVAFTYDETKTTLTSQGKTTEVEKASPKLIGEFLTPIINNRYKTEYKDQKWLGALTTLQYDDVDIAADSLALLQTWKNIPDIVLSVNTSIRQQLLPTATYKKYKLHQQVEDIKCRMCGQKQETVSHIMCACSTIAQSLYTSRHDKMLRPFYHYLLHLYDFENDHSKPWYEQRPPSAVIENDKAKIMWNTAFYLPEPPEDGANKIDMALHDIQKKEWLLLEGTVCGIGKIADRTSEKQMKYRDLRSGIKQMYPQHKVTQVNIVFDFLGNYYKDLKTQVHNHVILRNTDKQQISSKSPSEKETRYLLQKSQKWITECGNCKTIIS

SEQ ID NO: 428 - protein, 944 aa, Acropora selago
MWMQREMKSKITKDNLLQLKEKKINQLRVNKIKLNKKLEGFKRRNANKWFDNNEGKFYDHCRTIIKNDPGNKRPTYTEPINDNNQTSDTELTKNDFEQFRRPIWEENKETNLNAKWIKEVKEAINEVIPPPSDDLITIQESDIKSSICSKRNWSSPGVDKITNYWMKKITEAHEGLAIALTKIINNEQSLPQWLCEGKCIMIPKTENPKAKDHRPITLLNTMYKLVTSVIDARLRKHQGQYNYMQIDQRGCTTGSMGCVDNLLIDKAVLEDAQFGRKNLSCTWIDVKKAFDSINHNWLKFCLQIHSIPTKIAQFISNTIKHWKITLEVKTAVSKEYIGPIQLKQGILQGDSFCVRLFTVCLNPIAWHIRSTEGYSLSQSVKEKITHLLYVDDLKTYHKSHNKAALMARTLKDKFQDIGLYWGLDKCATVNVVRGKIVQSTNVSLNNDEQLRTLDKNDKYKFLGKYENSTQLDDIVCEEVSEEFLKRLTVIWSSNISIPRKVKASNTFALPVIQYHMWSSDWPINTLKQLDRECRKIIQEYGGLHVSESTKAMYLPTKEGGRGLKEVEMTYKVTKIKTANYIIHSQDPRIQLVKRFEERKATKGLKSVLKDAKKYAEELDVAFTYDETKTTLTSQGKTTEVEKASPKLIGEFLTPIINNRYKTEYKDQKWLGALTTLQYDDVDIAADSLALLQTWKNIPDIVLSVNTSIRQQLLPTATYKKYKLHQQVEDIKCRMCGQKQETVSHIMCACSTIAQSLYTSRHDKMLRPFYHYLLHLYDFENDHSKPWYEQRPPSAVIENDKAKIMWNTAFYLPEPPEDGANKIDMALHDIQKKEWLLLEGTVCGIGKIADRTSKKQMKYRDLRSGIKQMYPQHKVTQVNIVFDFLGNYYKDLKTQVHNHVILRNTDKQQISSKITSEKETRYLLQKSQKWILSQNVEIVKRLYRN

SEQ ID NO: 429 - protein, 1288 aa, Montipora capitata
MRLLAILVLILNKIYKINMPRQQLAQHARNQPNTSSLEDGQTSAVEHRARTKWTVEMNFALIEARNEAEELHKSPQCPRKSNGRKIGIMELTKTIWEGKGYESLGKSSQNLRDQYANIMKKTDLNKNTMRNELQQQCANEPERTEQSVNEPERNSNNTQQTEQRTIGIRMNNDQQAPRETNISTTQEQHHNQDSTQEPRLPDKYATLAQNARAMFQQIKQQGPGTCSERMQTTFTKKCPNSEDTQALNEIFKTLITTKPETDPSTYLWEANSAIYSLAVAWKNNTGKKQQQHNNITKGKQQKPKWQQRIENEIGILRKKLSQITEELRRISSNGRLTRKLKENRMWMQREMKSKITKDNLLQLKEKKINQLRVNKIKLNKKLEGFKRRNANKWFDYNEGKFYDHCRTIIKNDPVNKRPTYTEPINDNNQTSDTELTKNDFEQFWRPIWEENKETNLDAKWIKEVKEAINEVIPPPSDDLITIQESDIKSSICSKRNWSSPGVDKITNYWMKKITEAHEGLAIALTKIINNEQSLPQWLCEGKCIMIPKTENPKAKDHRPITLLNTMYKLVTSVIDARLRKHQGQYNYMQIDQRGCTTGSMGCVDNLLIDKAVLEDAQFGRKNLSCTWIDVKKAFDSINHNWLKFCLQIHSIPTKIAQFISNTIKHWKITLEVKTAVSKEYIGPIQLKQGILQGDSFCVRLFTVCLNPIAWHIRSTEGYSLSQSVKEKITHLLYVDDLKTYHKSHNKAALMARALKDKFQDIGLYWGLDKCATVNVVRGKIVQSTNVSLNNDEQLRTLDKNDKYKFLGKYENSTQLDDIVCEEVSEEFLKRLTVIWSSNISIPRKVKASNTFALPVIQYHMWSSDWSINTLKQLDRECRKIIQEYGGLHVSESTKAMYLPTKEGGRGLKEVEMTYKVTKIKTANYIIHSQDPRIQLVKRFEKRKATKGLKSVLKDAKKYAEELDVAFTYDETKTTLTSKGKTTEVEKASPKLIGEFLTPIINNRYKTEYKDQKWLGALTTLQYDDVDIAADSLVLLQTWKNIPDIVLSVNTSIRQQLLPTATYKKYKLHQQVEDIKCRMCGQKQETVSHIMCACSTIAQSLYTSRHDKMLRPFYHYRLHLYDFENDHSKPWYEQRPPSAVIENDKAKIKWNTAFYLPEPPEDGANKIDMALHDIQKKEWLLLEGTVCGIGKIADRTSKKQMKYRDLRSGIKQMYPQHKVTQVNIVFDFLGNYYKHLKTQVHNHVILRNTDKQQISSKITSEKETRYLLQKSQKWILSQNVEIVKRLYRN

SEQ ID NO: 430 - protein, 1221 aa, Montipora capitata
MRLLAILVLILNNIYKINMPRQQLAQHARNQPNTSSLEDGQTSAVEHRARTKWTVEMNFALIEARNEAEELHKSPQCPRKSNGRKIGIMELTKTIWEGKGYESLGKSSQNLRDQYANIMKKTDLNKNTMRNELQQQCANEPERTEQSVNEPERNSNNTQQTEQRTTFTKKCPNSEDTQALNEIFKTLITTKPETDPSTYLWEANSAIYSLAVAWKNNTGKKQQQHNNITKGKQQKPKWQQRIENEIGILRKKLSQITEESRRISSNGRLTRKLKENRMWMQREMKSKITKDNLLQLKEKKINQLRVNKIKLNKKLEGFKRRNANKWFDNNEGKFYDHCRTIIKNDPVNKRPTYTEPINDNNQTSDTELTKNDFEQFWRPIWEENKETNLDAKWIKEVKEAINEVIPPPSDDLITIQESDIKSSICSKKNWSSPGVDKITNYWMKKITEAHEGLAIALTKIINNEQSLPQWLCEGKCIMIPKTENPKAKDHRPITLLNTMYKLVTSVIDARLRKHQGQYNYMQIDQRGCTTGSMGCVDNLLIDKAVLEDAQFGRKNLSCTWIDVKKAFDSINNNWLKFCLQIHSIPTKIAQFISNTIKHWKITLEVKTAVSKEYIGPIQLKQGILQGDSFCVRLFTVCLNPIAWHIRSTEGYSLSQSVKEKITHLLYVDDLKTYHKSHNKAALMARALKDKFQDIGLYWGLDKCATVNVVRGKIVQSTNVSLNNDEQLRTLDKNDKYKFLGKYENSTQLDDIVCEEVSEEFLERLTVIWSSNISIPRKVKASNTFALPVIQYHMWSSDWPINTLKQLDRECRKIIQEYGGLHVSESTKAMYLPTKEGGRGLKEVEMTYKVTKIKTANYIIHSQDPRIQVVKRFEERKATKGLKSVLKDAKKYAEELDVAFTYDETKTTLTSQGKTTEVEKASPKLIGEFLTPIINNRYKTEYKDQKWLGALTTLQYDDVDIAADSLALLQTWKNIPDIVLSVNTSIRQQLLPTATYKKYKLHQQVEDIKCRMCGQKQETVSHIMCACSTIAQSLYTSRHDKMLRPFYHYLLHLYDFENDHSKPWYEQRPPSAVIENDKAKIMWNTAFYLPEPPEDGANKIDMALHDIQKKEWLLLEGTVCGIGKIADRTSKKQMKYRDLRSGIKQMYPQHKVTQVNIVFDFLGNYYKELKTQVHNHVILRNTDKQQISSKITSEKETRYLLQKSQKWILSQNVEIVKRLYRN

SEQ ID NO: 431 - protein, 944 aa, Acropora florida
MWMQREMKSKITKDNLLQLKEKKINQLRVNKIKLNKKLEGFKRRNANKWFDNNEGKFYNHCRTIIKNDPGNKRPTYTEPINDNNQTSDTELTKNDFEQFWRPIWEENKETNLDAKWIKEVKEAINEVIPPPSDDLITIQESDIKSSICSKRNWSSPGVDKITNYWMKKITEAHEGLAIALTKIINNEQSLPQRLCEGKCIMIPKTENPKAKDHRPITLLNTMYKLVTSVIDARLRKHQGQYNYMQIDQRGCTIGSMGCVDNLLIDKAVLEDAQFGRKNLSCTWIDVKKAFDSINHNWLKFCLQIHSIPTKIAQFISNTIKHWKITLEVKTAVSKEYIGPIQLKQGILQGDSFCVRLFTVCLNPIAWHIRSTEGYSLSQSVKEKITHLLYVDDLKTYHKSHNKAALMARTLKDKFQDIGLYWGLDKCATVNVVRGKIVQSTNVSLNNDEQLRTLDKNDKYKFLGKYENSTQLDDIVCEEVSEEFLKRLTVIWSSNISIPRKVKASNTFALPVIQYHMWSSDWPINTLKQLDRECRKIIQEYGGLHVSESTKAMYLPTKEGGRGLKEVEMTYKVTKIKTANYIIHSQDPRIQLVKRFEERKATKGLKSVLKDAKKYAEELDVAFTYDETKTTLTSQGKTTEVEKASPKLIGEFLTPIINNRYKTEYKDQKWLGALTTLQYDDVDIAADSLALLQTWKNIPDIVLSVNTSIRQQLLPTATYKKYKLHQQVEDIKCRMCGQKQETVSHIMCACSTIAQSLYTSRHDKMLRPFYHYLLHLYDFENDHSKPWYEQRPPSAVIENDKAKIMWNTAFYLPEPPEDGANKIDMALHDIQKKEWLLLEGTVCGIGKIADRTSKKQMKYRDLRSGIKQMYPQHKVTQVNIVFDFLGNYYKDLKTQVHNHVILRNTDKQQISSKITSEKETRYLLQKSQKWILSQNVEIVKRLYRN

SEQ ID NO: 432 - protein, 1232 aa, Acropora awi
MNFALIEARNEAEELHKSPQCPRKSNGRKIGIMELTKTIWEGKGYESLGKSSQNLRDQYANIMKKTDLNKNTMRNELQQQCANEPERTEQSVNEPERNSNNTQQTEQRTIGIRTNNDQQAPRETNISTTQEQHHNQDSTQEPRLPNKYATLAQNARAMFQQIKQQGPGTWSERTQTTFTKKCPNSEDTQALNEIFKTLITTKPETDPSTYLWEANSAIYSLAVAWKNNTGKKQQQHNNITKGKQQKPKWQQRIENEIGILRKKLSQITEELRRISSNGRLTRKLKENRMWMQREMKSKITKDNLLQLKEKKINQLRVNKIKLNKKLEGFKRRNANKWFDNNEGKFYDHCRTIIKNDPGNKRPTYTEPINDNNQTSDTELTKNDFEQFWRPIWEENKETNLDAKWIKEVKEAINEVIPPPSDDLITIQESDIKSNICSKRNWSSPGVDKITNYWMKKITEAHEGLAIALTKIINNEQSLPQWLCEGKCIMIPKTENPKAKDHRPITLLNTMYKLVTSVIDARLRKHQGQYNYMQIDQRGCTTGSMGCVDNLLIDKAVLEDAQFGRKNLSCTWIDVKKAFDSINHNWLKFCLQIHSIPTKIAQFISNTIKHWKITLEVKTAVSKEYIGPIQLKQGILQGDSFCVRLFTVCLNPIAWHIRSTEGYSLSQSVKEKITHLLYVDDLKTYHKSHNKAALMARTLKDKFQDIGLYWGLDKCATVNVVRGKIVQSTNVSLNNDEQLRTLDKNDKYKFLGKYENSTQLDDIVCEEVSEEFLKRLTVIWSSNISIPRKVKASNTFALPVIQYHMWSSDWPINTLKQLDRECRKIIQEYGGLHVSESTKAMYLPTKEGGRGLKEVEMTYKVTKIKTANYIIHSQDPRIQLVKRFEERKATKGLKSVLKDAKKYAEELDVAFTYDETKTTLTSQGKTTEVEKASPKLIGEFLTPIINNRYKTEYKDQKWLGALTTLQYDDVDIAADSLALLQTWKNIPDIVLSVNTSIRQQLLPTATYKKYKLHQQVEDIKCRMCGQKQETVSHIMCACSTIAQSLYTSRHDKMLRPFYHYLLHLYDFENDHSKPWYEQRPPSAVIENDKAKIMWNTAFYLPEPPEDGANKIDMALHDIQKKEWLLLEGTVCGIGKIADRTSKKQMKYRDLRSGIKQMYPQHKVTQVNIVFDFLGNYYKDLKTQVHNHVILRNTDKQQISSKITSEKETRYLLQKSQKWILSQNVEIVKRLYRN

SEQ ID NO: 433 - protein, 1001 aa, Montipora capitata
MGCISIIIIIIIIIIIIIIIINENEIGILRKKLSQITEESRRISSNGRLTRKLKENRMWMQREMKSKITKDNLLQLKEKKINQLRVNKIKLNKKLEGFKRRNANKWFDNNEGKFYDHCRTIIKNDPVNKRPTYTEPINDNNQTSDTELTKNDFEQFWRPIWEENKETNLDAKWIKEVKEAINEVIPPPSDDLITIQESDIKSSICSKKNWSSPGVDKITNYWMKKITEAHEGLAIALTKIINNEQSLPQWLCEGKCIMIPKTENPKAKDHRPITLLNTMYKLVTSVIDARLRKHQGQYNYMQIDQRGCTTGSMGCVDNLLIDKAVLEDAQFGRKNLSCTWIDVKKAFDSINHNWLKFCLQIHSIPTKIAQFISNTIKHWKITLEVKTAVSKEYIGPIQLKQGILQGDSFCVRLFTVCLNPIAWHIRSTEGYSLSQSVKEKIMHLLYVDDLKTYHKSHNKAALMARALKDKFQDIGLYWGLDKCATVNVVRGKIVQSTNVSLNNDEQLRTLDKNDKYKFLGKYENSTQLDDIVCEEVSEEFLKRLTVIWSSNISIPRKVKASNTFALPVIQYHMWSSAWPINTLKQLDRECRKIIQEYGGLHVSESTKAMYLPTKEGGRGLKEVEMTYKVTKIKTANYIIHSQDPRIQLVKRFEERKATKGLKSVLKDAKKYAEELDVAFTYDETKTTLTSQGKTTEVEKASPKLIGEFLTPIINNRYKTEYKDQKWLGALTTLQYDDVDIAADSLALLQTWKNIPDIVLSVNTSIRQQLLPTATYKKYKLHQQVEDIKCRMCGQKQETVSHIMCACSTIAQSLYTSRHDKMLRPFYHYLLHLYDFENDHSKPWYEQRPPSAVIENDKAKIMWNTAFYLPEPPEDGANKIDMALHDIQKKEWLLLEGTVCGIGKIADRTSKKQMKYRDLRSEIKQMYPQHKVTQVNIVFDFLGNYYKELKTQVHNHVILRNTDKQQISSKITSEKETRYLLQKSQKWILSQNVEIVKRLYRN

SEQ ID NO: 434 - protein, 1288 aa, Montipora capitata
MRLLAILVLILNNIYKINMPRQQLAQHARNQPNTSSLEDGQTSAVEHRARTKWTVEMNFALIEARNEAEELHKSPQCPRKSNGRKIGIMELTKTIWEGKGYESLGKSSQNLRDQYANIMKKTDLNKNTMRNELQQQCANEPERTEQSVNEPERNSNNTQQTEQRTIGIRTNNDQQAPRETNISTTQEQHHNQDSTQEPRLPDKYATLAQNARAMFQQIKQQGPGTWSERMQTTFTKKCPNSEDTQALNEIFKTLITTKPETDPSTYLWEANSAIYSLAVAWKNNTGKKQQQHNNITKGKQQKPKWQQRIENEIGILRKKLSQITEELRRISSNGRLTRKLKENRMWMQREMKSKITKDNLLQLKEKNINQLRVNKIKLNKKLEGFKRRNANKWFDNNEGKFYDHCRTIIKNDPVNKRPTYTEPINDNNQTSDTELTKNDFEQFWRPIWEENKETNLDAKWIKEVKEAINEVIPPPSDDLITIQESDIKSSICSKRNWSSPGVDKITNYWMKKITEAHEGLAIALTKIINNEQSLPQWLCEGKCIMIPKTENPKAKDHRPITLLNTMYKLVTSVIDARLRKHQGQYNYMQIDQRGCTTGSMGCVDNLLIDKAVLEDAQFGRKNLSCTWIDVKKAFDSINHNWLKFCLQIHSIPTKIAQFISNTIKHWKITLEVKTAVSKEYIGPIQLKQGILQGDSFCVRLFTVCLNPIAWHIRSTEGYSLSQSVKEKITHLLYVDDLKTYHKSHNKAALMARALKDKFQDIGLYWGLDKCATVNVVRGKIVQSTNVSLNNDEQLRTLDKNDKYKFLGKYENSTQLDDIVCEEISEEFLKRLTVIWSSNISIPRKVKASNTFALPVIQYHMWSSDWSINTLKQLDRECRKIIQEYGGLHVSESTKAMYLPTKEGGRGLKEVEMTYKVTKIKTANYIIHSQDPRIQLVKRFEERKATKGLKSVLEDAKKYAEELDVAFTYDETKTTLTSQGKTTEVEKASPKLIGEFLTPIINNRYKTEYKDQKWLGALTTLQYDDVDIAADSLALLQTWKNIPDIVLSVNTSIRQQLLPTATYKKYKLHQQVEDIKCRMCGQKQETVSHIMCACSTIAQSLYTSRHDKMLRPFYHYLLHLYDFENDHSKPWYEQRPPSAVIENDKAKIKWNTAFYLPEPPEDGANKIDMALHDIQKKEWLLLEGTVCGIGKIADRTSMKQMKYRDLRSGIKQMYPQHKVTQVNIVFDFLGNYYKDLKTQVHNHVILRNTDKQQISSKITSEKETRYLLQKSQKWILSQNVEIVKRLYRN

SEQ ID NO: 435 - protein, 1282 aa, Acropora yongei
MRLLAILVLILNNIYKINMPRQQLAQHARNQPNTSSLEDGQTSAVEHRARTKWTVEMNFALIEARNEAEELHKSPQCPRKSNGRKIGIMELTKTIWEEKGYESLGKSSQNLRDQYANIMKKTDLNKNTMRNELQQQCANEPERTEQSVNEPERNPNNTQQTEQRTIGIRTNNDQQAPRETNISTTQEQHHNQDSTQEPRLPDKYTTLAQNARAMFQQIKQQGPGTWSERTQTTFTKKCPNSEDTQALNEIFKTLKKTKPETDPSTYLWEANSAIYSLAVAWKNNTGKKQQQHNNTTKGKQQKPKWQQRIENEIGILRKKPSQITAELRRISFNGRLTRKLKENRMWMQREMKSKITKDNLLQLKEKKINQLRVNKIKLNKKLEGFKRRNANKWFDNNEGKFYDHCRTIIKNDPVNKRPTYTEPINDNNQTSDTELTKNDFEQFWRPIWEGNKETNLDAKWIKEVKEAINEVIPPPSDDLITIQESDIKSSICGKRDWSSPGVDKITNYWMKKITEAHEGLAIALTKIINNEQSLPQWLCEGKCIMIPKTENPKAKDHRPITLLNTMYKLVTSVIDARLRKHQEQYNYMQIDQRGCTTGSMGCVDNLLIDKAVLEDAQFGRKNLSCTWLDVKKAFDSINHNWLKFCLQIHSIPTKIAQFISNTIKHWKITLEVKTAVSKEYIGPIQLKQGILQGDSFCVRLFNVFLNPIVWHIRSTEGYSLSQSVKEKITHLLYVDDLKTYHKSHNKAALMARALKDEFQDIGLYWGLDKCATVNVVRGKIVQSTNVSLNNDEQLRTLDKNDKYKFLGKYENSTQLDDIVCEEVSEEFLKRLTVIWSSNISIPRKVKASNTFALPVIQYHMWSSDWPINTLKQLDRECRKIIQEYRGLHVSESTKAMYLPTKEGGRGLKEVEMTYKVTKIKTANYIIHSQDPRIQLVKRFEERKATKELKSVLKDAKKYAEELDVAFTYDETKTTLTSQGKTTEVEKASPKLIGEFLTPIINNRYKAEYKDQKWLDALTTLQYDDVDIAADSIALLQTWKNIPDIVLSVNTSIRQQLLPTATYKKYKLHQQVEDIKCRMCGQKQETVSHIMCACSTIAQSLYTSRHDKMLRPFYHYLLHLYDFENDHSKPWYEQRPPSAVIENDKAKIMCNTSFYLPEPPEDGANKIDMALHDIQKKEWLLLEGTVCGIGKIADRTSKKQMKYRDLRSGIKQMYPQHKVTQVNIVFDFLGNSYKDLKTQVHNHVILRNTDKQQISSKITSEKETRYLLQKSQKWILSHRMWKL

SEQ ID NO: 436 - protein, 944 aa, Acropora florida
MWMQREMKSKITKDNLLQLKEKKINQLRVNKIKLKKKLEGFKRRNANKWFDNNEGKFYDHCRTIIKNDPGNKRPTYTEPINDNNQTSDTELTKNDFEQFWRPIWEENKETNLDAKWVKEVKEAINEVIPPPSDDLITIQESDIKSSICSKRNWSSPGVDKITNYWMKKITEAHEGLAIALTKIINNEQSLPQWLCEGKCIMIPKTENPKAKDHRPITLLNTMYKLVTSVIDARLRKHQGQYNYMQIDQRGCTTGSMGCVDNLLIDKAVLEDAQFGRKNLSCTWIDVKKAFDSINHNWLKFCLQIHSIPTKIAQFISNTIKHWKITLEVKTAVSKEYIGPIQLKQGILQGDSFCVRLFTVCLNPIAWHIRSTEGYSLSQSVKEKITHLLYVDDLKTYHKSHNKAALMARTLKDKFQDIGLYWGLDKCATVNVVRGKIVQSTNVSLNNDEQLRTLDKNDKYKFLGKYENSTQLDDIVCEEVSEEFLKRLTVIWSSNISIPRKVKASNTFALPVIQYHMWSSDWPINTLKQLDRECRKIIQEYGGLHVSESTKAMYLPTKEGGRGLKEVEMTYKVTKIKTANYIIHSQDPRIQLVKRFEERKATKGLKSVLKDAKKYAEELDVAFTYDETKTTLTSQGKTTEVEKASPKLIGEFLTPIINNRYKTEYKDQKWLGALTTLQYDDVDIAADSLALLQTWKNIPDIVLSVNTSIRQQLLPTATYKKYKLHQQVEDIKCRMCGQKQETVSHIMCACSTIAQSLYTSRHDKMLRPFYHYLLHLYDFENDHSIPWYEQRPPSAVIENDKAKIMWNTALYLPEPPEDGANKIDMALHDIQKKEWLLLEGTVCGIGKIADRTSKKQMKYRDLRGGIKQMYPQHKVTQVNIVFDFLGNYYKDLKTQVHNHVILRNTDKQQISSKITSEKENRYLLQKSQKWILSQNVEIVKRLYRN

SEQ ID NO: 437 - protein, 975 aa, Acropora awi
MGAYFRPPGFRCYVWGGKKGKFRNWTIIIIIIIIIIIMKSKITKDNILQLKEKKINQLRVNKIKLNKKLEGFKRRNVNKWFDNNEGKFYDHCRTIIKNDPGNKRPTYTEPINDNNQTSDTELTKNDFEQFWRPIWEENKETNLDAKWIKEVKEAINEVIPPPSDDLITIQESDIKSSICSKRNWSSPGVDKITNYWMKKITEAHEGLAIALTKIINNEQSLPQWLCEGKCIMIPKTENPKAKDHRPITLLNTMYKLVTSVIDARLRKHQGQYNYMQIDQRGCTTGSMGCVDNLLIDKAVLEDAQFGRKNLSCTWIDVKKAFDSINHNWLKFCLQIHSIPTKIAQFISNTIKHWKITLEVKTAVSKEYIGPIQLKQGILQGDSFCVRLFTVCLNPIAWHIRSTEGYSLSQSVKEKITHLLYVDDLKTYHKSHNKAALMARTLKDKFQDIGLYWGLDKCATVNVVRGKIVQSTNVSLNNDEQLRTLDKNDKYKFLGKYENSTQLDDIVCEEVSEEFLKRLTVIWSSNISIPRKVKASNTFALPVIQYHMWSSDWPINTLKQLDRECRKIIQEYGGLHVSESTKAMYLPTKEGGRGLKEVEMTYKVTKIKTANYIIHSQDPRIQLVKRFEERKATKGLKSVLKDAKKYAEELDVAFTYDETKTTLTSQGKTTEVEKASPKLIGEFLTPIINNRYKTEYKDQKWLGALTTLQYDDVDIAADSLALLQTWKNIPDIVLSVNTSIRQQLLPTATYKKYKLHQQVEDIKCRMCGQKQETVSHIMCACSTIAQSLYTSRHDKMLRPFYHYLLHLYDFENDHSKPWYEQRPPSAVIENDKAKIMWNTAFYLPEPPEDGANKIDMALHDIQKKEWLLLEGTVCGIGKIADRTSKKQMKYRDLRSGIKQMYPQHKVTQVNIVFDFLGNYYKDLKTQVHNHVILRNTDKQQISSKITSEKETRYLLQKSQKWILSQNVEIVKRLYRN

SEQ ID NO: 438 - protein, 1236 aa, Sinocyclocheilus rhinocerous
MGSETPRRGLSLNLATMNRDKNGKIILAGGSPRIISRPRRAWGRASSSIVRPPCGPVAEDCRSDGGQPSGFGPLPVPRLRECSVVLTRLREGSAGAERPPGVMCSNTEPFGARGSAEEAPSSGQPDVSLGGGPTVVNPTPDELHEDPGVVVPLPLGDYACALCGVSAGTLMWVANHFATRHGGVLVRYSCRLCGKVSAAWRTIACHAPHCNGGIGRRQRSGAFVCEGCGRGFISNRARSTHERHVHPDLRNRKRSRSVPAVSEGSSVSTQAEVEVEVARTLREGVDGAPKRPRLSEETDSPMLDEANSPVALRTLILPEGGLLAGLREVARKMVGGAEDGEEGYVRVLSAWLEGDGEVPALVESLASQTLQKLREVAGQQLPAPRANRNQGETVGSRWQTTGKARRLAYHACQLKYQRDQVRLAAELLDGTCASDCPLTIKEIYDEFRGVWERVTAFEGLGPFVPFGLASNGHMAGPISADEVERCLKQAANASAPGPDRIRKQDILAWDPECEEIAHMFNVWWITGVIPKCFKQGRTVLIPKTSDQGALMEIGNWRPITIGSTVLRLFSRVLTKRLVDTCPLHPRQRGFRTSPGCSENLEVLRSLFEHCKEERSPFAVVFVDFARAFDSVSHEHFLCVLREMEVDPHVVELIRGSYQNCVTRVEIGDRLTPEINMRVGVKQGDPMSPLLFNLAMDPLIHGLERLGKGLSVSDTRVTTLAFADDLVLVSDSWQGMAHNLGILEAFCKKTGLRVKPSKTKGFLLSPTRDSFTVNNCPPWVLGGSPLNMVQAAETVGYLGVRVSPWKGIVKPTLFEDLLRWCKNINGALLKPSQKVVILNKFAIPRLLYRADHCCVNSGTLQLLDRTIRERVRAWLHLPPSTCDGLLYARNRDGGLGICKLARLVPSIQARRIFRLSNSTDGVTRSLLDSELANSKFRELWLRAGGKIEHLPQLGNEGRSAERGEANDPIMPICPTPFDWRHDEFLKWAGLLTQGVGILSFHNSKASNSWLAKPKGFKERHYIAGLQLRANVYPTREFWLRGRGMVGASCRRCPQRLESCSHILGQCPATHRSRIVRHNKLCALLATEAEGLGWEVRQEWAFRTPSGELRRLDLVLIRGSLALVIDVTVRFEYAPDSLARAAAEKTGYYGPHKSTIARELHVPEVRVFGFPLGARGLWFPGNGEVLTVMGVGETRRKNFAALLSRRALLYSLDVLRDFNRPAGPGQGGHRRRARRRRR

SEQ ID NO: 439 - protein, 1212 aa, Puntigrus tetrazona
MSGIPSSILAGGSPRIKSRLGSAWGRALLDTARPPRGSVAEDYGSDSGRPSGSGPTHVPRLRECSVVLTRLRERAADGDRPSSVLCNDFEPFGTRGSTEETPRSGQPDALRGGGPATTAPSPDVPRDDPDVVVPLPLEEYACGLCGVSMGALTWVVNHFRTQHGGTSVRYECRLCGKRSAGWRTIACHVPKCNMGVGRRRRAASVVCEECGRGFVSNRARSTHERHAHPVLRNRKRARQVPAPPEGSSAFSQEEAEVGVLRALGEGASLKRPRLSEETTSPALDRAISPIPYPTPQSPGHRLSLGLREEALKLVREAEGGDEGYVGVLSAWLEGADRVPALVESLASETLKRLRGQPPAKRSGRHGEAVRPRRQTTGWARRRAYHACQLKYKRDQVRLAAELLDGTCSSDCPLELDVVYEVYRGLWGDVPAFEGLGPFVPFGLASNGHLAGSITAEEVSRCLKQASNASAAGPDGIGKQDILERDPECEELSRMFNVWWITGVTPKCFKQCRTVLIPKTSDQGALTEVGNWRPITIGSTVFRLFSRVITKRLVETCPLHPRQRGFRTSPGCSENLEILRNLFEHCKEERSPFAVVFVDFARAFDSVSHEHFLCVLREMSVDPHVIELIRGSYQNCVTRVELGSRRTPEISMRVGVKQGDPMSPLLFNLAMDPLVHGLERLGKGMSVSGTKVTALAFADDLVLVSDSWQGMAHNLGILEAFCGRTGLTVKPSKCNGFLLSPTRDSFVVNKCPPWVLGGSPLNMIPANETVGYLGVRVSPWKGIVQPSLLETLVRWLNSLGRALLKPSQKVAMLNKFGIPRLLYQADHCCVNSGTLHLLDRTIRERVRAWLHLPPSTCDGLLYARNRDGGLGICKLARLVPSIQARRIFRLSHSDDNVTRSLLDSDTVKSKFRGLWLKAGGKIEHLPQLGSRILSAERGEAAAGSVTPQCPVPLDWRRDEFLKWADLPVQGVGILPFHNSRASNSWLANHKGMKERHFIAGLQLRANVYPTREFWARGGDKAGVSCRRCPHRLESSSHILGRCPSTQRARLVRHNKICSLLATEAEGLGWEVRQEWAFRTPSGELRRLDLVLVRDSLALAVDVTVRFEYAPDSLTRAAAEKTDYYGPHKSTIARELNVRKVKVYGFPLGARGLWHPGNEEVLTALGVSPARRKTLAALLSRRVLLYSLDVLRDFGRSANPGRAGGLRRARRRRR

SEQ ID NO: 440 - protein, 956 aa, Orchesella cincta
MEPSKDALNESCVAVPSSYIELTPNPGPDGYFHCPYPNCSSEPFRTLKGRNVHVGKKHPQSTQCQQNKAENFDFVGKLTKAKTNLNIMKRIPSGARALAANKLSDLINSCIQQNDDDSWENLLLFSYAALKVPVKTRKQSLTAAVKMNINNTLFPHEIKKRKIKPTPIETRAEAKVADFDIRGAVRILSSDDALAEVNDETYKKLLLKHPKPSRDLIFPDPPENSNDLVVNSDDVKNSISSFPSGSAGGVDGLTPQHLKDLTTFSTGEAATKLLTSITNLCNFMLSGQVNPSVCKILYGASLCALKKKDGGLRPIAVGNTFRRLVAKLACASVRDEIGESLQPKQVGFATKCGCEAAIHATREYVTSPGNNGKVLLKIDFKNAFNSVERDTILEEVKNRTPTLFSFLNQCYREPSLVFFGEKIISSEVGAQQGDPTGPMIFSLTIQPIIEILQSDFNIWYLDDGTLCDSPEVVLQDFQTLIEMAKKIGLEVNPDKCELYFCSGSIDEDVLSDFQNIAPGIRIVDSGELNLLGAPILLEGFKKHVETHFEKMHIMFSRLSNLKSHYGYHLLKNCFAIPKLTYLMRTFPLWKFPDYILKIDTSIKETLEHVFNLQLDSNQWTQASLPIKYGGIGIRKVQDIALSAFLSSAHGVTDLVSKILKLPPGEISISHLDEALENWSILNENTCPAVPHIQRNWDEINVQRIIKDLFFDDVVDSARFLALQTTESGAWLQAIPSPSIGTFLSNQEMRVSVALRLGCVICRQHVCKCGMEVDEKGRHGLSCAKSSGRFSRHSQINNILQRSLTSINVPSTLEPVGLFRDDGKRPDGMTLIPWSKGKCLIWDATCVDTLAATYVESTSFQVGAAANVASQRKSKKYEHLTPNNLFVPFAVETLGPWSDEAKSLANSIGSQLIQQTRDTRAKQYFFQRISLAIQRGNVISITGTLPPSIPMEEIFYL

SEQ ID NO: 441 - protein, 1497 aa, Dolomedes plantarius
MLTESSVGASPRKIQSYPVVLLPRICENNLPAPVPKCNASSSSKPLPSTSNNLDTPPNDQNRCYTVNLGASTSNDPTDSALFVSPPSSPSGLGENITSGLPDELVPSQSASSPAGQGVVPSPATSPTELNGSNTTSPVLNLNLSGDSSSSLHDTNDDDDDFVPVRSRRPKPNMANKRPARPPPANRMRPSPATSSSNNATGLNDPNGDTEGENLPFPGRCLRQGKYLHFVFPIASGLSCTEPGCTRKFVGQMWTSQKQSLRRHLRADHGIDELVDIRWCTFCQGRAPAKVSNHSCLRNIRFFTTRDDDETHLFSCIRCPFSCPSTSGIMNHARWHRQRDLRSNNQQGSNSQRNTSTVTPARPAFTRSNGTNSAGNSQQSPTVRSTPSTSAPTSPLLDASSQAPDETDNIDNTSSQTEGFAPDTQDSPARHDASMDFNEGQLASIDDPDAPSPSGPFIERFNDLLQSSRTDAWDVFQNVLYEYMAFVSEYLHLPPERDGPRPSRPQHAKNPRFIQRLYKRNRRRAIRLILNDEGARCNLPADVLANHFCPDEEFIPEPELFTHHAAAPEGVDMNEFTAEEVWARLKSTENSAPGPDRISYAHWKIVDPESKALALIFNLCFKFQNIPDAWRECRTILIPKGGDGNDPSNWRPIALGCTIVKLFTGCLARRLSSWIEDFDILSPSQKGFLPHDGTFENCFVLNKKFRDARSNRRELCILSIDFTNAFGSVPHEAIFSALSKAGAGNSFTNIIKALYSNTSTSFITGGEVSDLFPIRSGVRQGCPLSGLLFNLAVDPLLREIDDGDGSLNALAYADDVMIMANSPAELQALANKTSNIATLLGLHINPRKCFSLHLGHNPVGCKNTTFYLNSVAVKHLEDGEAASFLGKPIGFSIVSDSSQFNQFVKAGEDILSSFLAPWQRIDAMKAFFYPSLHYAQRTFQHPKTQWTVLDEHLRPLFKKTLSLPSNASNAYLYGDRQKGLLGIPKSAEDSDVALIDGAFKLLSSEDNRVADLAWEDLISLVSSRTRKTDVEAVDLEDFLSGADYPTTSNPISSIWTMARSASRRLGVGWSINNDRSFSIFHGATVITDRKKVFRSQRTEELKSNSHQGKTTHAFTLARSSTHYLHTGDFIRFTDWRFVHKARLGVTRLNGDKFTATADERRCRVCGFAVESVAHVLNHCLPHMDVIRKRHNLVVERLKTAAGNRWKVIRENRTIAGSNLRPDLVLEKDGHALIIDVTIPFENGPNAFNEARRRKEEKYLNIAEALAPRYKTVKVEAIVVGSLGSWDPANDRIIARICSRKYARLMRKLIVSDTLRVSRDIYIEHLTGQRQLPSSRNDRQANALLSSIRNARQNVSDAFDVSSTPNLTGNATDAPAVSPNSNLNEIADISSEADPTPIQNVSATGTSDVSATSTSLNELATATASDNHLNDVPDDAQTSAQSHEILPNAPVETNTAAVTSSPDSPLPVYLLPEEPGIQPNDRESLICEPLSQCPNTSFA

SEQ ID NO: 442 - protein, 1557 aa, Habrosyne pyritoides
MKGSVSRNLSIVPLLGGNRRGTSGADAGRLSMQAVSDSSLNRRAGVGEPEINATADYATNEPLPGGNRRGMSGADAGHDSMQAVSDSSLNRRAGVGEPESNATAEHNNTQPTGDTLQSRLDPIYSAGTPAMTTTQFIDNDDMRRKWSNDEIQELIICYYKAREEGIGYMRRLERLIRDRNPHNTRLNTATGSQLSTQARSIIKRKAISTELLQHLQQRAIEINHIQTQTSTQHTINTERSQASNIINTTNSSQNVETGDGRKTWNHDELLELMFCFFKAKSEGSGYMKRIEGLFRERNPQSPKLHIAKGNYLSTQARSVISRNIIPCHTLDEIRCRAEQVVNPQEQITQITPDTDRHMITPLSNAHEISTQIEENGDTRRKWNNQELLELIFCHYRAKAEGPGYMKSLERLFLERNPLSPKIGIAKGNYLSTQARSVISRNVIPRHTLEEIKQKAEQTIDTNIPVENSQITRSQISPSIVTQLTETYTLNTHTQSSQNRATQSTNAIVSRDLDKNNDINIGTRVNTDFSINIPDSQSSINDPIIQELKNNLTVIENTTIDDRQFLPKPKFTTEFHKNLKTINNFLPAILVTKPTLRDLSNIIYASAKTLIIANEQKPYNTIGNEGIKTVKDPPWKRRIQKKMEGFRKELGRMIEIKNGINSRRMIRVKDVLYTKYNVTDDIGHDNTVEIMKQKIKVYSGRIKRYDDINTRKTQNQLFRENPRKLNRTLSKTQQIPKTLPTKENIQTFWTEILSIPKPYNSEAAWIKDIEEDMQTADVHNVETINVDQVKYAIKKLKNWKSPGLDKIQNYYIKYLTSAHEHVANLYTRVLKGEEEIEEWFTTGQVTLIPKDDNTEDPKNWRPIACLPNLYKLLTSVIANEHYTHCDKNNIIAPEQRGCRRGARGCKDHLMMNKAILEDAHHAQKNVSMAWIDYQKAFDSISHEWLLKVLDLYRCPSVIKRFLQMVMPSWKVIMTAKGENCSVTTDPISIKRGIFQGDSLSPLLFCLGVNPISQILNKYYRKGYKLKDSTNINHLLYMDDLKIYANNKHNLKILIDSTEIFTNDIGTNFGLNKCSVLHLVNGRRREHEGEEHILLCEDKFEHLQTDESYKYLGIRETGKINHKEIRENKLKEYIKRIKKLTNSYLKSRKLITAINTYAVPVLLYTFGIINYKINDLRKIDIKTRKILNIGKAHQQKADVERLYLPVEEGGRGLVNIEMLHKTQIIKYKCYLERETDFIIKSIVAHDKNKEKYSIFKDAEENLNEIGLHENNNYMDKEIKSAVNKYRLSRWKSKPLHGQFFNKILENPSTDRVKSFNWLKKQPVSPSIESQLFAIQDQAVMTKQHERDILKSPVDGKCRLCRVQDETVNHIVSGCEKLAGTYYTKRHNNIVQYVYWALLKKHKFETTKVWWEEHLKQPHVKENDEAKIMWEMPVQTDVTVSNNRPDLIYIDKQTNMTYLIDVTVPMDHNMTQKEVEKLRKYQPLKIEVNRLWKTKAQVVPIVLGATAVVPKSLTKYCEILDAQIDISIMQKQVAIHTTSIVSKMLGDTIFVTTDAAIPSS

SEQ ID NO: 443 - protein, 1558 aa, Habrosyne pyritoides
MKGSVSRNLSIVPLLGGNRRGTSGADAGRLSMQAVSDSSLNRRAGVGEPEINATADYATNEPLPGGNRRGMSGADAGHDSMQAVSDSSLNRRAGVGEPESNATAEHNNTQPTGDTLQSRLDPIYSAGTPAMTTTQFIDNDDMRRKWSNDEIQELIICYYKAREEGTGYMRRLERLIRDRNPHNTRLNTATGSQLSTQARSIIKRKAISTELLQHLQQRAIEINHIQTQTSTQHTINTERSQASNIINTTNSSQNVETGDGRKTWNHDELLELMFCYFKAKSEGSGYMKRLEGLFRERNPQSPKLHIAKGNYLSTQARSVISRNIIPCHTLDEIRCRAEQVVNPQEQITQITPDTDRHMITPLSNAHEISTQIEENGDTRRKWNNQELLELIFCHYRAKAEGPGYMKRLERLFLERNPLSPKIGIAKGNYLSTQARSVISRNVIPRHTLEEIKQKAEQTIDTNIPVENSQITRSQISPSIVTQLTETYTLNTHTQSSQNRATQSTNAIVSRDLDQNNDINIGTRVNTDFSINIPDSQSSINDPIIQELKNNLTVIENTTIDDRQFLPKPKFTTEFHKNLKTINNFLPAILVTKPTLRDLSNIIYASAKTLIIANEQKPYNTIGNEGIKTVKDPPWKRRIQKKMEGFRKELGRMIEIKNGINSRRMIRIKDVLYTKYNVTDDIGHDNTVEIMKQKIKVYSGRIKRYDDINTRKTQNQLFRENPRKLYRTLSKTQQIPKTLPTKENIQTFWTEILSIPKPYNSEAAWIKDIEEDMQITADVHNFETINVDQVKYAIKKLKNWKSPGLDKIQNYYIKYLTSAHEHVANLYTRVLKGEEEIEEWFTTGQVTLIPKDDNTEDPKNWRPIACLPNLYKLLTSVIANELYTHCDKNNIIAPEQRGCRRGARGCKDHLMMNKAILEDAHHAQKNLSMAWIDYQKAFDSISHEWLLKVLDLYRCPSVIKRFLQMVMPSWKVIMTAKGENRSVTTDTISIKRGIFQGDSLSPLLFCLGVNPISQILNKYYRKGYKLKDSTNINHLLYMDDLKIYANNKHNLKILIDSTEIFTNDIGMNFGLNKCSVLHLVNGRRREHEGEEHILLCGDKFEHLQTDESYKYLGIRETGKINHKEIRENKLKEYIKRIKKLTNSYLKSRKLITAINTYAVPVLLYTFGIINYKINDLRKIDIKTRKILNIGKAHQQKADVERLYLPVEEGGRGLVNIEMLHKTQIIKYKCYLERETDFIIKSIVAHDKNKEKYSIFKDAEENLNEIGLHENTNYMDKEIKSAVNKYRLSRWKSKPLHGQFFNKILENPSTDRVKSFNWLKKQPVSPSIESQLFAIQDQAVMTKQHERDILKRPVDGKCRLCRVQDETVNHIVSGCEKLAGTYYTKRHNNIVQYVYWALLKKHKFETTKVWWEEHLKQPHVKENDEAKIMWEMPVQTDVTVSNNRPDLIYIDKQTNMTYLIDVTVPMDHNMTQKEVEKLRKYQPLKIEVNRLWKTKAQVVPIVLGATAVVPKSLTKYCEILDAQIDISIMQKQVAIHTTSIVSKMLGDTIFVTTDAAIPSS

SEQ ID NO: 444 - protein, 1271 aa, Habrosyne pyritoides
MKRLEGLFRERNPQSPKLHIAKGNYLSTQARSVISRNIIPCHTLDEIRCRAEQVVNPQEQITQITPDTDRHMITPLSNAHEISTQIEENGDTRRKWNNQELLELIFCHYRAKAEGPGYMKRLERLFLERNPLSPKIGIAKGNYLSTQARSVISRNVIPRHTLEEIKQKAEQTIDTNIPVENSQITRSQISPSIVTQLTETYTLNTHTQSSQNRATQSTNAIVSRDLDKNNDINIGTRVNTDFSINIPDSQSSINDPIIQELKNNLTVIENTTIDDRQFLPKPKFTTEFHKNLKTINNFLPAILVTKPTLRDLSNIIYASAKTLIIANEQKPYNTIGNEGIKTVKDPPWKRRIQKKMEGFRKELGRMIEIKNGINSRRMIRIKDVLYTKYNVTDDIGHDNTVEIMKQKIKVYSGRIKRYDDINTRKTQNQLFRENPRKLYRTLSKTQQIPKTLPTKENIQTFWTEILSIPKPYNSEAAWIKDIEEDMQTADVHNFETINVDQVKYAIKKLKNWKSPGLDKIQNYYIKYLTSAHEHVANLYTRVLKGEEEIEEWFTTGQVTLIPKDDNTEDPKNWRPIACLPNLYKLLTSVIANELYTHCDKKNIIAPEQRGCRRGARGCKDHLMMNKAILEDAHHAQKNLSMAWIDYQKAFDSISHEWLLKVLDLYRCPSVIKRFLQMVMPSWKVIMTAKGENCSVTTDPILIKRGIFQGDSLSPLLFCLGVNPISQILNKYYRKGYKLKDSTNINHLLYMDDLKIYANNKHNLKILIDSTEIFTNDIGMNFGLNKCSVLHLVNGKRREHEGEEHILLCGDKFEHLQTDESYKYLGIRETGKINHKEIRENKLKEYIKRIKKLTNSYLKSRKLITAINTYAVPVLLYTFGIINYKINDLRKIDIKTRKILNIGKAHQQKADVERLYLPVEEGGRGLVNIEMLHKTQIIKYKCYLERETDFIIKSIVAHDKNKEKYSIFKDAEENLNEIGLHENTNYMDKEIKSAVNKYRLSRWKSKPLHGQFFNKILENPSTDRVKSFNWLKKQPVSPSIESQLFAIQDQAVMTKQHERDILKRPVDGKCRLCRVQDETVNHIVSGCEKLAGTYYTKRHNNIVQYVYWALLKKHKFETTKVWWEEHLKQPHVKENDEAKIMWEMPVQTDVTVSNNRPDLINIDKETNMTYLIDVTVPMDHNMTQKEVEKLRKYQPLKIEVNRLWKTKAQVVPIVLGATAVVPKSVTKYCEILDAQIDISIMQKQVAIHTTTIVSKMLGDTIFVTTDAAIPSS

SEQ ID NO: 445 - protein, 1558 aa, Habrosyne pyritoides
MKGSVSRNLSIVPLLGGNRRGTSGADAGRLSMQAVSDSSLNRRAGVGEPEINATADYATNEPLPGGNRRGMSGADAGHDSMQAVSDSSLNRRAGVGEPESNATAEHNNTQPTGDTLQSRLDPIYSAGTPAMTTTQFIDNDDMRRKWSNDEIQELIICYYKAREEGTGYMRRLERLIRDRNPHNTRLNTATGSQLSTQARSIIKRKAISTELLQHLQQRAIEINHIQTQTSTQHTINTERSQASNIINTTNSLQNVETGDGRKTWNHDELLELMFCYFKAKSEGSGYMKRLEGLFRERNPQSPKLHIAKGNYLSTQARSVISRNIIPCHTLDEIRCRAEQVVNPQEQITQITPDTDRHMITPLSNAHEISTQIEENGDTRRKWNNQELLELIFCHYRAKAEGPGYMKRLKRLFLERNPLSPKIGIAKGNYLSTQARSVISRNVIPRHTLEEIKQKAEQTIDTNIPVENSQITRSQISPSIVTQLTETYTLNTHTQSSQNRATQSTNAIVSRDLDQNNDINIGTRVNTDFSINIPDSQSSINDPIIQELKNNLTVIENTTIDDRQFLPKPKFTTEFHKNLKTINNFLPAILVTKPTLRDLSNIIYASAKTLIIANEQKPYNTIGNEGIKTVKDPPWKRRIQKKMEGFRKELGRMIEIKNGINSRRMIRIKDVLYTKYNVTDDIGHDNTVEIMKQKIKVYSGRIKRYDDINTRKTQNQLFRENPRKLYRTLSKTQQIPKTLPTKENIQTFWTEILSIPKPYNSEAAWIKDIEEDMQITADVHNFETINVDQVKYAIKKLKNWKSPGLDKIQNYYIKYLTSAHEHVANLYTRVLKGEEEIEEWFTTGQVTLIPKDDNTEDPKNWRPIACLPNLYKLLTSVIANELYTHCDKNNIIAPEQRGCRRGARGCKDHLMMNKAILEDAHHAQKNLSMAWIDYQKAFDSISHEWLLKVLDLYRCPSVIKRFLQMVMPSWKVIMTAKGENRSVTTDTISIKRGIFQGDSLSPLLFCLGVNPISQILNKYYRKGYKLKDSTNINHLLYMDDLKIYANNKHNLKILIDSTEIFTNDIGMNFGLNKCSVLHLVNGRRREHEGEEHILLCGDKFEHLQTDESYKYLGIRETGKINHKEIRENKLKEYIKRIKKLTNSYLKSRKLITAINTYAVPVLLYTFGIINYKINDLRKIDIKTRKILNIGKAHQQKADVERLYLPVEEGGRGLVNIEMLHKTQIIKYKCYLERETDFIIKSIVAHDKNKEKYSIFKDAEENLNEIGLHENTNYMDKEIKSAVNKYRLSRWKSKPLHGQFFNKILENPSTDRVKSFNWLKKQPVSPSIESQLFAIQDQAVMTKQHERDILKRPVDGKCRLCRVQDETVNHIVSGCEKLAGTYYTKRHNNIVQYVYWALLKKHKFETTKVWWEEHLKQPHVKENDEAKIMWEMPVQTDVTVSNNRPDLIYIDKQTNMTYLIDVTVPMDHNMTQKEVEKLRKYQPLKIEVNRLWKTKAQVVPIVLGATAVVPKSLTKYCEILDAQIDISIMQKQVAIHTTSIVSKMLGDTIFVTTDAAIPSS

SEQ ID NO: 446 - protein, 1530 aa, Habrosyne pyritoides
MKGSVSRNLSIVPLLGGNRRGTSGADAGRLSMQAVSDSSLNRRAGVGEPEINATADYATNEPLPGGNRRGMSGADAGHDSMQAVSDSSLNRRAGVGEPESNATAEHNNTQPTGDTLQSRLDPIYSAGTPAMTTTQFIDNDDMRRKWSNDEIQELIICYYKAREEGTGYMRRLERLIRDRNPHNTRLNTATGSQLSTQARSIIKRKAISTELLQHLQQRAIEINHIQTQTSTQHTINTERSQASNIINTTNSSQNVETGDGRKTWNHDELLELMFCYFKAKSEGSGYMKRLEGLFRERNPQSPKLHIAKGNYLSTQARSVISRNIIPCHTLDEIRCRAEQVVNPQEQITQITPDTDRHMITPLSNAHEISTQIEENGDTRRKWNNQELLELIFCHYRAKAEGPGYMKRLERLFLERNPLSPKIGIAKGNYLSTQARSVISRNVIPRHTLEEIKQKAEQTIDTNIPVENSQITRSQISPSIVTQLTETYTLNTHTQSSQNRATQSTNAIVSRDLDQNNDINIGTRVNTDFSINIPDSQSSINDPIIQELKNNLTVIENTTIDDRQFLPKPKFTTEFHKNLKTINNFLPAILVTKPTLRDLSNIIYASAKTLIIANEQKPYNTIGNEGIKTVKDPPWKRRIQKKMEGFRKELGRMIEIKNGINSRRMIRIKDVLYTKYNVTDDIGHDNTVEIMKQKIKVYSGRIKRYDDINTRKTQNQLFRENPRKLYRTLSKTQQIPKTLPTKENIQTFWTEILSIPKPYNSEAAWIKDIEEDMQITADVHNFETINVDQVKYAIKKLKNWKSPGLDKIQNYYIKYLTSAHEHVANLYTRVLKGEEEIEEWFTTGQVTLIPKDDNTEDPKNWRPIACLPNLYKLLTSVIANELYTHCDKNNIIAPEQRGCRRGARGCKDHLMMNKAILEDAHHAQKNLSMAWIDYQKAFDSISHEWLLKVLDLYRCPSVIKRFLQMVMPSWKVIMTAKGENRSVTTDTISIKRGIFQGDSLSPLLFCLGVNPISQILNKYYRKGYKLKDSTNINHLLYMDDLKIYANNKHNLKILIDSTEIFTNDIGMNFGLNKCSVLHLVNGRRREHEGEEHILLCGDKFEHLQTDESYKYLGIRETGKINHKEIRENKLKEYIKRIKKLTNSYLKSRKLITAINTYAVPVLLYTFGIINYKINDLRKIDIKTRKILNIGKAHQQKADVERLYLPVEEGGRGLVNIEMLHKTQIIKYKCYLERETDFIIKSIVAHDKNKEKYSIFKDAEENLNEIGLHENTNYMDKEIKSAVNKYRLSRWKSKPLHGQFFNTILENPSTDRVKSFNWLKKQPVSPSIESQLFAIQDQAVMTKQHERDILKRPVDGKCRLCRVQDETVNHIVSGWEKLAGTYYTKRHNNIVQYVYWALLKKHKFETAKVWWEEHLKQPHVKENDEAKIMWEMPVQTDVTVSNNRPDLIYIDKQTNMTYLIDVTVPMDHNMTQKEVEKLRKYQPLKIEVNRLWKTKAQVVPIVLGATAVVPKSLTKYCEILDAQIKYLNYNSL

SEQ ID NO: 447 - protein, 1164 aa, Coccinella septempunctata
MKQGGREQRAGPLRSRLEEEPDGVSCGASGAAPRDGTARLVSSSVRRERRSISLDGVRTRPAASPKRDGRTRWSDDDNIMLMRVHFVARELERNTDFTYRNILTQTWNDIRPDRQLYASLLANRVRWLLEEEKFTQIELENIRISCHPRGAVPGSDGEPPVENVSLRPEEQKKTSKLEEKLVRNFVRFSGVAAESRLAVPRLKGSRKMLEKVEAVNTILLKLIQPADTLQVMVDYVYAAAITVCGEMGVEIRGPRVPKKDQTPPWKGRLETKIQEIRKKIGVLQAYLSNSQPSTRVSKLARRIVSHFGIRTGSAQLRDQMSAVSEKLKQKIKILGNRVKRYNERVMRYKNNKLFHQNQQKFFRSLEEKPLERGKAPTKEAMHLYWKGVWESEKQYDEQTAWIREAEKDTVKYTRECLEITELDIKSVLQKTNNWSAPGVDGVQNYWWKYFTSTHRHLAKLFQEALHNPNIIPRFFTLGKTVMIPKGKSTTDPKNYRPITCLPTVYKILTGVLTRQHWKHINKNKILAPEQGGCRGNSRGCKEILTTDYVITKQAKKKQRNISVAWVDYKKAFDSVPHPWLIKVLRLYGVPEEMIKLLECLMKSWRTNLTFESENQQLKTDTINIRRGIFQGDTLSPLWFCLAMNFLSQLIKKQKYGYILEKERNVKISHQMYIDDLKLYAANEEEMKRLLKIVTAFTKTIGMEIGTDKCAVVHVKRGKIQQGDGLMVMEDITIPRLGSHEHYKYLGVQQTLDIKTTEMKNIFRERYFSRLRKILQSKLNSKAMFTSINMWVLPCLAYSFGIIKWTNAELKELDIRTRALLTKYGIHHPHASSFRLYVRRQDGGRGLQNIEIAHNNTITNMRKYFHDNKLPIIQSICRCDEDISPLNLNNRDATVRGLTTELLLEEWHSKALHGRYPGSLQKNNINKKESLTYLRAGYLYPETEGRLVAIQDQVVPTRSYIKNITMRNIPTDKCRRCLQATESIQHITSSCSILAPLEYMERHNAMARIYHQALAEKTGLVTEVGDPYKYRPSPVLENDTYKLYWDMVFSTERPIPHNRPDLVLFNKRDKTAIIMDVTIPADDNISKAFTEKLNKYQDLAFELKTMHALRSTTILPLIISTNGLVEEHLEENTIRLGLQKTLISTAQKQVILGTARIVRRFLTTS

SEQ ID NO: 448 - protein, 1164 aa, Coccinella septempunctata
MKQGGREQRAGPLRSRLEEEPDGVSCGASGAAPRDGTARLVSSSVRRERRSISLDGVRTRPAASPKRDGRTRWSDDDNIMLMRVHFVARELERNTDFTYRNILTQTWNDIRPDRQLYASLLANRVRWLLEEEKFTQIEFENIRMSCHPRGAVPRSDGEPPVENVSLRPEEQKKTSKLEEKLVRNFVRFSGVAAESRLALPSLKGSRKMLEKVEAVNTILLKLIQPADTLQVMVDYVYAAAITVCGEMGVEIRGPRVPKKDQTPPWKGRLETKIQEIRKKIGVLQAYLSNSQPSTRVSKLARRIVSHFGIRTGSAQLRDQMSAVSEKLKQKIKILGNRVKRYNERAMRYKNNKLFHQNQQKFFRSLEEKPLERGKAPTKEAMHLYWKGVWESEKQYDEQAAWIREAEKDTVKYTRECLEITELDIKSVLQKTNNWSAPGVDGVQNYWWKYFTSTHRHLAKLFQEALHNPNIIPRFFTLGKTVMIPKGKSTTDPKNYRPITCLPTVYKILTGVLTRQLWKHINKNKILAPEQGGCRGNSRGCKEILTTDYVITKQAKKKQRNISVAWVDYKKAFDSVPHPWLIKVLTLYGVPEEMIKLLECLMKSWRTNLTFESENQQLKTDTINIRRGIFQGDTLSPLWFCLAMNFLSQLIKKQKYGYILEKERNVKISHQMYIDDLKLYAANEEEMKRLLKIVTAFTKTIGMEIGTDKCAVVHVKRGKIQQGDGLMVMEDITIPRLGSHEHYKYLGVQQALDIKTTEMKNIFRERYFSRLRKVLQSKLNSKAMFTSINMWVLPCLAYSFGIIKWTNAELKELDIRTRALLTKYGIHHPHASSFRLYVRRQDGGRGLQNIEIAHNNTITNMRKYFHDNKLPIIQSICRCDEDISPLNLNNRDATVRGLTTELLLEEWHSKALHGRYPGSLQKNNINKKESLTYLRAGYLYPETEGRLVAIQDQVVPTRSYIKNITMRNIPTDKCRRCLQATESIQHITSSCPILAPLEYMERHNAMARIYHQALAEKTGLVTEVGDPYKYRPSPVLENDTYKLYWDMVFSTERPIPHNRPDLVLFNKRDKTAIIMDITIPADDNISKAFTEKLNKYQDLAFELKTMHALRSTTILPLIISTNGLVEEHLEENTIRLGLQKTLISTAQKQVILGTARIVRRFLTTS

SEQ ID NO: 449 - protein, 1085 aa, Coccinella septempunctata
MLMRVHFVARELERNTDFTYRNILTQTWNDIRPDRQLYASLLANRVRWLLEEEKFTQIELENIRMSCHPRGAVPGSDGEPPVENVSLRLEEQKKTSKLEEKLVRNFVRFSGVAAESRLAVPRLKGSRKMLEKVEAVNTILLKLIQPADTLQVMVDYVYAAAITVCGEMGVEIRGPRVPKKDQTPPWKGRLEKKIQEIRKKIGVLQAYLSNSQPSTRVSKLARRIVSHFGIRTGSAQLRDQMSAVSEKLKQKIKILGNRVKRYNERVMRYKNNKLFHQNQQKFFRSLEEKPLERGKAPTKEAMHLYWKGVWESEKQYDEQTAWIREAEKDTVKYTRECLEITELDIKSVLQKTNNWSAPGVDGVQNYWWKYFTSTHRHLAKLFQEALDNPNIIPRFFTLGKTVMIPKGKSTTDPKNYRPITCLPTVYKILTGVLTRQLWKHINKNKILAPEQGGCRGNSRGCKEILTTDYVITKQAKKKQRNISVAWVDYKKAFDSVPHPWLIKVLRLYGVPEEMIKLLECLMKSWRTNLTFESENQQLKTDTINIRRGIFQGDTLSPLWFCLAMNFLSQLIKKQKYGYILEKERNVKISHQMYIDDLKLYAANEEEMKRLLKIVTAFTKTIGMEIGTDKCAVVHVKRGKIQQGDGLMVMEDITIPRLGSHEHYKYLGVQQALDIKTTEMKNIFRERYFSRLRKILQSKLNSKAMFTSINMWVLPCLAYSFGIIKWTNAELKELDIRTRALLTKYGIHHPHASSFRLYVGRQDGGRGLQNIEIAHNNTITNMRKYFHDNKLPIIQSICRCDEDISPLNLNNRDATVRGLTTELLLEEWHSKALHGRYPGSLQKNNINKKESLTYLRAGYLYPETEGRLVAIQDQVVPTRSYIKNITMRNIPTDKCRRCLQATESIQHITSSCSILAPLEYMERHNAMAKIYHQALAEKTGLVTEVGDPYKYRPSPVLENDTYKLYWDMVFSTERPIPHNRPDLVLFNKRDKTAIIMDVTIPADDNISKAFTEKLNKYQDLAFELKTMHALRSTTILPLIISTNGLVEEHLEENTIRLGLQKTLISTAQKQVILGTARIVRRFLTTS

SEQ ID NO: 450 - protein, 1083 aa, Harmonia axyridis
MRVHFIAVDLEQVTENSYRIILTQTWNDIRPDRHSYANLLSNRVRWLLEEEKFTQIELDAIRNSCYPRGAVLGLFDDPPETTSTNSQEERPRNSKLEGKFIKNLLMYSGIPAENRPRIPKLRASRIVMKKVDDLDKILDQKINHDHTIEEIVDCVYAAALTVCGEMGVDIREVQKNKSSGPPPWKHRLEGKINEMRKKSGILQTYLNAESPSLRILKLTHRIASDAGVKAGREHFKQQMILVSEKLKQKIKILGNRIRRYNERVKRYKNNKLYHQNQQKFFRSLEDGPSEAGEPPREEAMHFFWKGIWEVEKTYDSQASWIKEAEKESSRYSSENVEITVEDIKSVLRRTNNWSSPGVDGIQNYWWKHFMATHQHLAKIFQQTLKDPTKIPHYFTQGNTIMIPKGETTQDPERYRPITCLPTVYKILTGVLTRHISRHVSKNNIPSKEQGGCRGDTRGCKELLITDYVIAKQVKKKQRSISVAWVDYKKAFDSVPHSWLIKILEIYGVPQAIIDLLKYLMKTWRTNLIVNTKNEHYKTGTINIKSGIFQGDTLSPLWFCLAMNLLSQLINRQKYGYIVERSRNIKISHQMYIDDLKLYAANEEEMKKLLRIVASFTKTIGMEIGMDKCAVVHVRRGQIREGEGLAVMEDLTIPRLSAQEHYKYLGIQQALDIKMPEMKNIFREKYFTRVKKILQSKLNAKAMFMSMNRWALPCLSYSFGVIKWTAAELKELDIKTRALLTRHGIHHPHASSNRLYIRRQEGGRGLQNIEKTYNETIVSMREYFHAQNSPLLQAICRSDENLSALNLSSRERPVGGVTEVQLIREWHGKALHGRYPGNLEKNNINKKESLTYLRAGYLYPETEGRLISIQDQVVPTRSYIKNITGRNIPTDRCRRCLQGTESIQHVVSSCSLLAPTDYTERHNAMARVFHRAIAEETGLIKTAKKAYEYTPCTVLENDTYKLYWDMVITTDKPIPHNRPDIVLFDKGRRSAKIMDVTVPADDNISKAFTEKLTKYQDLAFELKTTYDLRSVVILPLIISTSGLVEAHLEEYTLMLGLQKELISTAQKQVILATTRIVRKFLSTS

SEQ ID NO: 451 - protein, 1083 aa, Harmonia axyridis
MRVHFIAVDLEQVTENSYRIILTQTWNDIRPDRHSYANLLSNRVRWLLEEEKFTQIELDAIRNSCYPRGAVLGLSDDPPETTSTNSQEERPRNSKLEGKFIKNLLMYSGIPAENRPRIPKLRASRIVMRKVDDLDKILDQKINQDHTIEEIVDCVYAAALTVCGEMGVDIREVKKNKSSGPPPWKHRLEEKINEMRKKIGILQTYLNAESPSLRILKLTHRIASDAGVKAGREHFKQQMILVSEKLKQKIKILGNRIRRYNERVKRYKNNKLYHQNQQKFFRSLEDGPSEAGEPPREEAMHFFWKGIWEVEKTYDSQASWIKEAEKESSRYSSENVEITVEDIKSVLRRTNNWSSPGVDGIQNYWWKHFMATHQHLAKIFQQTLKDPTKIPHYFTQGNTIMIPKGETTQDPERYRPITCLPTVYKILTGVLTRHISRHVSKNNILAKEQGGCRGDTRGCKELLITDYVIAKQVKKKQRSISVAWVDYKKAFDSVPHSWLIKILEIYGVPQAIIDLLKYLMKTWRTNLIVNTKNEHYKTGTINIKSGIFQGDTLSPLWFCLAMNLLSQLINRQKYGYIVERSRNIKISHQMYIDDLKLYAANEEEMKKLLRIVASFTKTIGMEIGMDKCAVVHVRRGQIREGEGLAVMEDLSIPRLSAQEHYKYLGIQQALDIKMPEMKNIFREKYFTRVKKILQSKLNAKAMFMSMNRWALPCLSYSFGVIKWTAAELKELDIKTRALLTRHGIHHPHASSNRLYIRRQEGGRGLQNIEKTYNETIVSMREYFHAQNSPLLLAICRSDENLSALNLSSRERPVGGVTEVQLIRGWHGKALHGRYPGNLEKNNINKKESLTYLRAGYLYPETEGRLISIQDQVVPTRSYIKNITGRNIPTDRCRRCLQGTESIQHVVSSCSLLAPTDYTERHNAMARVFHRAIAEETGLIKTAKKAYEYTPCTVLENDTYKLYWDMVITTDKPIPHNRPDIVLFDKGRRSAKIMDVTVPADDNISKAFTEKLTKYQDLAFELKTTYDLRSVVILPLIISTSGLVEAHLEEYTLMLGLQKELISTAQKQVILATTRIVRKFLSTS

SEQ ID NO: 452 - protein, 1164 aa, Coccinella septempunctata
MKQGGREQRAGPLRSRLEEEPDGVSCGASGAAPRDGTARLVSSSVRRERRSISLDGVRTRPAASPKRDGRTRWSDDDNIMLMRVHFVARELERNTDFTYRNILTQTWNDIRPDRQLYASLLANRVRWLLEEEKCTQIELENIRMSCHPRGAVPGSDGEPPVENVSLRPEEQKKTSKLEEKLIRNFVRFSGVAAESRLAVPRLKGSRKMLEKVEAVNTILLKLIQPADTLQVMVDYVYAAAITVCGEMGVEIRGPRVPKKDQTPPWKGRLETKIQEIRKKIGVLQAYLSNSQPSTRVSKLARRIVSHFGIRTGSAQLRDQMSAVSEKLKQKIKILGNRVKRYNERVMRYKNNKLFHQNQQKFFRSLEEKPLERGKAPTKEAMHLYWKGVWESEKQYDEQTAWIREAEKDTVKYTRECLEITELDMKSVLQKTNNWSAPGVDGVQNYWWKYFTSTHRHLAKLFQEALHNPNIIPRFFTLGKTVMIPKGKSTTDPKNYRPITCLPTVYKILTGVLTRQLWKHINKNKILAPEQGGCRGNSRGCEEILTTDYVITKQAKKKQRNISVAWVDYKKAFDSVPHPWLIKVLRLYGVPEEMIKLLECLMKSWRTNLTFESENQQLKTDTINIRRGIFQGDTLSPLWFCLAMNFLSQLIKKQKYGYILEKERNVKISHQMYIDDLKLYAANEEEMKRLLKIVTAFTKTIGMEIGTDKCAVVHVKRGKIQQGDGLMVMEDITIPRLGSHEHYKYLGVQQALDIKTTEMKNIFRERYFSRLRKILQSKLNSKAMFTSINMWVLPCLAYSFGIIKWTNAELKELDIRTRALLTKYGIHHPHASSFRLYVRRQDGGRGLQNIEIAHNNTITNMRKYFHDNKLPIIQSICRCDEDISPLNLNNRDATVRGLTTELLLEEWHSKALHGRYPGSLQKNNINKKESLTYLRAGYLYPETEGRLVAIQDQVVPTRSYIKNITMRNIPTDKCRRCLQATESIQHITSSCSILAPLEYMERHNAMARIYHQALAEKTGLVTEVGDPYKYRPSPVLENDTYKLYWDMVFSTERPIPHNRPDLVLFNKRDKTAIIMDVTIPADDNISKAFTEKLNKYQDLAFELKTMHALRSTTILPLIISTNGLVEEHLEENTIRLGLQKTLISTAQKQVILGTARIVRRFLTTS

SEQ ID NO: 453 - protein, 1084 aa, Coccinella septempunctata
MRVHFIAVDLEQVTENSYRNILTQTWNDIRPDRNSYANLLSNRVRWLLEEEKFTQIELDAIRKSCYPRGAALDLCDDPPEAPSTNNQEERPRTSKLEQKFIKNLLMYSGIPPENRPRIPKLIGSKNLMKKVDDLNRILDQKINRDQTIEELADCVYAAALTVCAEMGVEIREVPKSKESRGPPPWKDRLERKINEMRKKIGILQTYLSAESPSARILKLTHRIASDAGVKARDENFKPQMILVSENLKQKIKILGNRIRRYNERVKRYKNNKLYYQNQQKFFRSLEEGPSEVGEPPEEEAMHLFWKGIWEVEKTYDSQASWIKEAEKEPSRYSSENVEITVEDIKSVLRKTNNWSTPGVDGVQNYWWKHFTATHQHLAKLFQQTLRDPTIIPHYFTQGTTIMIPKGEITQDPEKYRPITCLSTVYKLLTGVLTRHIWRHVNKNNILAKEQGGCRGDTRGCKELLITDYVIAKQVKKKQRSISVAWVDYKKAFDSVPHTWLIKVLKIYGVPETIIDLLKYLMKTWRTNLVVNTKNHHYKTGTINIKSGIFQGDTLSPLWFCLAMNLLSQLINRQKYGYIVERSRNIRISHQMYIDDLKLYAANEEEMKKLLKIVASFTKTIGMEIGVDKCAVVHVGRGQIRDGEGLAVMEDATIPRLSAQGHYKYLGIQQALDIKKAEMKNIFREKYFSRVKKILQSKLNAKATFTSMNMWALPCLSYSFGIIKWTAAELKELDIKTRALLTRHGVHHPHASSNRLYIRRQEGGRGLQNIEKTYNETVVSMREYFHAKNSPLLQAICRSDENLTPLNLSSQEGPVGGVTEAQLIREWHSKALHGRYPGNLEKNNINKKESLTYLRAGYLYPETEGRLVAIQDQVVPTRSYIKNITARNITTDRCRRCLQAPESIQHVVSSCSVLAPTDYTERHNAMARIFHRAIAEETGLVKRSKKPYEYRPSTVLENGAYKLYWDMVITTDKPIPHNRPDIVLFDKGQRSAKIMDVTVPADDNISKAFTEKLTKYQDLAFELKNTYALRSVVILPLIISTNGLVEAHLEEYTVMLGLQKELISTAQKQVILATTRIVRKFLTTS

SEQ ID NO: 454 - protein, 1083 aa, Harmonia axyridis
MRVHFIAVDLEQVTENSYRIILTQTWNDIRPDRHSYANLLSNRVRWLLEEEKFTQIELDAIRNSCYPRGAVLGLSDDPPETTSTNSQEERPRNSKLEGKFIKNLLMYSGIPAENRPRIPKLRASRIVMRKVDDLDKILDQKINQDHTIEEIVDCVYAAALTVCGEMGVDIREVKKNKSSGPPPWKHRLEEKINEMRKKIGILQTYLNAESPSLRILKLTHRIASDAGVKAGREHFKQQMILVSEKLKQKIKILGNRIRRYNERVKRYKNNKLYHQNQQKFFRSLEDGPSEAGEPPREEAMHFFWKGIWEVEKTYDSQASWIKEAEKESSRYSSENVEITVEDIKSVLRRTNNWSSPGVDGIQNYWWKHFMATHQHLAKIFQQTLKDPTKIPHYFTQGNTIMIPKGETTQDPERYRPITCLPTVYKILTGVLTRHISRHVSKNNILAKEQGGCRGDTRGCKELLITDYVIAKQVKKKQRSISVAWVDYKKAFDSVPHSWLIKILEIYGVPQAIIDLLKYLMKTWRTNLIVNTKNEHYKTGTINIKSGIFQGDTLSPLWFCLAMNLLSQLINRQKYGYIVERSRNIKISHQMYIDDLKLYAANEEEMKKLLRIVASFTKTIGMEIGMDKCAVVHVRRGQIREGEGLAVMEDLTIPRLSAQEHYKYLGIQQALDIKMPEMKNIFREKYFTRVKKILQSKLNAKAMFMSMNRWALPCLSYSFGVIKWTAAELKELDIKTRALLTRHGIHHPHASSNRLYIRRQEGGRGLQNIEKTYNETIVSMREYFHAQNSPLLQAICRSDENLSALNLSSRERPVGGVTEVQLIREWHGKALHGRYPGNLEKNNINKKESLTYLRAGYLYPETEGRLISIQDQVVPTRSYIKNITGRNIPTDRCRRCLQGTESIQHVVSSCSLLAPTDYTERHNAMARVFHRAIAEETGLIKTAKKAYEYTPCTVLENDTYKLYWDMVITTDKPIPHNRPDIVLFDKGRRSAKIMDVTVPADDNISKAFTEKLTKYQDLAFELKTTYDLRSVVILPLIISTSGLVEAHLEEYTLMLGLQKELISTAQKQVILATTRIVRKFLSTS

SEQ ID NO: 455 - protein, 1283 aa, Thalassaphorura encarpata
MAPTARQPRRDETTLTILHPLPKRAHCCEEECEATFSGKTWSIVTTSIVRHLNATHHVVIQETVHSCSACQADIGPNPLSHECARATDHPIVDPQPIIPQDRRPVRHGDRLYVFFPIPPSLKCTEAGCTVQYQSGKQGKSIWTTTCGSLMRHLEVNHKERITHKVLICAKCTTNLGTRPLFHDCPVPDPPEPPVQLPNKCTKCPDTFATARGLTLHMRGHTRHEDLEAQMTALPEPIPGHLTINARARRIQSWNRGQDPNEDEIPIANPVAQKPVASSHKNTDSLPQEDDIEVVDLASPTPSIILPGGFMGSSSNDPSGNTDVPIDNDEYVERLIQRHLKWSPAPGGFMRDPPTLPPDDDDEIHFTEETIAATRRRLFGSGLDSPTGESESSLENDAFFTEDPTSSSHCIALERTGLIPCSSSLNPPVDGLSGHVSVEDPGRSDHVEDPSRNDHLEIPVHPNGHIQELYLPQLEALLALEYTEENFKAFELLVDQIVRDVSILVKLPPPRTYHGPGRPKDPSDPKFIQRLYRRNRRQAIRLITNGQGVKCTIPIKTVEEHFRGINTAKDWDPSVYRDCSGGRPQVDMQNFTPEEVISRMKKFENTAPGSDRLTYRHWIGVDPEGILVAAIVNVCLKFQKIPKEWKSSNTILIHKKNDLDDISNWRPISLDRTIYKIYTGLIAARLTGWISSHDVLCPDQKGFLPHDGVFEHNFVFQNRIAEAKRKKEEMCAALLDFSNAYGSIPHEALILAIKKAGAGDDLANIVADIYTNASTSYATAKDITEQITIGRGIKQGCPLSGLIFNIAVDPILKAVQGNSVDHEILAYADDFTPIAKSPARLQESINIISGFSKRLTLDLNPAKCVTLHISGQTPIGTRSTSFKLGTVSLRALEEREYVKFLGKPVGFNFVHPIADLKGYMDLGLKIAKSKLAPWQRIDALKTFFYSSLTFAMRTGQFNKTEWRVLDETLRPHLRATLNLPERSAQEYLYGSSAAGSCGIPIASEDSDLFLIDNAFKLLTSHDGIIMEMATEELFQTVINRLGKLPTPLETGYYLSGENDGEFRRSHCQIMNTWTRARLASQRLGVTWEFSDGLPSLTKDEVTIPPSHRRAVTQSIRGVLRKQRDQRLQSLPNQGKVMECVAQSKASSHFFTTGSFTRFADWRFVHRARLNLVPLFGAQPWTNAKSCRRCGLAIETLPHVLNHCVFHQAAHQRRHNAIVDRVKAAAGEKFGIMGENRSVDDSRSKPDLLLVSGRKAIIVDITIPFENRAEALKDARQEKLDKYAA

SEQ ID NO: 456 - protein, 1174 aa, Campodea augens
MNISKMKTQDNEEGSQEVTILMPGSQNTADALDTLESVPAPVVVKAKRMRWTKSMNIAVMKAYYKATDCENVKMGYRKLLLKNFQEEMPDIPATEQRICDQVRQIKNRSFLTEAELQNIKQEIKKESGGIATNDHQECDILGSTNHTDRSEVLEPELREEIDVNIVSEVLNEELKYKIQQNLFKYKTVNPCDRPHIPKVPYCGTTKKYIEEANAVLEHYETHCSNLIGVYNVIYAAAMSVSEMVNQEIKDRLSKNNNTKVNDDNIPKVPRFKIRIERKINLLRSKISRIACVLDKSSKISNRSIIRTCQEIDVDPNDRNLTTILQIHVDKLKQTIAVLGRRLRRYNRNLRKRMDNKLFSKNEKLFYSKLQTKESTSLGNDLKPPKQEEMTNFWSNIWGTGINHNAEENWIKEEERKYTHIQQKYETNISKNDFLAALKNMQNWKSPGPDKLQNYWIKVFKSMHNVLLKSFQQGLQIPESLPDFIFVGVTYMLPKTTVNTDDPKNFRPITCLSVLYKLLTKIIASKVTNHIDENNILSRNQNGCRKKSKGSKELLLIDSIICNQVKNKKRNVAIAWVDYKKAYDSVPHSWLIHVLEMYRINYDIIELMKYGMGKWTTNLVVNISEEKYQTGSILIHRGIFQGDTFSPLWFCLAMNALSGMLEKCNYGYKMNARSGFKLNHLFYMDDLKLFGTNENQIQGLLEIVSLFSSTVRMEIGLDKCGVIKVQKGKVINSGNIKLRNGMELESFDGSKSYKYLGMFQQLVNDLKEMKAILIKEYTSRTRKILRTELNSKNKIKGINTWAVPVLTYSFGILKWTNTDLDEIDRGTRKLMTLNRVHNPNSSVIRLYLSRRDGGQGLLNVKNQCLNQIINLRKYVENSTNPILSEAVKAEKIGNYTPLDLTKEEVTTPPTIDQNREHLKGMSLHGRFANVLYSADVDQETSLLWLKYGTLTGETEGFAFAIQDQVIRVRNYEKYILKTPIVNDLCRLCGTCSETIQHVTSSCPAQCQNEYLYRHNSVANIILQELLLQREFISNVIPYYKYHPEPLYLKDGVKIYYDQPILTDKHILHNRPDILLLDCIKKTAVIVDVSIPADVNLVKNEGEKIRKYSDLKIELAQIYKLKRVHIVPVVITVNGLVSKNFMKYCGMLNIKKRSTIHLMQKCVILNNCRIVRKFLC

SEQ ID NO: 457 - protein, 1165 aa, Campodea augens
MNISKMKTQDNEEGSQEVTILMPGSQNTADALDTLESVPAPVVVKAKRMRWTKSMNIAVMKAYYKATDCENVKMGYRKLLLKNFQEEMPDIPATEQRICDQVRQIKNRSFLTEAELQNIKQEIKKESGGIATNDQQECDILGSTNHTDSSEVLEPELIEEIDVNIVSEVLNEELKYKIQQNLFKYKTVNPCDRPHIPKVPYCGTTKKYIEEANAVLEHYETHCSNLIGVYNVIYAAAMSVSEMVNQEIKDRLPKNNNTKVSDDNIPKVPRFKIRIERKINLLRSKVSRIACVLDKSSKISNRSIIRICQEIDVDPNDRNLTTILQIHVDKLKQTIAVLGRRLRRYNRNLRKRMDNKLFSKNEKLFYSKLQTKESTSLGNDLKPPKQEEMTNFWSNIWGTGINHNAEENWIKEEERKYTHIQQKYETNISKNDFLAALKNMQNWKSPGPDKLQNYWIKVFKSMHNVLLKSFQQGLQIPESLPDFIFVGVTYMLPKTTVNTDDPKNFRPITCLSVLYKLLTKIIASKVTNHIDENNILSRNQNGCRKKSKGSKELLLIDSIICNQVKNKKRNVAIAWVDYKKAYDSVPHSWLIHVLEMYRINYDIIELMKYGMGKWTTNLVVNISEEKYQTGSILIHRGIFQGDTFSPLWFCLAMNALSGMLEKCNYGYKMNARSGFKLNHLFYMDDLKLFGTNENQIQGLLEIVSLFSSTVRMEIGLDKCGVIKVQKGKVINSGNIKLRNGMELESFDGSKSYKYLGMFQQLVNDLKEMKAILIKEYTSRTRKILRTELNSKNKIKGINTWAVPVLTYSFGILKWTNTDLDEIDRGTRKLMTLNRVHNPNSSVIRLYLSRRDGGQGLLNVKNQCLNQIINLRKYVENSTNPILSEAVKAEKIGNYTPLDLTKEEVTTPPTIDQNREHLKGMSLHGRFANVLYSADVDQETSLLWLKYGTLTGETEGFAFAIQDQVIRVRNYEKYILKTPIVNDLCRLCGTCSETIQHVTSSCPAQCQNEYLYRHNSVANIILQELLLQREFISNVIPYYKYHPEPLYLKDGVKIYYDQPILTDKHILHNRPDILLLDCIKKTAVIVDVSIPADVNLVKNEGEKIRKYSDLKIELAQIYKLKTVHIVPVVITVNGLVSRNFMKYCGMLSNIKKRSTIHLNAEMCHFK

SEQ ID NO: 458 - protein, 818 aa, Hormaphis cornu
MDYWMEDFISKYGKNRRRHGFSQQTEKDFDSMSRNKRRAQRFQYTQYKWNKNRADLATEIIDGSNPMRIENSPPKEEITMVYENIWSQDIHRDEELYDSTTKHDLYEPITREDIIWALKSSKSGAAGPDGIVLNQLKKLPIIKLLLLYNCMIYSKYLPKKLHQSRTTLIPKKKNQLDLVDNWRPITVSNILLRICNKIIAKRLQKIPIHSNQRGFIHIDGVFANNISLHTIIKLRRRRRLPYCVVTLDIRKAFDMVPHSSILRALRRKGIDHKTIQYIMENYRANTTTIFCCNNEISQINVCRGVKQGDPMSPIIFNILMDELIEKLNQMPGIHINNESISCLAYADDLILLSGGIKEAKDLIKTSEEFFQKRGLSLNVKKCSAIAVGKAPQKRLFTFTSSQFDIHGQPIHQMGVNDLTQYLGKKFSFMGITKCSIPNLREQIGNIISAPLKPYQKLIMIKKFLIPRYIHSLQSPKIHKKTLISADRAIRWGVKRALHLPNHIHSSTIHAPMKLGGLGVFCFLDKIPIILRNRLDRLHDQNQALNEILQESENWCRGIKKMIHPRTPSRITIDNLRGQQLNESFHGTGLAEMKNHNASNRFIDNPPKYWSGEDYVKAIQLRTNTLPTKGLPYNHGNEALCRAGCSRRESLSHVLQKCPLMHWERIKRHNFTARRLISAAKKRGWNVTEEPNIRGDDGLLKKPDLILSKDNCAIICDISIVWEAPDPLGSAYRTKQSIYSSKPFLKKVQELYPGKDLYLCPLIVGARGAWCIENKSIVEKLKLNPADIADIIATAMRGGWTIHRQFNKFIWRQENTRRV

SEQ ID NO: 459 - protein, 1021 aa, Diabrotica virgifera
MPAGETIDAPEMVNDGENQIQQNEKPSNPSPEPRQTVNITKGKKIIRKTTSSKVVQCGSARVPDEDVSFSSCGPGSPPRDVAPVLPISYSPGIHYSQVPATSTGRGVVRETSNSVPATVASQSNISSATEILAPIVLCSDSTFPLEPLAGDESMYTTFPVSQELRDYLTSVVNDLGVGDREDSLRSLCEAGVSLHDRILSCFIQRWMEQEFQPGTRSRKYRTKRSLAKKKTSNYGGQHHGRGSRAENYKKVQDLFQKNRQGVVNKILTGADINNKPIFPEIHKVENYFANTLETQSPEDGEAIVDGKEAVACVFYPFSRQDVETAKAGWSNSAPGLDGLEVGQVRATSDVTLAALFSIIFLRNVYIPSFAETRTTLIYKKGDRSEPSSYRPVGVGSALHRLMHRAISYRLRDAVTLNLNQRGFIQMDGTIANCTIMDHYIRSKRLRGAAYNVVSLDVSRAFDSVSHKSIIRALYRQGLEPRFIEYITRQITTTTTVVRSGDAWTRKINVNRGVRQGDPLSPLLFNLVIDELLDRLNSQGGGGAVEGIMVSAMAFADDIVLLEDDCRRVPTRLLETENFLQRRGMAINAKKCTAISVLTYQGKSVPRSDACFSVGGGKIPSVDGMDAFRYLGQETGATGILKPSLTNLSLWLNRLGKAPLTPDQKLVCLKDYLIPKVVYGFQNPKITGVMLRSADRLIKFFVKRTLHLNIHTPDPALYARMRDGGLGILELRHWIPSIYLRRLTKLTTTGDTICQRVLSSDLSQSLLARLRLLAGNMPVEQFWREKLIAAPTLAGLESSAENSASRCWINNKPNGWTGKDYVKAIQLRTNNLPVAGIMSNPPDQRWCRACRDKVETLSHVLQSCTAVHWERIRRHNEIVHKIANHVRSKGWSVVVEPAVRHRDGEVFKQDLIVRRGDELTVVDVQVSWERPGFNLQQAYERKKRVYDHQRFRDAAVREWPGTTVQVWPLLLGARGVWPRCNDYISDNLAIPQVLKNSCVQSCLKWGASIHSAFGRRVWRQRR

SEQ ID NO: 460 - protein, 1073 aa, Blattella germanica
MISDSGGPSLPSNDGKTIALVSCKICGKSFTRHGINIHIARSHRHSQVLIDIDKPTDSILSETVNFSPSDPIECQDNIHLNTNSSNNEKVIRNNSNASSIHLIDGSLIGTPSDSSPAVSQAQCPHCGGSFNGSKGVNIHISRSHPHIHRSTLVTNLTKNASQPLLDEQADRGSSSNSESSQPDSGFNIALNEWKTKFVRTATANDSDFDNMVQDFSHFLSTSINLLPGPRHPATKYYEARRKRRLATAEKNYNKSSNPIRASKKAREKRKCKYDYQLTQYQFYNQRRKAVRRVLDSTAPSCKIDLTKVHENFAASFSIENPHIRSNYPSKLTDVGRIELDETYDPTISKEDIAIAAHKIAVDTAPGPDHVLVRVIRNEIVYEILAIIATRMLSSGIVPRCFKTARTVLIHKAADVNILSNWRPITICSVLRRVIERVLDKHLRTFVSFNEHQRGFTNNSGTLINTSILRKVLKTTKDNKEDVTVVFLDISKAFDNIGHKHLDLTLSAEPIPAKLKDLIINLQINNTTNIQTSLGQTKAINLRRGVMQGSPLSPTLYNLATDFIFDELTELSLLQQYGKSISPQLSSLSIMGFADDTLLMGKNSETTLELLHIALQRFQEIGLQVNPQKCTGISIKRGKLVEEVLHINEKFTIKTINNQEEVRYLGVPFQDNALFDKDSTIKQLHKKLELLASSPLLKSDQKFLVLNTAICPTLIYRFQTTDLQTIPLQFLHTADKLVRSTLKDILQLPTDIPDSTLYSSCQNKGLGLFKAAWEIYLQHINACNTLLKSQNSHVLHLCTLQADISTCLQLLNITNTDLHINNHTGLIDTRKIRNELRLRETENWSHLPHKGVGIDLYKEYTPANSWIRHHRGLSCSEWREAIKMQANVSAVRTVPGRSLDGNLCRRCNREKETLGHVLGSCPYGEILRNARHHKLRSFIAEQLRRKGYTVYEEIHGIATQGSTRRIDILAFQPNSTKGYIIDPTIRFEHHTNQPAEVNAEKQNIYNPTIPYYKSQYHLQDITVIGLMVGARGTIPSLFAKFWSEFHLPKKKIYDVVTTTLRGSVQILRCHLFGP

SEQ ID NO: 461 - protein, 1073 aa, Blattella germanica
MISDSGGPSLPSNDGKTIALVSCKICGKSFTRHGINIHIARSHRHSQVLIDIDKPTDSILSETVNFSPSDPIECQDNIHLNTNSSNNEKVIRNNSNASSIHLIDGSLIGTPSDSSPAVSQAQCPHCGGSFNGSKGVNIHISRSHPHIHRSTLVTNLTKNASQPLLDEQADRGSSSNSESSQPDSGFNIALNEWKTKFVRTATANDSDFDNMVQDFSHFLSTSINLLPGPRHPATKYYEARRKRRLATAEKNYNKSSNPIRASKKAREKRKCKYDYQLTQYQFYNQRRKAVRRVLDSTAPSCKIDLTKVHENFAASFSIENPHIRSNYPSKLTDVERIELDETYDPTISKEDIAIAAHKIAVDTAPGPDHVLVRVIRNEIVYEILAIIATRMLSSGIVPRCFKTARTVLIHKAADVNILSNWRPITICSVLRRVIERVLDKHLRTFVSFNEHQRGFTNNSGTLINTSILRKVLKTTKDNKEDVTVVFLDISKAFDNIGHKHLDLTLSAEPIPAKLKDLIINLQINNTTNIQTSLGQTKAINLRRGVMQGSPLSPTLFNLATDFIFDELTELSLLQQYGKSISPQLSSLSIMGFADDTLLMGKNSETTLELLHIALQRFQEIGLQVNPQKCTGISIKRGKLVEEVLHINEKFTIKTINNQEEVRYLGVPFQDNALFDKDSTIKQLHKKLELLASSPLLKSDQKFLVLNTAICPTLIYRFQTTDLQTIPLQFLHTADKLVRSTLKDILQLPTDIPDSTLYSSCQNKGLGLFKAAWEIYLQHINACNTLLKSQNSHVLHLCTLQADISTCLQLLNITNTDLHINNHTGLIDTRKIRNELRLRETENWSHLPHKGVGIDLYKEYTPANSWIRHHRGLSCSEWREAIKMQANVSAVRTVPGRSLDGNLCRRCNREKETLGHVLGSCPYGEILRNARHHKLRSFIAEQLRRKGYTVYEEIHGIATQGSTRRIDILAFQPNSTKGYIIDPTIRFEHHTNQPAEVNAEKQNIYNPTIPYYKSQYHLQDITVIGLMVGARGTIPSLFAKFWSEFHLPKKKIYDVVTTTLRGSVQILRCHLFGP

SEQ ID NO: 462 - protein, 1073 aa, Blattella germanica
MISDSGGPSLPSNDGKTIALVSCKICGKSFTRHGINIHIARSHRHSQVLIDIDKPTDSILSETVNFSPSDPIECQDNIHLNTNSSNNEKVIRNNSNASSIHLIDGSLIGTPSDSSPAVSQAQCPHCGGSFNGSKGVNIHISRSHPHIHRSTLVTNLTKNASQPLLDEQADRGSSSNSESSQPDSGFNIALNEWKTKFVRTATANDSDFDNMVQDFSHFLSTSINLLPGPRHPATKYYEARRKRRLATAEKNYNKSSNPIRASKKAREKRKCKYDYQLTQYQFYNQRRKAVRRVLDSTAPSCKIDLTKVHENFAASFSIENPHIRSNYPSKLTDVERIELDETYDPTISKEDIAIAAHKIAVDTAPGPDHVLVRVIRNEIVYEILAIIATRMLSSGIVPRCFKTARTVLIHKAADVNILSNWRPITICSVLRRVIERVLDKHLRTFVSFNEHQRGFTNNSGTLINTSILRKVLKTTKDNKEDVTVVFLDISKAFDNIGHKHLDLTLSAEPIPAKLKDLIINLQINNTTNIQTSLGQTKAINLRRGVMQGSPLSPTLYNLATDFIFDELTELSLLQQYGKSISPQLSSLSIMGFADDTLLMGKNSETTLELLHIALQRFQEIGLQVNPQKCTGISIKRGKLVEEVLHINEKFTIKTINNQEEVRYLGAPFQDNALFDKDSTIKQLHKKLELLASSPLLKSDQKFLVLNTAICPTLIYRFQTTDLQTIPLQFLHTADKLVRSTLKDILQLPTDIPDSTLYSPCQNKGLGLFKAAWEIYLQHINACNTLLKSQNSHVLHLCTLQANISTCLQLLNITNTDLHINNHTGLIDTRKIRNELRLRETENWSHLPHKGVGIDLYKEYTPANSWIRHHRGLSCSEWREAIKMQANVSAVRTVPGRSLDGNLCRRCNREKETLGHVLGSCPYGEILRNARHHKLRSFIAEQLRRKGYTVYEEIHGIATQGSTRRIDILAFQPNSTKGYIIDPTIRFEHHTNQPAEVNAEKQNIYNPTIPYYKSQYHLQDITVIGLMVGARGTIPSLFAKFWSEFHLPKKKIYDVVTTTLRGSVQILRCHLFGP

SEQ ID NO: 463 - protein, 1088 aa, Dermanyssus gallinae
MASRDGSNTAGRLSCQICGRVCKSGAGLASHIRLTHNQREVRATSQTPNQSQTNNLILSSSENDTAASNNNFNPPSTSRVSQPNCKCPSSTCLKVFKSKSGLNLHRRRAHPDEYNENILAPPSKKARWNPQDRELLATLEADFILDNDNETPREIDHLLATNFNSRTPGAIRGQRNSQAHKDLVEDLLKKRPLLDSNLDGSELPEPSRPRYSESDGPYNPSQKDIIISKIQALTNTFPKRNIISTDLTHLSNIICSGENHTIALNEFLNKHFTHTVRRRAFRETPSTEARVSKRQQRRQDYATTQKLFSQNRSKCAHEVLDGKHTIHNMQATEVVEHWANTMTQPPPEPLPCPVYTPNSDLFEVSLPISLKETHVALRGPSKALGLDGICLSSLRKLPLEVVCCILNILLISDIASAHETARLAFIPKINNATSPSDLRPLSISSYLQRTLNKILSRRLQNSIKLLPIHRAFLPYKGTFENLAVLDGILNDAKSAGRELRLASIDLRKAFDMVSHDSVLWSLRTRGYPEVFINYIERLYLSSKTLIEFGQECRTFRPTRGVRQGDPLSPLLFNLVLDDILSKLDKTNIGYQLTDDFRLMGLAFADDLILLASTKSTLQRLLNIADPLLKSRGLEINTNKSFTISHLFNRKEGKGFINTVPEFNVGDRQLPAKGMSDRWRYLGVDFDSNGRVDSTRDILLNLLNRLTIAPLKPHQRLIFLKDFLIPRLLYKLVSGPRPSYALLSDLDKEIRKVVKSKWLKLENSVPNAYLYTHTAHGGLDIPCLQTFIPRLRLSRLTALQHSTHLGVQWMLTTEHFKKDLAKTRLLCERLGTSIETATQETDYWSQQLHNTFDGAHFKKAHETPFVHYWIKGMPYLSGKEYLNLLKLRINALPTRARLARGRPGYNKRCRHGCHAPETLAHVAQMCDTTHKQTIKRHDDVCDRVARLLRERGHEVVRERVFRRPGAPGLKPDLVITTPTEVWVLDAEVCGPNRDLAKARQDKIAKYDVEFLRAALPDPQKPRRFGSITISMSGVWDSESARTLLGLGVTKRNLMDLTVLTLQGTLRIYRSHRVHKSGGYHQARTRTTDS

SEQ ID NO: 464 - protein, 1081 aa, Dermanyssus gallinae
MASRDGSNTAGRLSCQTCGRVCKSGAGLASHIRLTHNQREVRATSQTPNRSQTNNLILSSSQNDTAASNNNFNPPSTSRVAQPNCKCPSSTCLKVFNSKSGLNLHRRRAHPDEYNENILAPPSKKARWNPQDRELLATLEADFIFDNNNETLREIDHLLATNFNSRTPGAIRGQCNSQAHKDLVEDLLKKRSLLDSNLDGSELPERSRPRYSESDGPYNPSQKDIIISKIQALTNTFPKRNKISTDLTHLSNIICSGEDHIIALNEFLNKHFTHTVRRRAFRETPSTEARVSKRQQRRQDYATTQKLFSQNRSKCAHEVLDGKHTIHNMQATEVVEHWATTMTQPPPEPLPCPVYTPNSDLFEVSLPISLKETHVALRGPSKALGLDGICLSSLRKLPLEVVCCILNILIISDIASAHETARLAFIPKINNATSPSDLRPLSISSYLQRTLNKILSRRLQNSIKLLPIQRAFLPYNGTFENLAVLDGILNDAKSVGRELRLASIDLRKAFDMVSHDSVLWSLRTRGYPEVFINYIERLYLSSKTLIEFRPTRGVRQGDPLSPLLFNLVLDDILSKLDKTNIGYQLTDDFRLMGLAFADDLILLASTKSTLQRLLNIADPLLKSRGLEIKTNKSFTISHLFNRKEGKGFINTVSEFNVGDRQLPAKGMSDRWRYLGVDFDSNGRVDSTKDILLNLLNRLTIAPLKPHQRLIFLKDFLIPRLLYKLVSGPRPSYALLSDLDKEIRKVVKSKWLKLENSVPNAYLYTHTAHGGLDIPCLQTFIPRIRLSRLTALQHSTHLGVQWMLTTEHFKKDLAKTRLHCERLGTSIETATQETDYWSQQLHNTFDGSHFKKAHETPFVHYWIKGMPYLSGKEYLNLLKLRINALPTRARLARGRPGYNKRCRHGCHAPETLTHVAQMCDITHKQTIKRHDDVCDRVARLLRERGHEVVRERVFRRPGAPGLKPDLVITTPTEVWVLDAEVCGPNRDLAKARQDKIAKYDVEFLRAALPYPQKPRRFGSITISMSGVWDSESARTLLGLGITKRNLMDLTVLTLQGTLRIYRSHRIHKSGGYHQARTRTTDS

SEQ ID NO: 465 - protein, 1088 aa, Dermanyssus gallinae
MASRDGSNTAGRLSCQTCGRVCKSGAGLASHIRLTHNQREVRATSQTPNQSQTNNLILSSSQNDTAASNNNFNPPSTSRVSQPNCKCPSSTCLKVFKSKSGLNLHRRRAHPDEYNENILAPPSKKARWNPQDRELLATLEADFILDNNNETPREIDHLLATNFNSRTPGAIRGQRNSQAHRDLVEDLLKKRSLLDSNLDGSELPEPSRPRYSESDGPYNPCQKDIIISKIQALTNTFPKRNIISTDLTHLSNIICSGENHTIALNEFLNKHFTHTVRRRAFRETPSTEAQVSKRQQRRQDYATTQKLFSQNRSKCAHEVLDGKHTIHNMQATEVVEHWANTMTQPPPEPLPCSVYTPNSDLFEVSLPISLKETHVALRGPSKALGLDGICLSSLRKLPLEVVCCILNILLISDIASAHETARLAFIPKINNATSPSDLRPLSISSYLQRTLNKILSRRLQNSIKLLPIQRAFLPYNGTFENLAVLDGILNDAKSAGRELRLASIDLRKAFDMVSHDSVLWSLRTRGYPEVFINYIERLYLSSKTLIEFGQECRTFRPTRGVRQGDPLSPLLFNLVLDDILSKLDKTNIGYQLTDDFRLMGLAFADDLILLASTKSTLQRLLNIADPLLKSRGLEINTNKSFTISHLFNRKEGKGFINTVPEFNVGDRQLPAKGMSDRWRYLGVDFDSNGRVDSTRDILLNLLNRLTIAPLKPHQRLIFLKDFLIPRLLYKLVSGPRPSYALLSDLDKEIRKVVKSKWLKLENSVPNAYLYTHTAHGGLDIPCLQTFIPRLRLSRLTALQHSTHLGVQWMLTTEHFKKDLAKTRLLCERLGTSIETATQETDYWSQQLHNTFDGAHFKKAHETPFVHYWIKGMPYLSGKEYLNLLKLRINALPTRARLARGRPGYNKRCRHGCHAPETLAHVAQMCDTTHKQTIKRHDDVCDRVARLLRERGHEVVRERVFRRPGAPGLKPDLVITTPTEVWVLDAEVCGPNRDLAKARQDKIAKYDVEFLRAALPDPQKPRRFGSITISMSGVWDSESARTLLGLGVTKRNLMDLTVLTLQGTLRIYRSHRVHKSGGYHQARTRTTDS

SEQ ID NO: 466 - protein, 1088 aa, Dermanyssus gallinae
MASRDGSNTAGRLSCQTCGRVCKSGAGLASHIRLTHNQREVRATSQPPNRSQTNNLILSSSQNDTAASYNNFNPPSTSRVSQPNCKCPSSTCLKVFNSKSGLNLHRRRAHPDEYNESILAPPSKKARWNPQDRELLATLEADFILDNNNETPREIDHLLATNFNTRTPGAIRGQRNSQAHKDLVEDLLKKRSLLDSNLDGSELPERSRPRYSESDGPYNPSQKDIIISKIQALTNTFPKRNIISTDLTHLSNIICSGEDHTIALNEFLNKHFTHTVRRRAFRETPSTEARVSKRQQRRQDYATTQKLFSQNRSKCAHEVLDGKHTIHNMQATEVVEHWANTMTQPPPEPLPCPVYTPNSDLFEVSLPISLKETHVALRGPSKALGLDGICLSSLRKLPLEVVCCTLNILIISDIASAHETARLAFIPKINNATSPSDLRPLSISSYLQRTLNKILSRRLQNSIKLLPIQRAFLPYNGTFENLAVLDGILNDAKSAGRELRLASIDLRKAFDMVSHDSVLWSLWTRGYPEVFINYIERLYLSSKTLIEFGQECRTFRPTRGVRQGDPLSPLLFNLVLDDILSKLDKTNIGYQLTDDFRLMGLAFADDLILLASTKSTLQRLLNIADPLLKSRGLEINTNKSFTISHLFNRKEGKGFINTVSEFNVGDRQLPAKGMSDRWRYLGVDFYSNGRVDSTKDILLNLLNRLTIAPLKPHQRLIFLKDFLIPRLLYKLVSGPRPSYALLSDLDKEIRKVVKSKWLKLENSVPNAYLYTHTAHGGLDISCLQTFIPRIRLSRLTALQHSTHLGVQWMLTTEHFKKDLAKTRLLCKRLGTSIETATQETDYWSQQLHNTFDGAHFKKAHETPFVHYWIKGMPYLSGKEYLNLLKLRINALPTRARLARGCPGYNKRCRHGCHAPETLAHVAQMCDITHKQTIKRHDDVCDRVARLLRERGHEVVRERVFRRPGAPGLKPDLVITTPTEVWVLDAEVCGPNRDLAKARQDKIAKYDVEFLRAALPYPQKPRRFGSVTISMSGVWDSESARTLLGLGVTKRNLMDLTVLTLQGTLRIYRSHRVHKSGGYHQARTRTTDS

SEQ ID NO: 467 - protein, 1114 aa, Dermanyssus gallinae
MQSNRKLFLFVLAYIRMYECIYIKTTMASRDGSNTAGRLSCQTCGRVCKSGAGLASHIRLTHNQREVRATSQTPNRSQTNNLILSSSQNDTAASNNNFNPLSTPRVSQPNCKCPSSTCLKVFNSKSGLNLHRRRAHPDEYNENILAPPSKKARWNPQDRELLATLEADFILDNNNKTPREIDHLLATNFKSRTPGAIRGQRNSQAHKDLVEDLLKKRSLLDSNLDGSEFPERSRPRYSESDGPYNPSQKDIIISKIQALTNTFPKRNIISTDLTHLSNIICSGEDHTIALNEFLNKHFTHTVRRRAFRETPSTVARVSKRQQRRQDYATTQKLFSQNRSKCAHEVLDGKHTIHNMQATEVVEHWANTMTQPPPEPLPCPVYTPNSDLFEVSLPISLKETHVALRGPSKALGLDGICLSSLRKLPLEVVCCILNILLINDIASAHETARLAFIPKINNATSPSDLRPLSISSYLQRTLNKILSRRLQNPIKLLPIQRAFLSYNGTFENLAVLDGILNDAKSAGRELRLASIDLRKAFDMVSHDSVLWSLRTRGYPEVFINYIERLYLSSKTLIEFGQECRTFRPTRGVRQGDPLSPLLFNLVLDDILSKLDKTNIGYQLTDDFRLMGLAFADDLILLASTKSTLQRLLNIADPLLKSRGLEINTNKSFTISHLFNRKEGKNFINAVSEFNVRDRQLPARGMSDRWRYLGVDFDSNGRVDSTKDILLSLLKRLTIAPLKPHQRLIFLKDFLIPRLLYKLVSGPRPSYALLSDLDKEIRKVVKSKWLKLENSVPNACLYTHTAHGGLDIPCLQTFIPRIRLSRLTALQHSTHLGVQWMLTTEHFRKDLAKTRLLCERLGTSIETATQETDYWSQQLHNTFDGAHFKKAHETPFVHYWIKGMPYLSGKEYLNLLKLRINALPTRARLARGRPGYNKRCRHGCHAPETLAHVAQMCDITHKQTINRHDDVCDRVARLLRERGHEVVSERVFRRPGAPGLKPDLVITTPTEVWVLDAEVCGPKWDLAKARQDKIAKYDVEFLRAVLPYPQKPRRFGSITISMSGVWDSESARTLLGLGVTKRNLMDLTVLTLQGTLRIYRSHRVHKSGGHHQARTRTTDS

SEQ ID NO: 468 - protein, 760 aa, Dermanyssus gallinae
MQATEVVEHWANTMTQPPPEPLPCPVYTPNSDLFEVSLPISLKETHVALRGPSKALGLDGICLSSLRKLPLEVVCCILNILLISDIASAHETARLAFIPKINNATSPSDLRPLSISSYLQRTLNKILSRRLQNSIKLLPIQRAFLPYNGTFENLAVLDGILNDAKSAGRELRLASIDLRKAFDMVSHDSVLWSLRTRGYPEVFINYIERLYLSSKTLIEFGQECRTFRPTRGVRQGDPLSPLLFNLVLDDILSKLDKTNIGYQLTDDFRLMGLAFADDLILLASTKSTLQRLLNIADPLLKSRGLEINTNKSFTISHLFNRKEGKGFINTVSEFNVGDRQLPAKGMSDRWRYLGVDFDSNGRVDSTKDILLNLLNRLTIAPLKPHQRLIFLKDFLIPRLLYKLVSGPRPSYALLSDLDKEIRKVVKSKWLKLENSVPNAYLYTHTAHGGLDIPCLQTFIPRIRLSRLTALQHSTHLGVQWMLTTEHFKKDLAKTRLLCERLGTSIETATQETDYWSQQLHNTFDGAHFKKAHETPFVHYWIKGMPYLSGKEYLNLLKLRINALPTRARLARGRPGYNKRCRHGCHAPETLAHVAQMCDITHKQTIKRHDDVCDRVARLLRERGHEVVRERVFRRPGAPGLKPDLVITTPTEVWVLDAEVCGPNRDLAKARQDKIAKYDVEFLRAALPYPQKPRRFGSITISMSGVWDSESARTLLGLGVTKRNLMDLTVLTLQGTLRIYRSHRVHKSGGYHQARTRTTDS

SEQ ID NO: 469 - protein, 760 aa, Dermanyssus gallinae
MQATEVVEHWANTMTQPPPEPLPCPVYTPNSDLFEVSLPISLKETHVALRGPSKALGLDGICLSSLRKLPLEVVCCILNILLISDIASAHETARLAFIPKINNATSPSDLRPLSISSYLQRTLNKILSRRLQNSIKLLPIQRAFLPYNGTFENLAVLDGILNDAKSAGRELRLASIDLRKAFDMVSHDSVLWSLRTRGYPEVFINYIERLYLSSKTLIEFGQECRTFRPTRGVRQGDPLSPLLFNLVLDDILSKLDKTNIGYQLTDDFRLMGLAFADDLILLASTKSTLQRLLNIADPLLKSRGLEINTNKSFTISHLFNRKEGKGFINTVPEFNVGDRQLPAKGMSDRWRYLGVDFDSNGRVDSTRDILLNLLNRLTIAPLKPHQRLIFLKDFLIPRLLYKLVSGPRPSYALLSDLDKEIRKVVKSKWLKLENSVPNAYLYTHTAHGGLDIPCLQTFIPRLRLSRLTALQHSTHLGVQWMLTTEHFKKDLAKTRLLCERLGTSIETATQETDYWSQQLHNTFDGAHFKKAHETPFVHYWIKGMPYLSGKEYLNLLKLRINALPTRARLARGRPGYNKRCRHGCLAPETLAHVAQMCDTTHKQTIKRHDDVCDRVARLLRERGHEVVRERVFRRPGAPGLKPDLVITTPTEVWVLDAEVCGPNRDLAKARQDKIAKYDVEFLRAALPDPQKPRRFGSITISMSGVWDSESARTLLGLGVTKRNLMDLTVLTLQGTLRIYRSHRVHKSGGYHQARTRTTDS

SEQ ID NO: 470 - protein, 760 aa, Dermanyssus gallinae
MQATEVVEHWANTMTQPPPEPLPCPVYTPNSDLFEVSLPISLKETHVALRGPSKALGLDGICLSSLRKLPLEVVCCILNILIISDIASAHETACLAFIPKINNATSPSDLRPLSISSYLQRTLNKILSRRLQNSIKLLPIQRAFLPYNGTFENLAVLDGILNDAKSAGRELRLGSIDLRKAFDMVSHDSVLWSLRTRGYPEVFINYIERLYLSSKTLIEFGQECRTFRPTRGVRQGDPLSTLLFNLVLDDILSKLDKTNIGYQLTDDFRLMGLAFADDLILLASTKSTLQRLLNIADPLLKSRGLEINTNKSFTISHLFNRKEGKGFINTVSEFNVGDRQLPAKGMSDRWRYLGVDFDSNGRVDSTKDILLNLLNRLTIAPLKPHQRLIFLKDFLIPRLLYKLVSGPRPSYALLSDLDKEIRKVVKSKWLKLENSVPNAYLYTHTAHGGLDIPCLQTFIPRIRLSRLTALQHSTHLGVQWMLTTEHFKKDLAKTRLLCERLGTSIETATQETDYWSQQLHNTFDGAHFKKAHETPFVHYWIKGMPYLSGKEYLNLLKLRINALPTRARLARGRPGYNKRCRHGCHAPETLAHVAQMCDITHKQTIKRHDDVCDRVARLLRERGHEVVRERVFRRPGAPGLKPDLVITTPTEVWVLDAEVCGPNRDLAKARQDKIAKYDVEFLRAALPYPQKPRRFGSITISMSGVWDSESARTLLGLGVTKRNLMDLTVLTLQGTLRIYRSHRIHKSGGYHQARTRTTDS

SEQ ID NO: 471 - protein, 760 aa, Dermanyssus gallinae
MQATEVVEHWANTMTQPPPEPLPCPVYTPNSDLFEVSLPISLKETHVALRGPSKALGLDGICLSSLRKLPLEVVCCILNILLISDIASAHETARLAFIPKINNATSPSDLRPLSISSYLQRTLNKILSRRLQNSIKLLPIQRAFLPYNGTFENLAVLDGILNDAKSAGRELRLASIDLRKAFDMVSHDSVLWSLRTRGYPEVFINYIERLYLSSKTLIEFGQECRTFRPTRGVRQGDPLSPLLFNLVLDDILSKLDKTNIGYQLTDDFRLMGLAFADDLILLASTKSTLQRLLNIADPLLKSRGLEINTNKSFTISHLFNRKEGKGFINTVPEFNVGDRQLPAKGMSDRWRYLGVDFDSNGRVDSTRDILLNLLNRLTIAPLKPHQRLIFLKDFLIPRLLYKLVSGPRPSYALLSDLDKEIRKVVKSKWLKLENSVPNAYLYTHTAHGGLDIPCLQTFIPRLRLSRLTALQHSTHLGVQWMLTTEHFKKDLAKTRLLCERLGTSIETATQETDYWSQQLHNTFDGAHIKKAHETPFVHYWIKGMPYLSGKEYLNLLKLRINALPTRARLARGRPGYNKRCRHGCHGPETLAHIAQMCDTTHKQTIKRHDDVCDRVARLLRERGHEVVRERVFRRPGAPGLKPDLVITTPTEVWVLDAEVCGPNRDLAKARQDKIAKYDVEFLRAALPDPQKPRRFGSITISMSGVWDSESARTLLGLGVTKRNLMDLTVLTLQGTLRIYRSHRVHKSGGYHQARTRTTDS

SEQ ID NO: 472 - protein, 760 aa, Dermanyssus gallinae
MQATEVVEHWANTMTQPPPEPLTCPVYTPNSDLFEVSLPISLKETHVALRGPSKALGLDGICLSSLRKLPLEVVCCILNILIISDIASAHETARLAFIPKINNATSPSDLRPLSISSYLQRTLNKILSRRLQNSIKLLPIQRAFLPYNGTFENLAVLEGILNDAKSAGRELRLASIDLRKAFDMVSHDSVLWSLRTRGYPEVIINYIERLYLSSKTLIEFGQECRTFRPTRGVRQGDPLSPLLFNLVLDDILSKLDKTNIGYQLTDDFRLMGLAFADDLILLASTKSTLQRLLNIADPLLKSRGLEINTNKSFTISHLFNRKEGKGFINTVSEFNVGDRQLPAKGMSDRWRYLGVDFDSNGRVDSTKDILLNLLNRLTIAPLKPHQRLIFLKDFLIPRLLYKLVSGPRSSYALLSDLDKEIRKVVKSKWLKLENSVPNAYLYTHTAHGGLDIPCLQTFIPRIRLSRLTALQHSTHLGVQWMLTTEHFKKDLAKTRLLCERLGTSIETATQETDYWSQQLHNTFDGAHFKKAHETPFVHYWIKGMPYLSGKEYLNLLKLRINALPTRARLARGRPGYNKRCRHGCHAPETLAHVAQMCDITHKQTIKRHDDVCDRVARLLRERGHEVVRERVFRRPGAPGLKPDLVITTPTEVWVLDSEVCGPNRDLAKARQDKIAKYDVEFLRAALPYPQKPRRFGSITISMSGVWDSESARTLLGLGVTKRNLMDLTVLTLQGTLRIYRSHRIHKSGGYHQARTRTTDS

SEQ ID NO: 473 - protein, 760 aa, Dermanyssus gallinae
MQATEVVEHWANTMTQPPPEPLPCPVYTPNSDLFEVSLPISLKETHVALRGPSKALGLDGICLSSLRKLPLEVVCCILNILIISDIASAHETARLAFIPKINNATSPSDLRPLSISSYLQRTLNKILSRRLQNSIKLLPIQRAFLPYNGTFENLAVLDGILNDAKSAGRELRLASIDLRKAFDMVSHDSVLWSLRTRGYPEVFINYIERLYLSSKTLIEFGQECRTFRPTRGVRQGDPLSPLLFNLVLDDILSKLDKTNIGYQLTDDFRLMGLAFADDLILLASTKSTLQRLLNIADPLLKSRGLEINTNKSFTISHLFNRKEGKGFINTVSEFNVGDRQLPAKGMSDRWRYLGVDFDSNGRVDSTKDILLNLLNRLTIAPLKPHQRLIFLKDFLIPRLLYKLVSGPRPSYALLSDLDKEIRKVVKSKWLKLENSVPNAYLYTHTAHGGLDIPCLQTFIPRIRLSRLTALQHSTHLGVQWMLTTEHFKKDLAKTRLLCERLGTSIETATQETDYWSQQLHNTFDGAHFKKAHETPFVHYWIKGMPYLSGKEYLNLLKLRINALPTRARLARGRPGYNKRCRHECHAPETLAHVAQMCDITHKQTIKRHDDVCDRVARLLRERGHEVVRERVFRRPGAPGLKPDLVITTPTEVWVLDAEVCGPNRDLAKARQDKIAKYDVEFLRAALPYPQKPRRFGSITISMSGVWDSESARTLLGLGVTKRNLMDLTVLTLQGTLRIYRSHRIHKSGGYHQARTRTTDS

SEQ ID NO: 474 - protein, 1088 aa, Dermanyssus gallinae
MASRDGSNTAGRLSCQTCGRVCKSGAGLASHIRLTHNQREVRATSQTPNQSQTNNLILSSSQNDTAASNNNFNPPSTSRVSQPNCKCPSSTCLKVFKSKSGLNLHRRRAHPDEYNENILAPPSKKARWNPQDRELLATLEADFILENNNETPREIDHLLATNFNSRTPGAIRGQRNSQAHKDLVEDLLKKRSLLDSNLDGSELPEPSRPRYSESDGPYNPSQKDIIISKIQALTNTFPKRNIISTDLTHLSNIICSGENHTIALNEFLNKHFTHTVRRRAFRETPSTEARVSKRQQRRQDYATTQKLFSQNRSKCAHEVLDGKHTIHNMQATEVVEHWANTMTQPPPEPLPCPVYTPNSDLFEVSLPISLKETHVALRGPSKALGLDGICLSSLRKLPLEVVCCILNILLISDIASAHETARLAFIPKINNATSPSDLRPLSISSYLQRTLNKILSRRLQNSIKLLPIQRAFLPYNGTFENLAVLDGILNDAKSAGRELRLASIDLRKAFDMVSHDSVLWSLRTRGYPEVFINYIERLYLSSKTLIEFGQECRTFRPTRGVRQGDPLSPLLFNLVLDDILSKLDKTNIGYQLTDDFRLMGLAFADDLILLASTKSTLQRLLNIADPLLKSRGLEINTNKSFTISHLFNRKEGKGFINTVPEFNVGDRQLPAKGMSDRWRYLGVDFDSNGRVDSTRDILLNLLNRLTIAPLKPHQRLIFLKDFLIPRLLYKLVSGPRPSYALLSDLDKEIRKVVKSKWLKLENSVPNAYLYTHTAHGGLDIPCLQTFIPRLRLSRLTALQHSTHLGVKWMLTTEHFKKDLAKTRLLCERLGTSIETATQETDYWSQQLHNTFDGAHFKKAHETPFVHYWIKGMPYLSGKEYLNLLKLRINALPTRARLARGRPGYNKRCRHKCHAPETLAHVAQMCDTTHKQTIKRHDDVCDRVARLLRERGHEVVRERVFRRPGAPGLKPDLVITTPTEVWVLDAEVCGPNRDLAKARQDKIAKYDVEFLRAALPDPQKPRRFGSITISMSGVWDSESARTLLGLGVTKRNLMDLTVLTLQGTLRIYRSHRVHKSGGYHQARTRTTDS

SEQ ID NO: 475 - protein, 1088 aa, Dermanyssus gallinae
MASRDGSNTAGRLSCQTCGRVCKSGAGLASHIRLTHNQREVRATSQTPNRSQTNNLILSSSQNDTAASNNNFNPPSTSRVAQPNCKCSSSTCLKVFNSKSGLNLHRRRAHPDEYIENILAPPSKKARWNPQDRELLATLEADFILDNNNETLREIDHLLATNFNSRTPGATRGQRNSQAHKDLVEDLLKKRSLLDSNLDGSELPERSRPRFSESDGPYNPSQKDIIISKIQALTNTFPKRNKISTDLTHLSNIICSGEDHTIALNEFLNKHFTHTVRRRAFRETPSTEARVSKRQQRRQDYATTQKLFSQNRSKCAHEVLDGKHTIHNMQATEVVEHWATTMTQPPPEPLPCPVYTPNSDFFEVSLPISLKETHVALRGPSKVLGLDGICLSSLRKLPLEVVCCILNILIISDISSAHETARLAFIPKINNATSPSDLRPLSISSYLQRTLNKILSRRLQNSIKLLPIQRAFLPYNGTFENLAVLDGILNDAKSAGRELRLASIDLRKAFDMVSHDSVLWSLQTRGYPEVFINYIERLYLSSKTLIEFGQVGRTFRPTRGVRQGDPLSPLLFNLVLDDILSKLDKTNIGYQLTDDFRLMGLAFADDLILLASTKSTLQRLLNIADPLLKSRGLEINTNKSFTISHLFNRKEGKGFINTVSEFNVGDRQLPAKGMSDRWRYLGVDFDSNGRVDSTKDILLNLLNRLTIAPLKPHQRLIFLKDFLIPRLLYKLVSGPRPSYALLSDLDKEIRKVVKSKWLKLENSVPNAYLYTHTAHGGLDIPCLQTFIPRIRLSRLTALQHSTHLGVQWMLTTEHFKKDLAKTRLHCERLGTSIETATQETDYWSQQLHNTFDGAHFKKAHETPFVHYWIKGMPYLSGKEYLNLLKLRINALPTRARLARGRPGYNKRCRHGCHAPDTLAHVAQMCDITHKQTIKRHDDVCDRVARLLRERGHEVVRERVFRRPGAPGLKPDLVITTPTEVWVLDAEVCGPNRDLAKARQDKIAKYDVEFLRAALPYPQKPRRFGSITISMSGVWDSESARTLLGLGVTKRNLMDLTVLTLQGTLRIYRSHRIHKSGGYHQARTRTTDS

SEQ ID NO: 476 - protein, 730 aa, Dermanyssus gallinae
MQATEVVEHWANTMTQPPPEPLPCPVYTPNSDLFEVALPISLKETHAALRGPSKALGLDGICLSSLRKLPLEVVCCILNILIISDIASAHETARLAFIPKINNATSPSDLRPLSISSYLQRTLNKILSRRLQNSIKLLPIQRAFLPYNGTFENLAVLDGILNDAKSAGRELRLASIDLRKAFDMVSHDSVLWSLRTRGYPEVFINYIERLYLSSKTLIEFGQECRTFRPTRGVRQGDPLSPLLFNLVLDDILSKLDQTNIGYQLTDDFRLMGLAFADDLILLASTKSTLQRLLNIADPLLKSRGLEINTNKSFTISHLFNRKEGKGFINTVSEFNVGDRQLPAKGMSDRWRYLGVDFDSNGRVDSTKDILLNLLNRLTIAPLKPHQRLIFLKDFLIPRLLYKLVSGPRPSYALLSDLDKEIRKVVKSKWLKLENSVPNAYLYTHTAHGGLDIPCLQTFIPRIRLSRLTALQHSTHLGVQWMLTTEHFKKDLAKTRLLCERLGTSIETATQETDYWSQQLHNTFDGAHFKKAHETPFVHYWIKGMPYLSGKEYLNLLKLRINALPTRARLARGRPGYNKRCRHGCHAPETLAHVAQMCDITHKQTIKRHDDVCDRVARLLRERGHEVVRERVFRRPGAPGLKPDLVITTPTEVWVLDAEVCGPNRDLAKARQDKIAKYDVEFLRAALPYPQKPRRFGSITISMSGVWDSESANQRSWGSASRRGILWISPF

SEQ ID NO: 477 - protein, 760 aa, Dermanyssus gallinae
MQTTKVVEHWANTMTQPPPEPLPCPVYTPNSDLFEVSLPISLKETHVALRGPSKVLGLDGICLSSLRKLPLEVVCCILNILLISDIASAHETARLAFIPKINNATSPSDLRPLSISSYLQRTLNKILSRRLQNSIKLLPIQRAFLPYNGTFENIAVLDGILNDAKSAGRELRLASIDLRKAFDMVSHDSVLWSLRTRGYPEVFINYIERLYLSSKTLIEFGQECRTFRPTRGVRQGDPLSPLLFNLVLDDILSKLDKTNIGYQLTDDFRLMGLACADDLILLVSTKSTLQRLLNIADPLLKSRGLEINTNKSFTVSHLFNRKEGKGFINTVSEFNVGDRQLPAKGMSDRWRYLGVDFDSNGRVDSTKDILLNLLNRLTIAPLKPHQRLIFLKDFLIPRLLYKLVSGPRPSYALLSDLDKEIRKVVKSKWLKLENSVPNAYLYTHTAHGGLDIPCLQTFIPRIRLSRLTALQHSTHLGVQWMLTTEHFKKDLAKTRLLCERLGTSIETATQETDYWSQQLHNTFDGAHFKKAHETPFVHYWIKGMPYLSGKEYLNLLKLRINALPARARLARGHPGYNKRCRHGCHAPETLAHVAQMCDITHKQTIKRHDDVCDRVARLLRERGHEVVRERVFRRPGAPGLKPDLVITTPTEVWVLDAEVCGPNRDLAKARQDKIAKYDVKFLRAALPYPQKPRRFGSITISRSGVWDSESARTLLGLGVTKRNLMDLTVLTLQGTLRIYRSHRVHKSGGYHQARTRTTDS

SEQ ID NO: 478 - protein, 1088 aa, Dermanyssus gallinae
MASRDGSNTAGRLSCQTCGRVCKSGAGLASHIRLTHNQREVRATSQTPNRSQTNNLILSSSQNDTAASNDNFSPPSTSRVSQPNCKCPSSTCLKVFNSKSGLNLHRRRAHPDEYNENILAPPSKKARWNPQDRELLATLEADFILDNNNETPREIDHLLATNFNSRTPGAIRGQRNSQAHKDLVEDLLKKRSLLDSNLDGSELPERSRPRYSESDGPYNPSQKDIIISKIQALTNTFPKRNIISTDLTHLSNIICSGEDHTIALNEFLNKHFTHTVRRRAFRETPSTEARVSKRQQRRQDYATTQKLFSQNRSKCAHEVLDGKHTIHNMQATEVVEHWANTMTQPPPEPLPCPVYTPNSDLFEVSLPISLKETHAALRGPSKALGLDGICISSLRKLPLEVVCCILNILIISDIASAHETARLAFIPKINNATSPSDLRPLSISSYLQRTLNKILSRRLQNSIKLLPIQRAFLPYNGTFENLAVLDDILNDAKSAGRELRLASIDLRKAFDMVSHDSVLWSLRTRGYPEVFINYIERLYLSSKTLIEFGQECRTFRPTRDVRQGDPLSPLLFNLVLDDILSKLDQTNIGYQLTDDFRLMGLAFADDLILLASTKSTLQRLLNIADPLLKSRGLEINTNKSFTISHLFNRKEGKGFINTVSEFNVGDRQLPAKGMSDRWRYLGVDFDSNGRVDSTKDILLNLLNRLTIAPLKPHQRLIFLKDFLIPRLLYKLVSGPRPSYALLSDLDKEIRKVVKSKWLKLENSVPNAYLYTHTAHGGLDIPCLQTFIPRIRLSRLTALQHSTHLGVQWMLTTEHFKKDLAKTRLLCERLGTSIETATQETDYWSQQLHNTFDGAHFKKAHETPFVHYWIKGMPYLSGKEYLNLLKLRINALPTRARLARGRPGYNKRCRHGCHAPETLAHVAQMCDITHKQTIKRHDDVCDRVARLLRERGHEVVRERVFRRPGAPGLKPDLVITTPTEVWVLDAEVCGPNRDLAKARQDKIAKYDVEFLRAALPYPQKPRRFGSITISMSGVWDSESARTLLGLGVTKRNLMDLTVLTLQGTLRIYRSHRIHKSGGYHQARTRITDS

SEQ ID NO: 479 - protein, 1147 aa, Dermanyssus gallinae
MHIFDCFTICLRRVPNYKCQLFISGTLRADIYVYIYIYTCIYIYIYIYIYRYICIYIYIYIYMYIYIYIYIYIYIYIYIYIYIYIYIYIYISSRDGSNTAGRLSCQTCGRVCKSGAGLASHIRLTHNQREVRATSQTPNQSQTNNLILSSSQNDTAASNNNFNPPSTSRVSQPNCKCPSSTCLKVFKSKSGLNLHRRRAHPDEYNENILAPPSKKARWNPQDRELLATLEADFILDNNNETPREIDHLLATNFNSRTPGAIRGQRNSQAHKDLVKDLLKKRSLLDSNLDGSELPEPSRPRYSESDGPYNPSQKDIIISKIQALTNTFPKRKIISTDLTHLSNIICSGENHTIALNEFLNKHFTHTVRRRAFRETPSTEARVSKRQQRRQDYATTQKLFSQNRSKCAHEVLDGKHTIHNMQATEVVEHWANTMTQPPPEPLPCPVYTPNSDLFEVSLPISLKETHVALRGPSKALGLDGICLSSLRKLPLEVVCCILNILLISDIASAHETARLAFIPKINNATSPSDLRPLSISSYLQRTLNKILSRRLQNSIKLLPIQRAFLPYNGTFENLAVLDGILNDAKSAGRELRLASIDLRKAFDMVSHDSVLWSLRTRGYPEVFINYIERLYLSSKTLIEFGQECRTFRPTRGVRQGDPLSPLLFNLVLDDILSKLDKTNIGYQLTDDFRLMGLAFADDLILLASTKTTLQRLLNIADPLLKSRGLEINTNKSFTISHLFNRKEGKGFINTVPEFNVGDRQLPAKGMSDRWRYLGVDFDSNGRVDSTRDILLNLLNRLTIAPLKPHQRLIFLKDFLIPRLLYKLVSGPRPSYALLSDLDKEIRKVVKSKWLKLENSVPNAYLYTHTAHGGLDIPCLQTFIPRLRLSRLTALQHSTHLGVQWMLTTEHFKKDLAKTRLLCERLGTSIETATQETDYWSQQLHNTFNGAHLKKAHETPFVHYWIKGMPYLSGKEYLNLLKLRINALPTRARLARGRPGYNKRCRHGCHAPETLAHVAQMCDTTHKQTIKRHDDVCDRVARLLRERGHKVVRERVFRRPGAPGLKPDLVITTPTEVWVLDAEVCGPNRDLAKARQDKIAKYDVEFLRAALPDPQKPRRFGSITISMSGVWDSESARTLLGLGVTKRNLWISPF

SEQ ID NO: 480 - protein, 1087 aa, Dermanyssus gallinae
MASRDGSNTAGRLSCQTCGRVCKSGAGLASHIRLTHNQREVRATSQTPNRSQTNNLILSSSQNDTAASNNNFNPPSTSRVSQPNCKCPSSTCLKVFNSKSGLNLHRRRAHPDEYNENILAPPSKKARWNPQDRELLATLEADFILDNNNETPREIDHLLATNFNSRTPRARGQRNYQAHKDLVEDLLKKRSLLNSNLDGSELPERSRPRYSESDGPYNPSQKYIIISKIQALTNTFPKRNIISTDLTHLSNIICSGEDHTIALNEFLNKHFTHTVRRRAFRETPSTEARVSKRQQRRQDYATTQKLFSQNRSKCAHEVLDGKHTIHNMQATEVVEHWANTMTQPPPEPLPCPVYTPNSDLFEVSLPISLKETHAALRGPSKALGLDGICLSSLRKLPLEVVCCILNILIISDIASAHETARLAFIPKINNATSPSDLRPLSISSYLQRTLNKILSRRLQNSIKLLPIQRAFLPYNGTFENLAVLDSILNDAKSAGRELRLASIDLRKAFDMVSHDSVLWSLRTRGYPEVFINYIERLYLSSKTLIEFGQECRTFRPTRGVRQGDLLSPLLFNLVLDDILSKLDKTNIGYQLTDDFRLMGLAFADDLILLASTKSTLQRLLNIADPLLKSRGLEINTNKSFTISHLFNRKEGKGFINTVSEFNVGDRQLPAKGMSDRWRYLGVDFDSNGRVDSTKDILLNLLNRLTIAPLKPHQRLIFLKDFLIPRLLYKLVSGPRPSYALLSDLDKEIRKVVKSKWLKLENSVPNAYLYTHTAHGGLDIPCLQTFIPRIRLSRLTALQHSTHLGVQWMLTTEHFKKDLAKTRLLCERLGTSIETATQETDYWSQQLHNTFDGAHFKKAHETPFVHCWIKGMPYLSGKEYLNLLKLRINALPTRARLARGRPGYNKRCRHGCHAPETLAHVAQMCGITHKQTIKRHDDVCDRVARLLRERGHEVVRERVFRRPGAPGLKPDLVITTPTEVWVLDAEVCGPNRDLAKARQDKIAKYDVEFLRAALPYPQKPRRFGSITISMSGVWDSESARTLLGLGVTKRNLMDLTVLTLQGTLRIYRSHRIHKSGGYHQARTRTTDS

SEQ ID NO: 481 - protein, 760 aa, Dermanyssus gallinae
MQATEVVEHWANTMTQPPPEPLPCPVYTPNSDLFEVSLPISLKETHAALRGPSKALGLDGICLSSLRKLPLEVVCCILNILIISDIASAHETARLAFIPKINNATSPSDLRPLSISSYLQRTLNKILSRRLQNSIKLLPIQRAFLPYNGTFENLAVLDGILNDAKSAGRELRLASIDLRKAFDMVSHDSVLWSLRTRGYPEVFINYIERLYLSSKTLIEFGQECRTFRPTRGVRQGDPLSPLLFNLVLDDILSKLDQTNIGYQLTDDFRLMGLAFADDLILLASTKSTLQRLLNIADPLLKSRGLEINTNKSFTISHLFNRKEGKGFINTVSEFNVGDRQLPAKGMSDRWRYLGVDFDSNGRVDSTKDILLNLLNRLTIAPLKPHQRLIFLKDFLIPRLLYKLVSGPRPSYALLSDLDKEIRKVVKSKWLKLENSVPNAYLYTHTAHGGLDIPCLQTFIPRIRLSRLTALQHSTHLGVQWMLTTEHFKKDLAKTRLLCERLGTSIETATQETDYWSQQLHNTFDGAHFKKAHETPFVHYWIKGMPYLSGKEYLNLLKLRINALPTRARLARGRPGYNKRCRHGCHAPETLAHVAQMCDITHKQTIKRHDDVCDRVARLLRERGHEVVRERVFRRPGAPGLKPDLVITTPTEVWVLDAEVCGPNRDLAKARQDKIAKYDVEFLRAALPYPQKPRRFGSITISMSGVWDSESARTLLGLGVTKRNLMDLTVLTLQGTLRIYRLHRIHKSGGYHQARTRTTDS

SEQ ID NO: 482 - protein, 1088 aa, Dermanyssus gallinae
MASRDGSNTAGRLSCQTCGRVCKSGAGLASHIRLTHNQREVRATSQTPNRSQTNNLILSSSQNDTAASNDNFNPPSTSRVSQPNCKCPSSTCLRVFNSKSGLNLHRRRAHPDEYNENILAPPSKKARWNPQDRELLATLEADFILDNNNETPREIDHLLATNFNSRTPGAIRGQRNSQAHKDLVEDLLKKRSLLDSNLDGSELPERSRPRYSESDGPYNPSQKDIIISKIQALTNTFPKRNIISTDLTHLSNIICSGEDHTIALNEFLNKHFTHTVRRRAFRETPSTEARVSKRQQRRQDYATTQKLFSQNRSKCAHEVLDGKHTIHNMQATEVVEHWANTMTQPPPEPLPCPVYTPNSDLFEVSLPISLKETHAALRGPSKALGLDGICLSSLRKLPLEVVCCILNILIISDIASAHETARLAFIPKINNATSPSDLRPLSISSYLQRTLNKILSRRLQNSIKLLPIQRAFLPYNGTFENLAVLDGILNDAKSAGRELRLASIDLRKAFDMVSHDSVLWSLRTRGYPEVFINYIERLYLSSKTLIEFGQECRTFRPTRGVRQGDPLSPLLFNLVLDDILSKLDQTNIGYQLTDDFRLMGLAFADDLILLASTKSTLQRLLNIADPLLKSRGLEINTNKSFTISHLFNRKEGKGFINTVSEFNVGDRQLPAKGMSDRWRYLGVDFDSNGRVDSTKDILLNLLNRLTIAPLKPHQRLIFLKDFLIPRLLYKLVSGPRPSYALLSDLDKEIRKVVKSKWLKLENSVPNAYLYTHTAHGGLDIPCLQTFIPRIRLSRLTALQHSTHLGVQWMLTTEHFKKDLAKTRLLCERLGTSIETATQETDYWSQQLHNTFDGAHFKKAHETPFVHYWIKGMPYLSGKEYLNLLKLRINALPTRARLARGRPGYNKRCRHGCHAPETLAHVAQMCDITHKQTIKRHDDVCDRVARLLRERSHEVVRERVFRRPGAPGLKPDLVITTPTEVWVLDAEVCGSNRDLAKARQDKIAKYDVEFLRAALPYPQKPRRFGSITISMSGVWDSESARTLLGLGVTKRNLMDLTVLTLQGTLRIYRSHRIHKSGGYHQARTRTTDS

SEQ ID NO: 483 - protein, 1088 aa, Dermanyssus gallinae
MASRDGSNTAGRLSCQTCGRVCKSGAGLASHIRLTHNQREVRATSQTPNRSQTNNLILSSSQNDTAASNNNFNPPSTSRVSQPNCKCPSSTCLKVFNSKSGLNLHRRRAHPDEYNENILAPPSKKARWNPQDRELLATLEADFILDNNNETPREIDHLLATNFNSRTPGAIRGQRNSQAHKDLVEDLLKKRSLLDSNLDGSELPERSRPRYSESDGPYNPSQKDIIISKIQALTNTFPKRNIISTDLTHLSNIICSGEDHTIALNEFLNKHFTHTVRRRAFRETPSTEARVSKRQQRRQDYATTQKLFSQNRSKCAHEVLDGKHTIHNMQATEVVEHWANTMTQPPPEPLPCPVYTPNSDLFEVSLPISLKETHVALRGPSKALGLDGTCLSSLRKLPLEVVCCILNILIISDIASAHETARLAFIPKINNATSPSDLRPLSISSYLQRTLNKILSRRLQNSIKLLPIQRAFLPYNGTFENLAVLDGILNDAKSAGRELRLASIDLRKAFDMVSHDSVLWSLRTRGYPEVFINYIERLYLSSKTLIEFGQECRTFRPTRGVRQGDPLSPLLFNLVLDDILSKLDETNIGYQLTDDFRLMGLAFADDLILLASTKSTLQRLLNIADPLLKSRGLEINTNKSFTISHLLNRKEGKGFINTVSEFNVGDRQLPAKGMSDRWRYLGVDFDSNGRVDSTKDILLNLLNRLTIAPLKPHQRLIFLKDFLIPRLLYKLVSGPRPSYALLSDLDKEIRKVVKSKWLKLENSVPNAYLYTHTAHGGLDIPCLQTFIPRIRLSRLTALQHSTHLGVQWMLTTEHFKKDLAKTRLLCERLGTSIETATQETDYWSQQLHNTFDGAHFKKAHETPFVHYWIKGMPYLSGKEYLNLLKLRINALPTRARLARGRPGYNKRCRHGCHAPETLAHVAQMCDITHKQTIKRHDDVCDRVARLLRERGHEVVRERVFRRPGAPGLKPDLVITTPTEVWVLDAEVCGPNRDLAKARQDKIAKYDVEFLRAALPYPQKPRRFGSITISMSGVWDSESARTLLGLGVTKRNLMDLTVLTLQGTLRIYRSHRIHKSGGYHQARTRTTDS

SEQ ID NO: 484 - protein, 760 aa, Dermanyssus gallinae
MQATEVVEHWANTMTQPPPEPLPCPVYTPNSDLFEVFLPISLKETHVALRGPSKALGLDGICLSSLRKLPLEVVCCILNILLISDIASAHETARLAFIPKINNTTSPSDLRPLSISSYLQRTLNKILSRRLQNSIKLLPIQRAFLPYNGTFENLAVLDGILNDAKSAGRELRLASIDLRKAFDMVSHDSVLWSLRTRGYPEVFINYIERLYLSSKTLIEFGQECRTFRPTRGVRQGDPLSPLLFNLVLDDILSKLDKTNIGYQLTDDFRLMGLAFADDLILLASTKSTLQRLLNIADPLLKSRGLEINTNKSFTISHLFNRKEGKGFINTVSEFNVGDRQLPAKGMSDRRRYLGVDFDSNGRVDSTKDILYNLLNRLTIAPLKPHQRLIFLKDFLIPRLLYKLVSGPRPSYALLSDLDKEIRKVVKSKWLKLENSVPNAYLYTHTAHGGLDIPCLQTFIPRIRLSRLTALQHSTHLGVQWMLTTEHFKKDLAKTRLLCERLGTPIETATQETDYWSQQLHNTFDGAHFKKAHETPFAHYWIKGVPYLSGKEYLNLLKLRINALPTRARLARGRPGYNKRCRHGCHAPETLAHVAQMCDITHKPTIKRHDDVCDRVARLLRERGHEVVRERVFRRPGAPGLKPDLVITTPTEVWVLDAEVCGPNRDLAKARQDKIAKYDVEFLRAALPYPQKRRRFGSITISMSGVWDSESARTLLGLGVTKRNLMDLTVLTLQGTLRIYRSHRVHKSGGYHQARTRTTDS

SEQ ID NO: 485 - protein, 1088 aa, Dermanyssus gallinae
MASRDGSNTAGRLSCQTCGRVCKSGAGLASHIRLTHNQREVRATSQTPNQSQTNNLILSSSQNDTAASNNNFNPPSTSRVSQPNCKCPSSTCLKVFKSKSGLNLHRRRAHPDEYNENILAPPSKKARWNPQDRELLATLEADFILDNNNETPREIDHLLATNFNSRTPGAIRGQRNSQAHKDLVEDLLKKRSLLDSNLDGSELPEPSRPRYSESDGPYNPSQKDIIISKIQALTNTFPKRNIISTDLTHLSNIICSGENHTIALNEFLNKHFTHTVRRRAFRETPSTEARVSKRQQRRQDYATTQKLFSQNRSKCAHEVLDGKHTIHNMQATEVVEHWANTMTQPPPEPLPCPVYTPNSDLFEVSLPISLKETHVALRGPSKALGLDGICLSSLRKLPLEVVCCILNILLISDIASAHETARLAFIPKINNATSPSDLRPLSISSYLQRTLNKILSRRLQNSIKLLPIQRAFLPYNGTFENLAVLDGILNDAKSAGRELRLASIDLRKAFDMVSHDSVLWSLRTRGYPEVFINYIERLYLSSKTLIEFGQECRTFRPTRGVRQGDPLSPLLFNLVLDDILSKLDKTNIGYQLTDDFRLMGLAFADDLILLASTKSTLQRLLNIADPLLKSRGLEINTNKSFTISHLFNRKEGKGFINPVPEFNVGDRQLPAKGMSDRWRYLGVDFDSNGRVDSTRDILLNLLNRLTIAPLKPHQRLIFLKDFLIPRLLYKLVSGPRPSYALLSDLDKEIRKVVKSKWLKLENSVPNAYLYAHTAHGGLDIPCLQTFIPRLRLSRLTALQHSTHLGVQWMLTTEHFKKDLAKTRLLCERLGTSIETATQETDYWSQQLHNTFDGAHFKKAHETPFVHYWIKGMPYLSGKEYLNLLKLRINALPTRARLARGRPGYNKRCRHGCHAPETLAHVAQMCDTTHKQTIKRHDDVCDRVARLLRERGHEVVRERVFRRPGAPGLKPDLVITTPTEVWVLDAEVCGPNRDLAKARQDKIAKYDVEFLRAALPDPQKPRRFGSITISMSGVWDSESARTLLGLGVTKRNLMDLTVLTLQGTLRIYRSHRVHKSGGYHQARTRTTDS

SEQ ID NO: 486 - protein, 1088 aa, Dermanyssus gallinae
MASRDGSNTAGRLSCQTCGRVCKSGAGLASHIRLTHNQREVRATSQTPNQSQTNNLILSSSQNDTAASNNNFNPPSTSRVSQPNCKCPSSTCLKVFKSKSGLNLHRRRAHPDEYNENILAPPSKKARWNPQDRELLATLEADFILDNNNETPREIDHLLATNFNSRTPGAIRGQRNSQAHKDLVEDLLKKRSLLDSNLDGSELPEPSRPRYSESDGPYNPSQKYIIISKIQALTNTFPKRNIISTDLTHLSNIICSGENHTIALNEFLNKHFTHTVRRRAFRETPSTEARVSKRQQRRQDYATIQKRFSQNRSKCAHEVLDGKHTIHNMQATEVVEHWANTMTQPPPEPLPCPVYTPNSDHFEVSLPISLKETHVALRGPSKALGLDGICLSSLRKLPLEVVCCILNILLISDIASAHETARLAFIPKINNATSPSDLRPLSISSYLQRTLNKILSRRLQNSIKLLPIQRAFLPYNGTFENLAVLDGILNDAKSAGRELRLASIDLHKAFDMVSHDSVLWSLRTRGYPEVFINYIERLYLSSKTLIEFGQECRTFRPTRGVRQGDPLSPLLFNLVLDDILSKLDKTNIGYQLTDDFRLMGLAFADDLILLASTKSTLQRLLNIADPLLKSRGLEINTNKSFTISHLFNRKEGKGFINTVPEFNVGDRQLPAKGMSDRWRYLGVDFDSNGRVDSTRDILLNLLNRLTIAPLKPHQRLIFLKDFLIPRLLYKLVSGPRPSYALLSDLDKEIRKVVKSKWLKLENSVPNAYLYTHTAHGGLDIPCLQTFIPRLRLSRLTALQHSTHLGVQWMLTTEHFKKDLAKTRLLCERLGTSIETATQETDYWSQQLHNTFDGAQFKKAHETPFVHYWIKGMPYLSGKEYLNLLKLRINALPTRARLARGRPGYNKRCRHGCHAPETLAHVAQMCDTTHKQTIKRHDDVCDRVARLLRERGHEVVRERVFRRPGAPGLKPDLVITTPTEVWVLDAEVCGPNRDLARARQDKIAKYDVEFLRAALPDPQKPRRFGSITISMSGVWDSESARTLLGLGVTKRNLMDLTVLTLQGTLRIYRSHRVHKSGGYHQARTRTTDS

SEQ ID NO: 487 - protein, 973 aa, Dermanyssus gallinae
MSSAHVRRDSFWATSMEVIYIYIYILDFILDNNNETPREIDHLLATNFNSRTPGAIRGQRNSQAHKDLVEDLLKKRSLLDSNLDGSEPPERSRPRYSESDGPYNPSQKDIIISKIQALTNTFPKRNIISTDLTHLSNIICSGEDHTIALNEFLNKHFTHTVRRRAFRETPSTEARVSKRQQRRQDYATTQKLFSQNRSKCAHEVLDGKHTIHNMQATEVVEHWANTMTQPPPEPLPCPVYTPNSDLFEVSLPISLKETHVALRGPSKALGLDGICLSSLRKLPLEVVCCILNILIISDIASAHETARLAFIPKINNATSPSDLRPLSISSYLQRTLNKIISRRLQNSIKLLPIQRAFLPYNGTFENLAVLDGILNDAKSAGRELRLASIDLRKAFDMVSHDSVLWSLRTRGYPEVFINYIERLYLSSKTLIEFGQECRTFRPTRGVRQGDPLSPLLFNLVLDDILSKLDETNIGYQLTDDFRLMGLAFADDLILLASTKSTLQRLLNIADPLLKSRGLEINTNKSFTISHLFNRKENKGFINTVSEFNVGDRQLPAKGMSDRWRYLGVDFDSNGRVDSTKDILLNLLNRLTIAPLKPHQRLIFLKDFLIPRLLYKLVSGPRPSYALLSDLDKEIRKVVKSKWLKLENSVPNAYLYTHTAHGGLDIPCLQTFIPRIRLSRLTALQHSTHLGVQWMLTTEHFKKDLAKTRLLCERLGTSIETATQETDYWSQQLHNTFDGAHFKKAHETPFVHYWIKGMPYLSGKEYLNLLKLRINALPTRARLARGRPGYNKRCRHGCHAPETLAHVAQMCDITHKQTIKRHDDVCDRVARLLRERGHEVVRERVFRRPGAPGLKPDLVITTPTEVWVLDAEVCGPNRDLAKARQDKIAKYDVEFLRAALPYPQKPRRFGSITISMSGVWDSESARTLLGLGVTKRNLMDLTVLTLQGTLRIYRSHRIHKSGGYHQARTRTTDS

SEQ ID NO: 488 - protein, 760 aa, Dermanyssus gallinae
MQATEVVEHWANTMTQPPPEPLPCPVYTPNSDLFEVSLPISLKETHVALRGPSKALGLDGICLSSLRKLPLEVVCCILNILIISDIASAHETARLAFIPKINNATSPSDLRPLSISSYLQRTLNKILSRRLQNSIKLLPIQRAFLPYNGTFENLAVLDGILNDAKSAGRELRLASIDLRKAFDMVSHDSVLWSLRTRGYPEVFINYIERLYLSSKTLIEFGQECRTFRPTRGVRQGDPLSPLLFNLVLDDILSKLDKTNIGYQLTDDFRLMGLAFADDLILLASTKSTLQRLLNIADLLLKSRGLEINTNKSFTISHLFNRKEGKGFINTVSEFNVGDRQLPAKGMSDRWRYLGVDFDSNGRVDSTKDILLNLLNRLTIAPLKPHQRLIFLKDFLIPRLLYKLVSGPRPSYALLSDLDKEIRKVVKSKWLKLENSVPNAYLYTHTAHGGLDIPCLQTFIPRIRLSRLTALQHSTHLGVQWMLTTEHFKKDLAKTRLLCERLGTSIETATQETDYWSQQLHNTFDGAHFKKAHETPFVHYWIKGMPYLSGKEYLNLLKLRINALPTRARLARGRPGYNKRCRHGCHAPETLAHVAQMCDITHKQTIKRHDDVCDRVARLLRERGHEVVRERVFRRPGAPGLKPDLVITTPTEVWVLDAEVCGPNRDLAKARQDKITKYDVEFLRAALPYPQKPRRFGSITISMSGVWDSESARTLLGLGVTKRNLMDLTVLTLQGTLRIYRSHRIHKSGGYHQARTRTTDS

SEQ ID NO: 489 - protein, 760 aa, Dermanyssus gallinae
MQATEVVEHWANTMTQPPPAPLPCPVYTPNSDLFEVSLPISLKETHVALRGPSKALGLDGICLSSLRKLPLEVVCCILNILLISDIASAHETARLAFIPKINNATSPSDLRPLSISSYLQRTLNKILSRRLQNSIKLLPIQRAFLPYNGTFENLAVLDGILNDAKSAGRELRLASIDLRKAFDMVSHDSVLWSLRTRGYPEVFINYIERLYLSSKTLIEFGQECRTFRPTRGVRQGDPLSPLLFNLVLDDILSKLDKTNIGYQLTDDFRLMGLAFADDLILLASTKSTLQRLLNIADPLLKSRGLEINTNKSFTISHLFNRKEGKGFINTVPEFNVGDRQLPAKGMSDRWRYLGVDFDSNGRVDSTRDILLNLLNRLTIAPLKPHQRLIFLKDFLIPRLLYKLVSGPRPSYALLSDLDKEIRKVVKSKWLKLENSVPNAYLYTHTAHGGLDIPCLQTFIPRLRLSRLTALQHSTHLGVQWMLTTEHFKKDLAKTRLLCERLGTSIETATQETDYWSQQLHNTFDGAHFKKAHETPFVHYWIKGMPYLSGKEYLNLLKLRINALPTRARLARGRPGYNKRCRHGCHAPETLAHVAQMCDTTHKQTIKRHDDVCDRVARLLRERGHEVVRERVFRRPGAPGLKPDLVITTPTEVWVLDAEVCGPNRDLAKARQDKIAKYDVEFLRAALPDPQKPRRFGSITISMSGVWDSESARTLLGLGVTKRNLMDLTVLTLQGTLRIYRSHRVHKSGGYHQARTRTTDS

SEQ ID NO: 490 - protein, 745 aa, Dermanyssus gallinae
MQATEVVEHWANTMTQPPPEPLPCPVYTPNSDLFEVSLPISLKETHAALRGPSKALGLDGICLSSLRKLPLEVVCCILNILIISDIASAHETARLAFIPKINNATSPSDLRPLSISSYLQRTLNKILSRRLQNSIKLLPIQRAFLPYNGTFENLAVLDGILNDAKSAGRELRLASIDLRKAFDMVSHDSVLWSLRTRGYPEVFINYIERLYLSSKTLIEFGQECRTFRPTRGVRQGDPLSPLLFNLVLDDILSKLDQTNIGYQLTDDFRLMGLAFADDLILLASTKSTLQRLLNIADPLLKSRGLEINTNKSFTISHLFNRKEGKGFINTVSEFNVGDRQLPAKGMSDRWRYLGVDFDSNGRVDSTKDILLNLLNRLTIAPLKPHQRLIFLKDFLIPRLLYKLVSGPRPSYALLSDLDKEIRKVVKSKWLKLENSVPNAYLYTHTAHGGLDIPCLQTFIPRIRLSRLTALQHSTHLGVQWMLTTEHFKKDLAKTRLLCERLGTSIETATQETDYWSQQLHNTFDGAHFKKAHETPFVHYWIKGMPYLSGKEYLNLLKLRINALPTRARLARGRPGYNKRCRHGCHAPETLAHVAQMCDITHKQTIKRHDDVCDRVARLLRERGHEVVRERVFRRPGAPGLKPDLVITTPTEVWVLDAEVCGPNRDLAKARQDKIAKYDVEFLRAALPYPQKTSQIRIHHYLYEWCMGLRICEDALGARRHEEESYGSHRFNFARNLEDISLAPDP

SEQ ID NO: 491 - protein, 752 aa, Dermanyssus gallinae
MQATEVVEHWANTMIQPPPESLPCPVYTPNSDLLEVSLPISLKETHVALRGPSKALGLDRICLSSLRKLPLEVVCCILNILLISDIASAHETARLAFIPKINNATSPSDLRPLSISSYLQRTINKILSRHLQNSIKLLPIQRTFLPYNGTFENLAVLDGILNDAKSAGRELRLASIDLRKAFDIRLRTRGYPEVFINYIERLYLSSKTLIEFGQECHTFRPTRDVRQGDPLSPLLFNLVLDDILSKLDKTNIGYQLTDDFRLMGLAFADDLILLASTKSTLQRLLNIADPLLKSRGLEINTNKSFTISHLFNRKEGKCFINTVSEFNVGDRQLPAKGMSDRWRYLGVDFDSNGRVDSTKDILLNLLNRLTIAPLKPHQRLIFLKDFLIPRLLYKLVSGPRPSYALLSDLDKEIRKVVKSKWLKLENSVPNAYQYTHTAHGGLDIPSLQTFIPRIRLSRLTALQHSTHLGVQWMLTTEHFKKDLAKTRLLCERLGTSIETATQETDYWSQQLHNTFDGAHFKKAHETPFVHYWIKGMPYLSGKEYLNLLKLRINALPTRARLARGRPGYNKRCRHGCHAPETLAHVAQMCDITHKQTIKRHDDVCDRVARLLRERGHEVVRERVFRRPGAPGLKPDLVITTPTEVWVLDAEVCGPNRDLAKARQDKIAKYDVEFLRAALPYPQKPRRFGSITISMSGVWDSESARTPLGLGVTKRNLMDLTVLTLQGTLRIYRLHRVHKSGGYHQARTRTTDS

SEQ ID NO: 492 - protein, 1088 aa, Dermanyssus gallinae
MASRDGSNTAGRLSCQTCGRVCKSGAGLASHIRVTHNQREVRATFQTPNRSQTNNLILSSSQNDTAASNDNCNPPSTSRVSQPNCKCPSSTCLKVFNSKSGLNLHRRRAHPDEYNENILAPPSKKARWNPQDRELLATLEADFILDNNNETPREIDHLLATNFNSRTPGAIRGQRNSQAHKDLVEDLLKKRSLLDSNLDGSELPERSRPRYSESDGPYNPSQKDIIISKIQALTNTFPKRNIISTDLTHLSNIICSGEDHTIALNEFLNKHFTHTVRRRAFRETPSTEARVSKRQQRRQDYATTQKLFSQNRSKCAHEVLDGKHTIHNMQATEVVKHWANTMTQPPPEPLPCPVYTPNSDLFEVSLPISLKETHAALRGPSKALGLDGICLSSLRKLPLEVVCCILNILIISDIASAHKTARLAFIPKINNATSPSDLRPLSISSYLQRTLNKILSRRLQNSIKLLPIQRAFLPYNGTFENLAVLDGILNDAKSAGRELRLASIDLRKAFDMVSHDSVLWSLRTRGYPEVFINYIERLYLSSKTLIEFGQECRTFRPTRGVRQGDPLSPLLFNLVLDDILSKLDQTNIGYQLTDDFRLMGLAFADDLILLASTKSTLQRLLNIADPLLKSRGLEINTNKSFTISHLFNIKESKVFINTVSEFNVGDRQLPAKGISDRWRYLGVDFDSNGRVDSTKYILLNLLNRLTIAPLKPHQRLIFLKDFLIPRLLYKLVSGPRPSYALLSDLDKEIRKVVKSKWLKLENSVPNAYLYTHTAHGGLDIPCLQTFIPRIRLSRLTALQHSTHLGVQWMLTTEHFKKDLAKTRLLCERLGTSIETATQETDYWSQQLHNTFDGAHFKKAHETPFVHYWIKGMPYLSGKEYLNLLKLRINALPTRARLARGRPGYNKRCRHGCHAPETLAHVAQMCDITHKQTIKRHDDVCDRVARLLRERGHEVVRERVFRRPGAPGLRPDLVLTTPTEVWVLDAEVCGPNRDLAKARQDKIAKYDVEFLRAALPYPQKPRRFGSITISMSGVWDSESARTLLGLGVTKRNLMDLTVLTLQGTLRVYRSHRIHKSGGYHQARTRTTDS

SEQ ID NO: 493 - protein, 1088 aa, Dermanyssus gallinae
MASRDGSNTAGRLSCQTCGRVCKSGAGLASHIRLTHNQREVRATSQTPNRSQTNNLILSSSQNDTAASNNNFNPPSTSRVSQPNCKCPSSTCLKVFNSKSGLNLHRRRAHPDEYNENILAPPSKKARWNPQDRELLATLEADFILDNNNETPREIDHLLATNFNSRTPGAIRGQRNSQAHKDLVEDLLKKRSLLDSNLDGSELPERSRPRYSESDGPYNPSQKDIIISKIQALTNTFPKRNIIPTDLTHLSNIICSGEDHTIALNEFLNKHFTHTVRRRAFRETPSTEARVSKRQQRRQDYATTQKLFSQNRSKCAHEVLDGKHTIHNMQATEVVEHWANTMTQPPPEPLPCPVYTPNSDLFEVSLPIFLKETHVALRGPSKALGLDGICLSSLRKLPLEVVCCILNILIISDIASAHETARLAFIPKINNATSPSDLRPLSISSYLQRTLNKILSRRLQNSIKLLPIQRAFLPYNGTFENLAVLDGILNDAKSAGRELRLASIDLRKAFDMVSHDSVLWSLRTRGYPEVFINYIERLYLSSKTLIEFGQECRTFRPTRGVRQGDPLSPLLFNLVLDDILSKLDKTNIGYPLTDNFRLMGLAFADDLILLASTKSTLQRLLNIADPLLKSRGLEINTNKSFTISHLFNRKEGKGFINTVSEFNVGDRQLPAKGMSDRWRYLGVDFDSNGRVDSTKDILLNLLNRLTIAPLKPHQRLIFLKDFLIPRLLYKLVSGPRPSYALLSDLDKEIRKVVKSKWLKLENSVPNAYLYTHTAHGGLDIPCLQTFIPRIRLSRLTALQHSTHLGVQWMLTTEHFKKDLAKTRLLCERLGTSIETATQETDYWSQQLHNTFDGAHFKKAHETPFVHYWIKGMPYLSGKEYLNLLKLRINALPTRARLARGRPGYNKRCRHGCHAPETLAHVAQMCDITHKQTIKRHDDVCDRVARLLRERGHEVVRERVFRRPGAPGLKPDLVITTPTEVWVLDAEVCGPNRDLAKARQDKIAKYDVEFLRAALPYPQKPRRFGSITISMSGVWDSESARTLLGLGVTKRNLMDLTVLTLQGTLRIYRSHRIHKSGGYHQARTRTTDS

SEQ ID NO: 494 - protein, 760 aa, Dermanyssus gallinae
MQATEVVEHWANTMTQPPPEPLPCPVYTPNSDLFEVSLPISLKETHAALRGPSKALGLDGICLSSLRKLPLEVVCCILNILIISDIASAYETARLAFIPKINNATSPSDLRPQSISSYLQRTLNKILSRRLQNSIKLLPIQRAFLPYNGTFENLAVLDGILNDAKSAGRELRLASIDLRKAFDMVSHDSVLWSLRTRGYPEVFINYIERLYLSSKTLIEFGQECRTFRPTRGVRQGDPLSPLLFNLVLDDIFSKLDQTNIGYQLTDDFRLMGLAFADDLILLASTKSTLQRLLNIADPLLKSRGLEINTNKSFTISHLFNRKEGKGFINTVSEFNVGDRQLPAKGMSDRWRYLGVDFDSNGRVDSTKDILLNLLNRLTIAPLKPHQRLIFLKDFLIPRLLYKLVSGPRPSYALLSDLDKEIRKVVKSKWLKLENSVPNAYLYTHTAHGGLDIPCLQTFIPRIRLSRLTALQHSTHLGVQWMLTTEHFKKDLAKTRLLCERLGTSIETATQETDYWSQQLHNTFDGAHFKKAHETPFVHYWIKGMPYLSGKEYLNLLKLRINALPTRARLARGRPGYNKRCRHGCHAPETLAHVAQMCDITHKQTIKRHDDVCDRVARLLRERGHEVVRERVFRRPGAPGLKPDLVITTPTEVWVLDAEVCGPNRDLAKARQDKIAKYDVEFLRAALPYPQKPRRFGSITISMSGVWDSESARTLLGLGVTKRNLMDLTVLTLQGTLRIYRSHRIHKSGGYHQARTRTTDS

SEQ ID NO: 495 - protein, 760 aa, Dermanyssus gallinae
MQATEVVEHWANTMTQPPPEPLPCPVYTPNSDLFEVSLPISLKETHAALRGPSKALGLDGICLSSLRKLPLEVVCCILNILIISDIASAHETARLAFIPKINNATSPSDLRPLSISSYLQRTLNKILSRRLQNSIKLLPIQRAFLPYNGTFENLAVLDGILNDAKSAGRELRLASIDLRKAFDMVSHDSVLWSLRTRGYPEVFINYIERLYLSSKTLIEFGQECRTFRPTRGVRQGDPLSPLLFNLVLDDILSKLDQTNIGYQLTDDFRLMGLAFADDLILLAFTKSTLQRLLNIADPLLKSRGLEINTNKSFTISHLFNRKEGKGFINTVSEFNVGDRQLPAKGMSDRWRYLGVDFDSNGRVDSTKDILLNLLNRLTIAPLKPHQRLIFLKDFLIPRLLYKLVSGPRPSYALLSDLDKEIRKVVKSKWLKLENSVPNAYLYTHTAHGGLDIPCLQTFIPRIRLSRLTALQHSTHLGVQWMLTTEHFKKDLAKTRLLCERLGTSIETATQETDYWSQQLHNTFDGAHFKKAHETPFVHYWIKGMPYLSGKEYLNLLKLRINALPTRARLARGRPSYNKRCRHGCHAPETLAHVAQMCDITHKQTIKRHDDVCDRVARLLRERGHEVVRERVFRRPGAPGLKPDLVITTPTEVWVLDAEVCGPNRDLAKARQDKIAKYDVEFLRAALPYPQKPRRFGSITISMSGVWDSESARTLLGLGVTKRNLMDLTVLTLQGTLRIYRSHRIHKSGGYHQARTRTTDS

SEQ ID NO: 496 - protein, 1088 aa, Dermanyssus gallinae
MASRDGSNTAGRLSCQTCGRVCKSGAGLASHIRLTHNQREVRATFQTPNRSQTNNLILSSSQNDTAASNDNFNPPSTSRVSQPNCKCPSSTCLKVFNSKSGLNLHRRRAHPDEYNENILAPPSKKARWNPQDRELLATLEADFILDNNNETPREIDHLLATNFNSRTPGAIRGQRNSQAHKDLVEDLLKKRSLLDSNIDGSELPERSRPRYSESDGPYNPSQKDIIISKIQALTNTFPKRNIISTDLTHLSNIICSGEDHTIALNEFLNKHFTHTVRRRAFRETPSTEARVSKRQQRRQDYATTQKLFSQNRSKCAHEVLDGKHTIHNMQATEVVEHWANTMTQPPPEPLPCPVYTPNSDLFEVSLPISLKETHAALRGPSKALGLDGICLSSLRKLPLEVVCCILNILIISDIASAHETARLAFIPKINNATSPSDLRPLSISSYLQRTLNKILSRRLQNSIKLLPIQRAFLPYNGTFENLAVLDGILNDAKSAGRELRLASIDLRKAFDMVSHDSVLWSLRTRGYPEVFINYIERLYLSSKTLIEFGQECRTFRPTRGVRQGDPLSPLLFNLVLDDILSKLDQTNIGYQLTDDFRLMGLAFADDLILLASTKSTLQRLLNIADPLLKSRGLEINTNKSFTISHLFNRKEGKGFINTVSEFNVGDRQLPAKGMSDRWRYLGVDFDSNGRVDSTKDILLNLLNRLTIAPLKPHQRLIFLKDFLIPRLLYKLVSGPRPSYALLSDLDKEIRKVVKSKWLKLENSVPNAYLYTHTAHGGLDIPCLQTFIPRIRLSRLTALQHSTHLGVQWMLTTEHFKKDLAKTRLLCERLGTSIETATQETDYWSQQLHNTFDGAHFKKAHETPFVHYWIKGMPYLSGKEYLNLLKLRINALPTRARLARGRPGYNKRCRHGCHAPETLAHVAQMCDITHKQTIKRHDDVCDRVARLLRERGHEVVRERVFRRPGAPGLKPDLVITTPTEVWVLDAEVCGPNRDLAKARQDKIAKYDVEFLRAALPYPQKPRRFGSITISMSGVWDSESARTLLGLGVTKRNLMDLTVLTLQGTLRIYRSHRIHKSGGYHQARTRTTDS

SEQ ID NO: 497 - protein, 760 aa, Dermanyssus gallinae
MQATEVVEHWANTMTQPPPEPLPCPVYTPNSDLFEVSLPISLKETHVALRGPSKTLGLDGICLSSLRKLPLEVVCCILNILLISDIASAHETARLAFIPKINNATSPSDLRPLSISSYLQRTLNKILSRRLQNSIKLLPIQRAFLPYNGTFENLAVLDGILNDAKSAGRELRLASIDLRKAFDMVSHDSVLWSLRTRGYPEVFINYIERLYLSSKTLIEFGQECRTFRPTRGVRQGDPLSPLLFNLVLDDILLKLDKTNIGYQLTDDFRLMGLAFADDLILLASTKSTLQRLLNIADPLLKSRGLEINTNKSFTISHLFNRKEGKGFINTVPEFNVGDRQLPAKGMSNRWRYLGVDFDSNGRVDSTRDILLNLLNRLTIAPLKPHQRLIFLKDFLIPRLLYKLVSGPRPSYALLSDLDKEIRKVVKSKWLKLENSVPNAYLYTHTAHGGLDIPCLQTFIPRLRLSRLTALQHSTHLGVQWMLTTEHFKKDLAKTRLLCERLGTSIETATQETDYWSQQLHNTFDGAHFKKAHETPFVHYWIKGMPYLSGKEYLNLLKLRINALPTRARLARGRPGYNKRCRHGCHAPETLAHVAQMCDTTHKQTIKRHDDVCDRVARLLRERGHEVVRERVFRRPGAPGLKPDLVITTPTEVWVLDAEVCGPNRDLAKARQDKIAKYDVEFLRAALPDPQKPRRFGSITISMSGVWDSESARTLLGLGVTKRNLMDLTVLTLQGTLRIYRSHRVHKSGGYHQARTRTTDS

SEQ ID NO: 498 - protein, 1088 aa, Dermanyssus gallinae
MASRDGSNTAGRLSCQTCGRVCKSGAGLASHIRLTHNQREVRATSQTPNQSQTNNLILSSSQNDTAASNNNFNPPSTSRVSQPNCKCPSSTCLKVFKSKSGLNLHRRRAHPDEYNENILAPPSKKARWNPQDRELLATLEADFILDNNNETPREIDHLLATNFNSRTPGAIRGQRNSQAHKDLVEDLLKKRPLLDSNLDGSELPEPSRPRYSESDGPYNPSQKDIIISKIQALTNTFPKRNIISTDLTHLSNIICSGENHTIALNEFLNKHFTHTVRRRAFRETPSTEARVSKRQQRRQDYATTQKLFSQNRSKCAHEVLDGKHTIHNMQATEVVEHWANTMTQPPPEPLPCPVYTPNSDLFEVSLPISLKETHVALRGPSKALGLDGICLSSLRKLPLEVVCCILNILLISDIASAHETARLAFIPKINNATSPSDLRPLSISSYLQRTLNKILSRRLQNSIKLLPIQRAFLPYNGTFENLAVLDGILNDAKSAGRELRLASIDLRKAFDMVSHDSVLWSLRTRGYPEVFINYIERLYLSSKTLIEFGQECRTFRPTRGVRQGDPLSPLLFNLVLDDILSKLDKTNIGYQLTDDFRLMGLAFADDLILLASTKSTLQRLLNIADPLLKSRGLEINTNKSFTISHLFNRKEGKGFINTVPEFNVGDRQLPAKGMSDRWRYLGVDFDSNGRVDSTRDILLNLLNRITIAPLKPHQRLIFLKDFLIPRLLYKLVSGPRPSYALLSDLDKEIRKVVKSKWLKLENSVPNAYLYTHTAHGGLDIPCLQTFIPRLRLSRLTALQQSTHLGVQWMLTTEHFKKDLAKTRLLCERLGTSIETATQETDYWSQQLHNTFDGAHFKKAHETPFVHYWIKGMPYLSGKEYLNLLKLRINALPTRARLARGRPGYNKRCRHGCHAPETLAHVAQMCDTTHKQTIKRHDDVCDRVARLLRERGHEVVRERVFRRPGAPGLKPDLVITTPTEVWVLDAEVCGPNRDLAKARQDKIAKYDVEFLRAALPDPQKPRRFGSITISMSGVWDSESARTLLGLGVTKRNLMDLTVLTLQGTLRIYRSHRVHKSGGYHQARTRTTDS

SEQ ID NO: 499 - protein, 1088 aa, Dermanyssus gallinae
MASRDGSNTAGRLSCQTCGRVCKSGAGLASHIRLTHNQREVRATSQTPNRSQTNTLILSSSQNDTAASNDNFNPPSTSRVSQPNCKCPSSTCLKVFNSKSGLNLHRRRAHLDEYNENILAPPSKKARWNPQDRELLATLEADFILDNNNETPREIDHLLATNFNSRTPGAIRGQRNSQAHKDLVEDLLKKRSLLDSNIDGSELFERSRPRYSESDGPYNPSQKDIIISKIQALTNTFPKRNIISTDLTHLSNIICSGEDHTIALNEFLNKHFTHTVRRRAFRETPSTEARVSKRQQRRQDYATTQKLFSQNRSKCAHEVLDGKHTIHNMQATEVVEHWANTMTQPPPEPLPCPVYTPNSDLFEVSLPISLKETHAALRGPSKALGLDGICLSSLRKLPLEVVCCILNILIISDIASAHETARLAFIPKINNATSPSDLRPLSISSYLQRTLNKILSRRLQNSIKLLPIQRAFLPYNGTFENLAVLDGIHNDAKSAGRELRLASIDLRKAFDMVSHDSVLWSLRTRGYPEVFINYIERLYLSSKTLIEFGQECRTFRPTRGVRQGDPLSPLLFNLVLDDILSKLDQTNIGYQLTDDFRLMGLAFADDLILLASTKSTLQRLLNIADPLLKSRGLEINTNKSFTISHLFNRKEGKGFINTVSEFNVGDRQLPAKGMSDRWRYLGVDFDSNGRVDSTKDILLNLLNRLTIAPLKPHQRLIFLKDFLIPRLLYKLVSGPRPSYALLSDLDKEIRKVVKSKWLKLENSVPNAYLYTHTAHGGLDIPCLQTFIPRIRRSRLTALQYSTHLGVQWMLTTEHFKKDLAKTRLLCERLGTSIETATQETDYWSQQLHNTFDGAHFKKAHETPFVHYWIKGMPYLSGKEYLNLLKLRINALPTRARLARGRPGYNKRCRHGCHAPETLAHVAQMCDITHKQTIKRHDDVCDRVARLLRERGHDVVRERVFRRPGAPGLKPDLVITTPTEVWVLDAEVCGPNRDLAKARQDKIAKYDVEFLRAALPYPQKPRRFGSITISMSGVWDSESARTLLGLGVTKRNLMDLTVLTLQGTLRIYRSHRIHKSGGYHQARTRTTDS

SEQ ID NO: 500 - protein, 1063 aa, Dermanyssus gallinae
MYIYTYIYYIYIYMFICATSQTPNRSQTNNLILSSSQNDTAASNNNFNPPSTSRVSQPNCKCPSSTCLKVFNSKSGLNLHRRRAHPDEYNENILAPPSKKARWNPQDRELLATLEADFILDNNNETPREIDHLLATNFNSRTPGAIRGQRNSQAHKDLVEDLLKKRSLLDSNLDGSELPERSRPRYSESDGPYNPSQKDIIISKIQALTNTFPKRNIISTDLTHLSNIICSGEDHTIALNEFLNKHFTHTVRRRAFRETPSTEARVSKRQQRRQDYATTQKLFSQNRSKCAHEVLDGKHTIHNMQATEVVEHWANTMTQPPPEPLPCPVYTPNSDLFEVSLPISLKETHVALRGPSKALGLDGICLSSLRKLPLEVVCCILNILIISDIASAHETARLAFIPKINNATSPSDLRPLSISSYLQRTLNKILSRRLQNSIKLLPIQRAFLPYNGTFENLAVLDGILNDAKSAGRELRLASIDLRKAFDMVSHDSVLWSLRTRGYPEVFINYIERLYLSSKTLIEFGQECRTFRPTRGVRQGDPLSPLLFNLVLDDILSKLDKTNIGYQLTDDFRLMGLAFADDLILLASTKSTLQRLLNIADPLLKSRGLEINTNKSFTISHLFNRKEGKGFINTVSEFNVGDRQLPAKGMSDRWRYLGVDFDSNGRVDSTKDILLNLLNRLTIAPLKPHQRLIFLKDFLIPRLLYKLVSGPRPSYALLSDLDKEIRKVVKSKWLKLENSVPNAYLYTHTAHGGLDIPCLQTFIPRIRLSRLTALQHSTHLGVQWMLTTEHFKKDLAKTRLLCERLGTSIETATQETDYWSQQLHNTFDGAHFKKAHETPFVHYWIKGMPYLSGKEYLNLLKLRINALPTRARLARGRPGYNKRCRHGCHAPETLAHVAQMCDITHKQTIKRHDDVCDRVARLLRERGHEVVRERVFRRPGAPGLKPDLVITTPTEVWVLDAEVCGPNRDLAKARQDKIAKYDVEFLRAALPYPQKPRRFGSITISMSGVWDSESARTLLGLGVTKRNLMDLTVLTLQGTLRIYRSHRIHKSGGYHQARTRTTDS

SEQ ID NO: 501 - protein, 761 aa, Dermanyssus gallinae
MQATEVETQWANTMTQPPPPEPLPSPVYTPNSDLFEVSLPISLKETHVALRGPSKALGLDGICLSSLRKLPLEVVCWILNILLISDIASAHETARLAFIPKINNATSPSDLRPLYISSYLQRTLNKILSRRLQNSIKLLPIQRAFPPYNGTFEKLAVLDGILNDAKSAGRELRLASIDLRKAFDMVSHDSVLWSLRTRGYPELFISYIERLYLSSKTLIEFGQECRTFRPTRGVRQGDPLSPLLFNLVLDDILSKLDKTNIGYQLTDDFRLMGLAFADNLILLASTKSTLQRLLNIADPLLKSRGLEINTNKSFTISHLFNRKEGKGFINTVSEFNVGDRQLPAKGMSDRWRYLVVDFDSNGRVDSTKDILLNLLNRLTIAPLKPHQRLIFLKDFLIPRLLYKLVSGPRPSYALLSNLDKEIRKVVKSKWLKLENSVPNAYLYTHTAHGGLDIPCLQTFIPRIRLSRLTALQHSTHLGVQWMLTTKHFKKDLAKTRLLCERLGTSIETATQETDYGSQQLHNTFDGAHFKKTHETPFVHYWIKGMPYLSGKEYLNLLKLRINALPTRARLARGRPGCNKRCRHGCHAPETLAHVAQMCDITHKQTIKRHDDVCDRVARLLRERGHEVVRERVFRRPGAPGLKPDLVITTPTEVWVLDAEVCGPNRDLAKARQDKIAKYDVEFLRAALPYPQKPRRFGSITISMSGVWDSESARTLLGLGVTKRNLMDLTVLTLQGTLRIYRSHRVHKSGGYHQARTRTTDS

SEQ ID NO: 502 - protein, 984 aa, Dermanyssus gallinae
MASRDGSNTAGRLSCQTCGRVCKSGAGLASHIRLTHNQREVRATSQTPNRSQTNNLILSSSQNDTAASNNNFNPPSTSRVSQPNCKCPSSTCLKVFNSKSGLNLHPRRAHPDEYNENILAPPSKKARWNPQDRELLATLEADFILDNNNETPREIDHLLATNFNSRTPGAIRGQRNSQAHKDLVEDLLKKRSLLDSNLDGSELPERSRPRYSESDGPYNPSQKDIIISKIQALTNTFPKRNIISTDLTHLSNIICSGEDHTIALNEFLNKHFTHTVRRRAFRETPSTEARVSKRQQRRQDYATTQKLFSQNRSKCAHEVLDGKHTIHNMQATEVVEHWANTMTQPPPEPLPCPVYTPNSDLFEVSHPISLKETHVALRGPSKALGLDGICLSSLRKLPLEVVCCILNILLISDIASAHETARLAFIPKINNATSPSDLRPLSISSYLQRTLNKILSRRLQNSIKLLPIQRAFLPYNGTFENLAVLDGILNDAKSAGRELRLASIDLRKAFDMVSHDSVLWSLRTRGYPEVFINYIERLYLSSKTLIEFGQECRTFRPTRGVRQGDPLSPLLFNLVLDDILSKLDKTNIGYQLTDDFRLMGLAFADDLILLASTKSTLQRLLNIADPLLKSRGLEINTNKSFTISHLFNRKEGKGFINTVSEFNVGDRQLPAKGMSDRWRYLGVDFDSNGRVDSTKDILLNLLNRLTIAPLKPHQRLIFLKDFLIPRLLYKLVSGPRPSYALLSDLDKEIRKVVKSKWLKLENSVPNAYLYTHTAHGGLDIPCLQTFIPRIRLSRLTALQHSTHLGVQWMLTTEHFKKDLAKTRLLCERLGTSIETATQETDYWSQQLHNTFDGAHFKKAHETPFVHYWIKGMPYLSGKEYLNLLKLRINALPTRARLARGRPGYNKRCRHGCHAPETLAHVAQMCDITHKQTIKRHDDVCDRVARLLRERGHEVVRERVFRRPGAPGLKPDLVITTPTEVWVLD

SEQ ID NO: 503 - protein, 1087 aa, Dermanyssus gallinae
MASRDGSNTAGRLSCQACGRVCKSGAGLASHIRLTHNQREVRATSQTPNQSQTNNLILSSSQNDTAASNNNFNPPSTSRVSQPNCKCPSSTCLKVFKSKSGLNLHRRRAHPDEYNENILAPPSKKARWNPQDRELLATLEADFILDNNNETPREIDHLLATNFNSRTPGAIRGQRNSQAHKDLVEDLLKKRSLLDSNLDGSELPEPSRPRYSESDGPYNPSQKDIIISKIQALTNTFPKRNIISTDLTHLSNIICSGENHTIALNEFLNKHFTHTVRRRAFRETPSTEARVSKRQQRRQDYATTQKLFSQNRSKCAHEVLDGKHTIHNMQATEVVEHWANTMTQPPPESLPCPVYTPNSDLFEVSLAISIKETHVALRGPSKALGLDGICLSSLRKLPLEVVCCILNILLISDIASAHETARLAFIPKINNAASPSDLRPLSISSYLQRTLNKILSRRLQNSIKLLPIQRAFLPYNGTFENLAVLDGILNDAKSAGRELRLASIDLRKAFDMVSHDSVLWSLRTRGYPEVFINYIERLYLSSKTLIEFGQECRTFRPTRGVRQGDPLSPLLFNLVLDDILSKLDKTNIGYQLTDDFRLMGLAFADDLILLASTKSTLQRLLNIADPLLKSRGLEINTNKSFTISHLFNRKEGKGFINTVPEFNVGDRQLPAKGMSDRWRYLGVDFDSNGRVDSTRDILLNLLNRLTIAPLKPHQRLIFLKDFLIPRLLYKLVSGPRPSYALLSDLDKEIRKVVKSKWLKLENSVPNAYLYTHTAHGGLDIPCLQTFIPRLRLSRLTALQHSTHLGVQWMLTTEHFKKDLAKTRLLCERLGTSIETATQETDFWSQQLHNTFDGAHFKKAHETPFVHYWIKGMPYLSGKEYLNLLKLRINALPTRARLARGRPGYNKRCRHGCHAPETLAHVAQMCDTTHKQTIKRHDDVCDRVARLLRERGHEVVRERVFRRPGAPGLKPDLVITTPTEVWVYAEVCGPNRDLAKARQDKIAKYDVEFLRAALPDPQKPRRFGSITISMSGVWDSESARTLLGLGVTKRNLMDLTVLTLQGTLRIYRSHRVHRSGGYHQARTRTTDS

SEQ ID NO: 504 - protein, 1088 aa, Dermanyssus gallinae
MASRDGSNTAGRLSCQTCGRVCKSGAGLASHIRLTHNQREVRATSQTPNQSQTNNLILSSSQNDTAASNNNFNPPCTSRVSQPNCKCPSSTCLKVFKSKSGLNLHRRRAHPDEYNENILAPPSKKARWNPQDRELLATLEADFILDNNNETPREIDHLLATNFNSRTPGAIRGQRNSQAHKDLVEDLLKKRSLLDSNLDGSELPEPSRPRYSESDGPYNPSQKDIIISKIQALTNTFPKRNIISTDLTHLSNIICSGENHTIALNEFLNKHFTHTVRRRAFRETPSTEARVSKRQQRRQDYATTQKLFSQNRSKCAHEVLDGKHTIHNMQATEVVEHWANTMTQPPPEPLPCPVYTPNSDLFEVSLPISLKETHVALRGPSKALGLDGICLSSLRKLPLEVVCCILNILLISDIASAHETARLAFIPKINNATSPSDLRPLSISSYLQRTLNKILSRRLQNSIKLLPIQRAFLPYNGTFENLAVLDGILNDAKSAGRELRLASIDLRKAFDMVSHDSVLWSLRTRGYPEVFINYIERLYLSSKTLIEFGPECRTFRPTRGVRQGDPLSPLLFNLVLDDILSKLDKTNIGYQLTDDFRLMGLAFADDLILLASTKSTLQRLLNIADPLLKSRGLEINTNKSFTISHLFNRKEGKGFINTVPEFNVGDRQLPAKGMSDRWRYLGVDFDSNGRVDSTRDILLNLLNRLTIAPLKPHQRLIFLKDFLIPRLLYKLVSGPRPSYALLSDLDKEIRKVVKSKWLKLENSVPNAYLYTHTAHGGLDIPCLQTFIPRLRLSRLTALQHSTHLGVQWMLTTEHFKKDLAKTRLLCERLGTSIETATQETDYWSQQLHNTFDGAHFKKAHETPFVHYWIKGMPYLSGKEYLNLLKLRINALPTRARLARGRPGYNKRCRHGCHAPETLAHVAQMCDTTHKQTIKRHDDVCDRVARLLRERGHEVVRERVFRRPGAPGLKPDLVITTPTEVWVLDAEVCGPNRDLAKARQDKIAKYDVEFLRAALPDPQKPRRFGSITISMSGVWDSESARTLLGLGVTKRNLMDLTVLTLQGTLRIYRSHRVHKSGGYHQARTRTTDS

SEQ ID NO: 505 - protein, 760 aa, Dermanyssus gallinae
MQATEVVEHWANTMTQPPPEPLPCPVYTPNSDLFEVSLPISLKETHVALRGPSKALGLDGICLSSLRKLPLEVVCCILNILLISDIASAHETARLAFIPKINNATSPSDLRPLYISSYLQRTLNKILSRRLQNSIKLLPIQRAFLPYNSTFENLAVLDGILNDAKSAGRELRLASIDLRKAFDMVSHDSVLWSLRTRGYPEVFINYIERLYLSSKTLIEFGQECRTFRPTRGVRQGDPLSPLLFNLVLDDILSKLDKTNIGYQLTDDFRLMGLAFADDLILLASTKSTLQRLLNIADPLLKSRGLEINTNKSFTISHLFNKKEGKGFINTVSEFNIGDRQLPAKCMSDRWRYLGVDFDSNGRVNSTKDILLNLLNRLTIAPLKPHQRLIFLKDFLIPRLLYKLVSGPRPSYALLSDLDKEIRKVVKSKWLKLENSVPNAYLYTHTAHGGLDIPCLQTFIPRIRLSRLTALQHSTHLGVQWMLTTEHFKKDLAKTRLLCERLGTSIETATQETDYWSQQLHNTFDGAHFKKAHETPFVHYWIKGMPYLSGKEYLNLLKLRINALPTRARLARGRPGYNKRCRHGCHAPETLAHVAQMCDITHKQTIKRHDDVCDRVARLLRERGHEVVRERVFRRPGAPGLKPDLVITTPTEVWVLDAEVCGPNRDLAKARQDKIAKYDVEFLRAALPYPQKPRRFGSITISMSGVWDSESARTLLGLGVTKRNLMDLTVLTLQGTLRIYRSHRVHKSGGYHQARTRTTDS

SEQ ID NO: 506 - protein, 760 aa, Dermanyssus gallinae
MQATEVVEHWANTMTQPPPEPLPCPVYTPNSDLFEVSLPISLKETHVALRGPSKALGLDGICLSSLRKLPLEVVCCILNILLISDIASAHETARLAFIPKINNATSPSDLRPLSISSYLQRTLNKILSRRLQNSIKLLPIQRAFLPYNGTFENLAVLDGILNDAKPAGRELRLASIDLRKAFDMVSHDSVLWSLRTRGYPEVFINYIERLYLSSKTLIEFGQKCRTFRPTRGVRQGDPLSPLLFNLVLDDILSKLDKTNIGYPLTDDFRLMGLACADDLILLASTKSTLQRLLNIADPLLKSRGLEINTNKSFTISHLFNRKEDKGFINTVSEFNVGDRQLPAKGMSDRWRYLGVDFDSNGRVDSTKDILLNLLNRFTIAPLKPHQRLIFLKDFLSPRLLYKLVSGPRPSYALLGDLDKEIRKVVKSKWLKLENSVPNAYLYTHTAHGGLDIPCLQTFIPRIRLSRLTALQHSTHLGVQWMLTTEHFKKDLAKTRLLCERLGISIETATQETDYWSQQLHNTFDGAHFKKAHETPFVHYWIKGMPYLSGKEYLTLLKLRINALPTRARLARGRPGYNKRCRHGCHAPETLAHVAQMCDITHKQTIKRHDDVCDRVARLLRERGHEVVRERVFRRPGAPGLKPDLVITTPTEVWVLDAEVCGPNRDLAKARQDKIAKYDVEFLRAALPYPQKPRRFGSITISMSGVWDSESARTLLGLGVTKRNLMDLIVLTLQGTLRIYRSHRVHKSGGYHQARTRTTDS

SEQ ID NO: 507 - protein, 1130 aa, Dermanyssus gallinae
MQKIFRLRLYHICSYVATVMGQHNYTYIYIYLYIYIFMYIYIYIYIYIYIYIFAGRLSCQTCGRVCKSGAGLASHIRLTHNQREVRATSQTPNQSQTNNLILSSSQNDTAASNNNFNPPCTSRVSQPNCKCPSSTCLKVFKSKSGLNLHRRRAHPDEYNENILAPPSKKARWNPQDRELLATLEADFILDNNNETPREIDHLLATNFNSRTPGAIRGQRNSQAHKDLVEDLLKKRSLLDSNLDGSELPEPSRPRYSESDGPYNPSQKDIIISKIQALTNTFPKRNIISTDLTHLSNIICSGENHTIALNEFLNKHFTHTVRRRAFRETPSTEARVSKRQQRRQDYATTQKLFSQNRSKCAHEVLDGKHTIHNMQATEVVEHWANTMTQPPPEPLPCPVYTPNSDLFEVSLPISLKETHVALRGPSKALGLDGICLSSLRKLPLEVVCCILNILLISDIASAHETARLAFIPKINNATSPSDLRPLSISSYLQRTLNKILSRRLQNSIKLLPIQRAFLPYNGTFENLAVLDGILNDAKSAGRELRLASIDLRKAFDMVSHDSVLWSLRTRGYPEVFINYIERLYLSSKTLIEFGHECRTFRPTRGVRQGDPLSPLLFNLVLDDILSKLDKTNIGYQLTDDFRLMGLAFADDLILLASTKSTLQRLLNIADPLLKSRGLEINTNKSFTISHLFNRKEGKGFINTVPEFNVGDRQLPAKGMSDRWRYLGVDFDSNGRVDSTRDILLNLLNRLTIAPLKPHQRLIFLKDFLIPRLLYKLVSGPRPSYALLSDLDKEIRKVVKSKWLKLENSVPNAYLYTHTAHGGLDIPCLQTFIPRLRLSRLTALQHSTHLGVQWMLTTEHFKKDLAKTRLLCERLGTSIETATQETDYWSQQLHNTFDGAHFKKAHETPFVHYWIKGMPYLSGKEYLNLLKLRINALPTRARLARGRPGYNKRCRHGCHAPETLAHVAQMCDTTHKQTIKRHDDVCDRVARLLRERGHEVVRERVFRRPGAPGLKPDLVITTPTEVWVLDAEVCGPNRDLAKARQDKIAKYDVEFLRAALPDPQKPRRFGSITISMSGVWDSESARTLLGLGVTKRNLMDLTVLTLQGTLRIYRSHRVHKSGGLPSSKDTDN

SEQ ID NO: 508 - protein, 1105 aa, Dermanyssus gallinae
MRGESLRYIKSSIKQVRHETLCRQKVALAFIYIYIYIYIYIYIYIYIYIYIYIYIYIYIYIYIYIYTYIYIYIYIYIYIHIYMASRDGSNTAGRLSCQTCGRVCKSGAGLASHIRLTHNQREVRATSQTPNRSQTNNLILSSSQNDTAASNNNFNPPSTSRVSQPNCKCPSSTCLKVFNSKSGLNLHRRRAHPDEYNENILAPPSKKARWNPQDRELLATLEADFILDNNNETPREIDHLLATNFNSRTPGAIRGQRNSQAHKDLVEDLLKKRSLLDSNLDGSELPERSRPRYSESDGPYNPSQKDIIISKIQALTNTFPKRNIISTDLTHLSNIICSGEDHTIALNEFLNKHFTHTVRRRAFRETPSTEARVSKRQQRRQDYATTQKLFSQNRSKCAHEVLDGKHTIHNMQATEVVEHWANTMTQPPPEPLPCPVYTPNSDLFEVSLPISLKETHVALRGPSKALGLDGICLSSLRKLPLEVVCCILNILIISDIASAHETARLAFIPKINNATSPSDLRPLSISSYLQRTLNKILSRRLQNSIKLLPIQRAFLPYNGTFENLAVLDGILNDAKSAGRELRLASIDLRKAFDMVSHDSVLWSLRTRGYPEVFINYIERLYLSSKTLIEFGQECRTFRPTRGVRQGDHLSPLLFNLVLDDILSKLDETNIGYQLTDDFRLMGLAFADDLILLASTKSTLQRLLNIADPLLKSRGLEINTNKSFTISHLFNRKEGKGFINTVSEFNVGDRQLPAKGMSDRWRYLGVDFDSNGRVDSTKDILLNLLNRLTIAPLKPHQRLIFLKDFLIPRLLYKLVSGPRPSYALLSDLDKEIRKVVKSKWLKLENSVPNAYLYTHTAHGGLDIPCLQTFIPRIRLSRLTALQHSTHLGVQWMLTTEHFKKDLAKTRLLCERLGTSIETATQETDYWSQQLHNTFDGAHFKKAHETPFVHYWIKGMPYLSGKEYLNLLKLRINALPTRARLARGRPGYNKRCRHGCHAPETLAHVAQMCDITHKQTIKRHDDVCDRVARLLRERGHEVVRERVFRRPGAPGLKPDLVITTPTEVWVLDAEVCGPNRDLAKARQDKIANYDVEFLRAALPYPQKPRRF

SEQ ID NO: 509 - protein, 1088 aa, Dermanyssus gallinae
MASRDGSNTAGRLSCQTCGRVCKSGAGLASHIRLTHNQREVRATSQTPNRSQTNNLILSSSQNDTAASNDNFNPPSTSRVSQPNCKCPSSTCLRVFNSKSGLNLHRRRAHPDEYNENILAPPSKKARWNPQDRELLATLEADFILDNNNETPREIDHLLATNFNSRTPGAIRGQRNSQAHKDLVEDLLKKRSLLDSNLDGSELPERSRPRYSESDGPYNPSQKDIIISKIQALTNTFPKRNIISTDLTHLSNIICSGEDHTIALNEFLNKHFTHTVRRRAFRETPSTEARVSKRQQRRQDYATTQKLFSQNRSKCAHEVLDGKHTIHNMQATEVVEHWANTMTQPPPEPLPCPVYTPNSDLFEVSLPISLKETHAALRGPSKALGLDGICLSSLRKLPLEVVCCILNILIISDIASAHETARLAFIPKINNATSPSDLRPLSISSYLQRTLNKILSRRLQNSIKLLPIQRAFLPYNGTFENLAVLDGILNDAKSAGRELRLASIDLRKAFDMVSHDSVLWSLRTRGYPEVFINYIERLYLSSKTLIEFGQECRTFRPTRGVRQGDPLSPLLFNLVLDDILSKLDQTNIGYQLTDDFRLMGLAFADDLILLASTKSTLQRLLNIADPLLKSRGLEINTNKSFTISHLFNRKEGKGFINTVSEFNVGDRQLPAKGMSDRWRYLGVDFDSNGRVDSTKDILLNLLNRLTIAPLKPHQRLIFLKDFLIPRLLYKLVSGPRPSYALLSDLDKEIRKVVKSKWLKLENSVPNAYLYTHTAHGGLDIPCLQTFIPRIRLSRLTALQHSTHLGVQWMLTTEHFKKDLAKTRLLCERLGTSIETATQETDYWSQQLHNTFDGAHFKKAHETPFVHYWIKGMPYLSGKEYLNLLKLRINALPTRARLARGRPGYNKRCRHGCHAPETLAHVAQMCDITHKQTIKRHDDVCDRVARLLRERGHEVVRERVFRRPGAPGLKPDLVITTPTEVWVLDAEVCGPNRDLAKARQDKIAKYDVEFLRAALPYPQKPRRFGSITISMSGVWDSESARTLLGLGVTKRNLMDLTVLTLQGTLRIYRSHRIHKSGGYHQARTRTTDS

SEQ ID NO: 510 - protein, 760 aa, Dermanyssus gallinae
MQATEVVEHWANTMTQPPPEPLPCPVYTPNSDLFEVSLPISLKETHVALRGPSKALGLDGICLSSLRKLPLEVVCCILNILLISDIASAHETARLAFIPKINNATSPSDLRPLSISSYLQRTLNKILSRRLQNSIKLLPIQRAFLPYNGTFENLAVLDGILNDAKSAGRELRLASIDLRKAFDMVSHDSVLWSLRTRGYPEVFINYIERLYLSSKTLIEFGQECRTLRPTRGVRQGDPLSPLLFNLVLDDILSKLDKTNIGYQLTDDFRLMGLAFADDLILLASTKSTLQRLLNIADPLLKSRGLEINTNKSFTISHLFNRKEGKGFINTVPEFNVGDRQLPAKGMSDRWRYLGVDFDSNGRVDSTRDILLNLLNRLTIAPLKPHQRLIFLKDFLIPRLLYKLVSGPRPSYALLSDLDKEIRKVVKSKWLKLENSVPNAYLYTHTAHGGLDIPCLQTFIPRLRLSRLTALQHSTHLGVKWMLTTEHFKKDLAKTRLLCERLGTSIETATQETDYWSQQLHNTFDGAHFKKAHETPFVHYWIKGMPYLSGKEYLNLLKLRINALPTRARLARGRPGYNKRCRHGCHAPETLAHVAQMCDTTHKQTIKRHDDVCDRVARLLRERGHEVVRDRVFRRPGAPGLKPDLVITTPTEVWVLDAEVCGPNRDLAKARQDKIAKYDVEFLRAALPDPQKPRRFGSITISMSGVWDSESARTLLGLGVTKRNLMDLTVLTLQGTLRIYRSHRVHKSGGYHQARTRTTDS

SEQ ID NO: 511 - protein, 1088 aa, Dermanyssus gallinae
MASRDGSNTAGRLSCQTCGRVCKSGAGLASHIRLTHNQREVRATSQTPNRSQTNNLILSSSQNDTAASNNNFNPPSTSRVSQPNCKCPSSTCLKVFNSKSGLNLHRRRAHPDEYNENILAPPSKKARWNPQDRELLATLEADFILDNNNETPREIDHLLATNFNSRTPGAIRGQRNSQAHKGLVEDLLKKRSLLDSNLDGSELPERSRPRYSESDGPYNPSQKDIIISKIQALTNTFPKRNIISTDLTHLSNIICSGEDHTIALNEFLNKHFTHTVRRRAFRETPSTEARVSKRQQRRQDYATTQKLFSQNRSKCAHEVLDGKHTIHNMQATEVVEHWANTMTQPPPEPLPCPVYTPNSDLFEVSLPISLKETHVALRGPSKALGLDGICLSSLRKLPLEVVCCILNILIISDIASAHETARLAFIPKINNATSPSDLRPLSISSYLQRTLNKILSRRLQNSIKLLPIQRAFLPYNGTFENLAVLDGVLNDAKSARRELRLASIDLRKAFDMVSHDSVLWSLRTRGYPEVFINYIERLYLSSKTLIEFGQECRTFRPTRGVKQGDPLSPLLFNLVLDDILSKLDKTNIGYQLTDDFRLMGLAFADDLILLASTKSTLQRLLNIADPLLKSRGLEINTNKSFTISHLFNRKEGKGFINTVSEFNVGDRQLPAKGMSDRWRYLGVDFDSNGRVDSTKDILLNLLNRLTIAPLKPHQRLIFLKDFLIPRLLYKLVSGPRPSYALLSDLDKEIRKVVKSKWLKLENSVPNAYLYTHTAHGGLDIPCLQTFIPRIRLSRLTALQHSTHLGVQWMLTTEHFKKDLAKTRLLCERLGTSIETATQETDYWSQQLHNTFDGAHFKKAHETPFVHYWIKGMPYLSGKEYLNLLKLRINALPTRARLARGRPGYNKRCRHGCHAPETLAHVAQMCDITHKQTIKRHDDVCDRVARLLRERGHEVVRERVFRRPGAPGLKPDLVITTPTEVWVLDAEVCGPNRDLAKARQDKIAKYDVEFLRAALPYPQKPRRFGSITISMSGVWDSESARTLLGLGVTKRNLMDLTVLTLQGTLRIYRSHRIHKSGGYHQARTRTTDS

SEQ ID NO: 512 - protein, 1088 aa, Dermanyssus gallinae
MASRDGSNTAGRLSCQTCGRVCKSGAGLASHIRLTRNQREVRATFQTPNRSQTNNLILSSSQNDTAASNNNFNPPSTSRVSQPNCKCPSSTCLKVFNSKSGLNLHRRRAHPDEYNENILAPPSKKARWNPQDRELLATLEADFILDNNNETPREIYHLLATNFNSRTPGAIRGQRNSQAHKDLVEDLLKKRSLLDSNLDGSELPERSRPRYSESDGPYNPSQKDIIISKIQALTNTFPKRNIISTDLTHLSNIICSGEDHTIALNEFLNKHFTHTVRRRAFRETPSTEARVSKRQQRRQDYATTQKLFSQNRSKCAHEVLDGKHTIHNMQATEVVEHWANTMTQPPPEPLPCPVYTPNSDLFEVSLPISLKETHVALRGPSKALGLDGICLSSLRKLPLEVVCCILNILIISDIASAHETARLAFIPKINNATSPSDLRPLSISSYLQRTLNKILSRRLQNSIKLLPIQRAFLPYNGTFENLAVLDGILNDAKSAGRELRLASIDLRKAFDMVSHDSVLWSLRTRGYPEVFINYIERLYLSSKTLIEFGQECRTFRPTRGVRQGDPLSPLLFNLVLDDILSKLDKTNIGYQLTDDFRLMGLAFADDLILLASTKSTLQRLLNIADPLLKSRGLEINTNKSFTISHLFNRKEGKGFINTVSEFNVGDRQLPAKGMSDRWRYLGVDFDSNGRVDSTKDILLNLLNRLTIAPLKPHQRLIFLKDFLIPRLLYKLVSGPRPSYALLSDLDKEIRKVVKSKWLKLENSVPNAYLYTHTAHGGLDIPCLQTFIPRIRLSRLTALQHSTHLGVQWMLTTEHFKKDLAKTRLLCERLGTSIETATQETDYWSQQLHNTFDGAHFKKAHETPFVHYWIKGMPYLSGKEYLNLLKLRINALPTRARLARGRPGYNKRCRHGCHAPETLAHVAQMCDITHKQTIKRHDDVCDRVARLLRERGHEVVRERVFRRPGAPGLKPDLVITTPTEVWVLDAEVCGPNRDLAKARQDKIAKYDVEFLRAALPYPQKPRRFGSITISMSGVWDSESARTLLGLGVTKRNLMDLTVLTLQGTLRIYRSHRIHKSGGYHQARTRTTDS

SEQ ID NO: 513 - protein, 1088 aa, Dermanyssus gallinae
MASRDGSNTAGRLSCQTCGRVCKSGAGLASHIRLTHNQREVRATSQTPNQSQTNNLILNSSQNDTAASNNNFNPPSTSRVSQPNCKCLSSTCLKVFKSKSGLNLHRRRAHPDEYNDNILAPPSKKARWNPQDRELLATLEADFILDNNNETPREIDHLLATNFNSRTPGAIRGQRNSQAHKDLVEDLLKKRSLLDSNLDGSGLPEPSRPRYSESDGPYNPSQKDIIISKIQALTNTFPKRNIISTDLTHLSNIICSGENHTIALNEFLNKHFTHTVRRRAFRETPSTEARVSKRQQRRQDYATTQKLFSQNRSKCAHEVLDGKHTIHNMQATEVVEHWANTMTQPPPEPLPCPVYTPNSDLFEVSLPISLKETHVALRGPSKALGLDGICLSSLRKLPLEVVCCTLNILLISDIALAHETARLAFIPKINNVTSPSDLRPLSISSYLQRTLNKILSRRLQNSIKLLPIQRAFLPYNGTFENLAVLDGILNDAKSAGRELRLASIDLRKAFDMVSHDSVLWSLRTRGYPEVFINYIERLYLSSKTLIEFGQECRTFRPTRGVRQGDPLSPLLFNLVLDDILSKLDKTNIGYQLTDDFRLMGLAFADDLILLASTKSTLQRLLNIADPLLKSRGLEINTNKSFTISHLFNRKEGKGFINTVPEFNVGDRQLPAKGMSDRWRYLGVDFDSNGRVDSTRDILLNLLNRLTIAPLKPHQRLIFLKDFLIPRLLYKLVSGPRPSYALLSDLDKEIRQVVKSKWLKLENSVPNAYLYTHTAHGGLDIPCLQTFIPRLRLSRLTALQHSTHLGVQWMLTTEHFKKDLAKTRLLCERLGTSIETATQETDYWSQQLHNTFDGAHFKKAHETPFVHYWIKGMPYLSGKEYLNLLKLRINALPTRARLARGRPGYNKRCRHGCHAPETLAHVAQMCDTTHKQTIKRHDDVCDRVARLLRERGHEVVRERVFRRPGAPGLKPDLVITTPTEVWVLDAEVCGPNRDLAKARQDKIAKYDVEFLRAALPDPQKPRRFGSITISMSGVWDSESARTLLGLGVTKRNLMDLTVLTLQGTLRIYRSHRVHKSGGYHQARTRTTDS

SEQ ID NO: 514 - protein, 1088 aa, Dermanyssus gallinae
MASRDGSNTAGRLSCQTCGRVCKSGAGLASHIRLTHNQREVRATSQTPNQSQTNNLILSSSQNDTAASNNNFNPPSTSRVSQPNCKCPSSTCLKVFKSKSGLNLHRRRAHPDEYNENILAPPSKKARWNPQDRELLATLEADFILDNNNETPREIDHLLATNFNSRTPGAIRGQRNSQAHKDLVEDLLKKRPLLDSNLDGSELPEPSRPRYSESDGPYNPSQKDIIISKIQALTNTFPKRNIISTDLTHLSNIICSGENHTIALNEFLNKHFTHTVRRRAFRETPSTEARVSKRQQRRQDYATTQKLFSQNRSKCAHEVLDGKHTIHNMQATEVVEHWANTMTQPPPEPLPCPVYTPNSDLFEVSLPISLKETHVALRGPSKALGLDGICLSSLRKLPLEVVCCILNILLISDIASAHETARLAFIPKINNATSPSDLRPLSISSYLQRTLNKILSRRLQNSIKLLPIQRAFLPYNGTFENLAVLDGILNDAKSAGRELRLASIDLRKAFDMVSHDSVLWSLRTRGYPEVFINYIERLYLSSKTLIEFGQECRTFRPTRGVRQGDPLSPLLFNLVLDDILSKLDKTNIGYQLTDDFRLMGLAFADDLILLASTKSTLQRLLNIADPLLKSRGLEINTNKSFTISHLFNRKEGKGFINTVPEFNVGDRQLPAKGMSDRWRYLGVDFDSNGRVDSTRDILLNLLNRLTIAPLKPHQRLIFLKDFLIPRLLYKLVSGPRPSYALLSDLDKEIRKVVKSKWLKLENSVPNAYLYTHTAHGGLDIPCLQTFIPRLRLSRLTALQHSTHLGVQWMLTTEHFKKDLAKTRLLCERLGTSIETATQETDYWSQQLHNTFDGAHFKKAHETPFVHYWIKGMPYLSGKEYLNLLKLRINALPTRARLARGRPGYNKRCRHGCHAPETLAHVAQMCDTTHKQTIKRHDDVCDRVARLLRERGHEVVRERVFRRPGAPGLKPDLVITTPTEVWVLDAEVCGPNRDLAKARQDKIAKYDVEFLRAALPDPQKPRRFGSITISMSGVWDSESARTLLGLGVTKRNLMDLTVLTLQGTLRIYRSHRVHKSGGYHQARTRTTDS

SEQ ID NO: 515 - protein, 1088 aa, Dermanyssus gallinae
MASRDGSNTAGRLSCQTCGRVCKSGAGLASHIRLTHNQREVRATSQTPNRSQTNNLILSSSQNDTAASNDNFNPPSTSRVSQPNCKCPSSTCLKVFNSKSGLNLHRRRAHPDEYNENILAPPSKKARWNPQDRELLATLEADFILDNNNETPREIDHLLATNFNSRTPGAIRGQRNSQAHKDLVEDLLKKRSLLDSNLDGSELPERSRPRYSESDGPYNPSQKDIIISKIQALTNTFPKRNIISTDLTHLSNIICSSEDHTIALNEYLNKHFTHTVRRRAFRETPSTEARVSKRQQRRQDYATTQNFFSQNRSKCAHEVLDGKHTIHNMQATEVVEHWANTMTQPPPEPLPCPVYTPNSDLFEVSLPISLKETHAALRGLSKALGLDGICLSSLRKLPLEVVCCILNILIISDIASAHETARLAFFPKINNATSPSDLRPLSISSYLQRTLNKILSRRLQNSIKLLPIQRAFLPYNGTFKNLAVLDGILNDAKSAGRELRLASIDLRKAFDMVSHDVVLWSLRTRGYPEVFINYIERLYLSSKTLIEFGQECRTFRPTRGVRQGDPLSPLLFNLVLDDILSKLDQTNIGYQLTDDFRLMGLAFADDLILLASTKSTLQRLLNIADPLLKSRGLEINTNKSFTISHLYNRKEGKGFINTVSEFNVGDRQLPAKGMSDRWRYLEVDFDSNGRVDSTKDILLNLLNRLTIAPLKPHQRLIFLKDFLIPRLLYKLVSGPRPSYALLSDLDKEIRKVVKSKWLKLENSVPNAYLYTHTAHGGLDIPCLQTFIPRIRLSRLTALQHSTHLGVQWMLTTEHFKKDLAKTRLLCERLGTSIETATQETDYWSQQLHNTFDGAHFKKAHETPFVHYWIKGMPYLSGKEYLNLLKLRINALPTRARLARGRPGYNKRCRHGCHAPETLAHVAQMCDITHKQTIKRHDDVCDRVARLLRERGHEVVRERVFRRPGAPGLKPDLVITTPTEVWVLDTEVCGPNRDLAKARQDKIAKYDVEFLRAALPYPQKPRRFGSITISMSGVWDSESARTLSGLGVTKRNLMDLTVLTLQGTLRIYRSHRIHKSGGYHQARTRTTDS

SEQ ID NO: 516 - protein, 760 aa, Dermanyssus gallinae
MQATEVVEHWANTMTQPPPEPLPCPVYTPNSDLFEVSLPISLKETHAALRGPSKALGLDGICLSSLRKLPLEVVCCILNILIISDIASAHETARLAFIPKINNATSPSDLRPLSISSYLQRTLNKILSRRLQNSIKLLPIQRAFLPYNGTFENLAVLDGILNDAKSAGRELRLASIDLRKAFDMVSHDSVLWSLRTRGYPEVFINYIERLYLSSKTLIEFGQECRTFRPTRGVRQGDPLSPLLFNLVLDDILSKLDQTNIGYQLTDDFRLMGLAFADDLILLASTKSTLQRLLNIADPLLKSRGLEINTNKSFTISHLFNRKEGKGFINTVSEFNVGDRQLPAKGMSDRWRYLGVDFDSNGRVDSTKDILLNLLNRLTIAPLKPHQRLIFLKDFLIPRLLYKLVSGPRPSYALLSDLDKEIRKVVKSKWLKLENSVPNAYLYTHTAHGGLDIPCLQTFIPRIRLSRLTALQHSTHLGVQWMLTTEHFKKDLAKTRLLCERLGTSIETATQETDYWSQQLHNTFDGAHFKKAHETPFVHYWIKGMPYLSGKEYLNLLKLRINALPTRARLARGRPGYNKRCRHGCHAPETLAHVAQMCDITHKQTIKRHDDVCDRVARLLRERGHEVVRERVFRRPGAPGLKPDLVITTPTEVWVLDAEVCGPNRDLAKARQDKIAKYDVEFLRAALPYPQKPRRFGSITISMSGVWDSESARTLLGLGVTKRNLMDLTVLTLQGTLRIYRSHRIHKSGGYHQARTRTTDS

SEQ ID NO: 517 - protein, 1088 aa, Dermanyssus gallinae
MASRDGSNTAGRLSCQTCGRVCKSGAGLASHIRLTHNQREVRATSQTPNQSQTNNLILSSSQNDTAASNNNFNPPSTSRVSQPNCKCPSSTCLKVFKSKSGLNLHRRRAHPDEYNENILAPPSKKARWNPQDRELLATLEADFILDNNNETPREIDHLLATNFNSRTPGAIRGQRNSQAHKDLVEDLLKKRSLLDSNLDGSELPEPSRPRYSESDGPYNPSQKDIIISKIQALTNTFPKRNIISTDLTHLSNIICSGENHTIALNEFLNKHFTHTVRRRAFRETPSTEARVSKRQQRRQDYATTQKLFSQNRSKCAHEVLDGKHTIHNMQATEVVEHWANTMTQPPPEPLPCPVYTPNSDLFEVSLPISLKETHVALRGPSKALGLDGICLSSLRKLPLEVVCCILNILLISDIASAHETARLAFIPKINNATSPSDLRPLSISSYLQRTLNKILSRRLQNSIKLLPIQRAFLPYNGTFENLAVLDGIFNDAKSAGRELRLASIDLRKAFDMVSHDSVLWSLRTRGYPEVFINYIERLYLSSKTLIEFGQECRTFRPTRGVRQGDPLSPLLFNLVLDDILSKLDKTNIGYQLTDDFRLMGLAFADDLILLASTKSTLQRLLNIADPLLKSRGLEINTNKSFTISHLFNRKEGKGFINTVPEFNVGDRQLPAKGMSDRWRYLGVDFDSNGRVDSTRDILLNLLNRLTIAPLKPHQRLIFLKDFLIPRLLYKLVSGPRPSYALLSDLDKEIRKVVKSKWLKLENSVPNAYLYTHTAHGGLDIPCLQTFIPRLRLSRLTALQHSTHLGVQWMLTTEHFKKDLAKTRLLCERLGTSIETATQETDYWSQQLHNTFDGAHFKKAHETPFVHYWIKGMPYLSGKEYLNLLKLRINALPTRARLARGRPGYNKRCRHGCHAPETLAHVAQMCDTTHKQTIKRHDDVCDRVARLLRERGHEVVRERVFRRPGAPGLKPDLVITTPTEVWVLDAEVCGPNRDLAKARQDKIAKYDVEFLRAALPDPQKPRRFGSITISMSGVWDSESARTLLGLGVTKRNLMDLTVLTLQGTLRIYRSHRVHKSGGYHQARTRTTDS

SEQ ID NO: 518 - protein, 1088 aa, Dermanyssus gallinae
MASRDGSNTAGRLSCQTCGRVCKSGAGLASHIRLTHNQREVRATSQTPNQSQTNNLILSSSQNDTAASNNNFNPPSTSRVSQPNCKCPSSTCLKVFKSKSGLNLHRRRAHPDEYNENILAPPSKKARWNPQDRELLATLEADFILDNNNETPREIDHLLATNFNSRTPGAIRGQRNSQAHKDLVEDLLKKRPLLDSNLDGSELPEPSRPRYSESDGPYNPSQKDIIISKIQALTNTFPKRNIISTDLTHLSNIICSGENHTIALNEFLNKHFTHTVRRRAFRETPSTEARVSKRQQRRQDYATTQNLFSQNRSKCAHEVLDGKHTIHNMQATEVVEHWANTMTQPPPEPLPCPVYTPNSDLFEVSLPISLKETHVALRGPSKALGLDGICLSSLRKLPLEVVCCILNILLISDIASAHETARLAFIPKINNATSPSDLRPLSISSYLQRTLNKILSRRLQNSIKLLPIQRAFLPYNGTFENLAVLDGILNDAKSAGRELRLASIDLRKAFDMVSHDSVLWSLRTRGYPEVFINYIERLYLSSKTLIEFGQECRTFRPTRGVRQGDPLSPLLFNLVLDDILSKLDKTNIGYQLTDDFRLMGLAFADDLILLASTKSTLQRLLNIADPLLKSRGLEINTNKSFTISHLFNRKEGKGFINTVPEFNVGDRQLPAKGMSDRWRYLGVDFDSNGRVDSTRDILLNLLNRLTIAPLKPHQRLIFLKDFLIPRLLYKLVSGPRPSYALLSDLDKEIRKVVKSKWLKLENSVPNAYLYTHTAHGGLDIPCLQTFIPRLRLSRLTALQHSTHLGVQWMLTTEHFKKDLAKTRLLCERLGTSIETATQETDYWSQQLHNTFDGAHFKKAHETPFVHYWIKGMPYLSGKEYLNLLKLRINALPTRARLARGRPGYNKRCRHGCHAPETLAHVAQMCDTTHKQTIKRHDDVCDRVARLLRERGHEVVRERVFRRPGAPGLKPDLVITTPTEVWVLDAEVCGPNRDLAKARQDKIAKYDVEFLRAALPDPQKPRRFGSITISMSGVWDSESARTLLGLGVTKRNLMDLTVLTLQGTLRIYRSHRVHKSGGYHQARTRTTDS

SEQ ID NO: 519 - protein, 681 aa, Dermanyssus gallinae
MQATEVVEHWANTMTQPPPEPLPCPVYTPNSDIFEVSLPISLKETHVALRGPSKALGLDGICLSSLRKLPLEIVCCILNILLISDIASAHETARLAFIPKINNATSPSDLRPLSISSYLQRTLNKILSRRLQNSIKLLPIQRAFLPYNGTFENLAVLDGILKDAKSAGRELRLASIDLRKAFDMVSHDSVLWSLRTRGYPEVFINYIERLYLSSKTLIEFGQECRTFRPTRGVRQGDPLPPLLFNLVLDDILSKLDKTNIGYQLTDDFRLMGLAFADDLILLASTKSTLQRLLNIADPLLKSRGLEINTNKSFTISHLFNRKEGKGFINTVSEFNVGDRQLPAKGMSDRWRYLGVDFDSNGRVDSTKDILLNLLNRLTIAPLKPHQRLIFLKDFLIPRLLYKLVSGPRPSYALLSDLDKEIRKVVKSKWLKLENSVPNAYLYTHTAHGGLDIPCLQTFIPRIRLSRLTALQHSTHLGVQWMLTTEHFKKDLAKTRLLCERLGTSIETATQETDYWSQQLHNTFDGAHFKKAYETPFVHYWIKGMPYLSGKEYLNLLKLRINALPTRARLARGRPGYNKRCRHGCHAPETLAHVAQMCDIANKQTIKRHDDVCDRVARLLRERGHEVVRERVFRRPGAPGLKPDLVITTPTEVWVLDAEVCGPNRDLAKARQDKIANMTSSS

SEQ ID NO: 520 - protein, 760 aa, Dermanyssus gallinae
MQATEVVEHWAYTMTQPPPEPLPCLVYTPNSDLFEVSLPIPLKETHVALRGSSKALGLDGICLSSLRKLPLEVVCCILNILLISDIASAHETARLAFIPKINNATSPSDLRPLSISSYLQRTLNKILSRRLQNSIKLLPIQRAFLPYNGTFENLAVLDGILNDAKSAGRELRLASIDLRKAFDMVSHDSVLWSLRTRGYPEVFINYIERLYLSSKTLIEFGQECRTFRPTRGVRQGDPLSPLLFNLVLDDILSKLDKTNIGYQLTDDFRLMGLAFADDLILLASTKSTLQRLLNIADPLLKSRGLEINTNKSFTISHLFNRKEGKGFINTVSEFNVGDRQLPAKGMSDRWRYLGVDFGSNGRVDSTKDILLNLLNRLTIAPLKPHQRLIFLKDFLIPRLLYKLVSGPRPSYALLSDLDKEIRKVVKSKWLKLENSVPNAYLYTHTAHGGLDIPCLQTFIPRIRLSRLTALQHSTHLGVQWSLTTEHFKKDLAKTRLLCERLGTSIETATQETDYWSQQLHNTFDGAHFKKAHETPFVHYWIKGMPYLSGKEYLNLLKLRINALPTRARLARGRPGYNERCRHGCHAPETLAHVAQMCDITHRQTIKRHDDVCDRVARLLRERGHEVVRERVFRRPGAPGLKPDLVITTPTEVWVLDAEVCGPNRDLAKARQDKIAKYDVEFLRAALPYPQKPRRFGSITISMSSVWDSESARTLLGFGVTKRNLMDLTVLTLQGTLRIYRSHRVHKSGGYHQARTRTTDS

SEQ ID NO: 521 - protein, 1089 aa, Dermanyssus gallinae
MASRDGSNTAGRLSCQTCGRVCKSGAGLASHIRLTHNQREVRATSQTPNRSQTNNLILSSSQNDTAASNNNFNPPSTSRVSQPNCKCPSSTCLKVFNSKSGLNLHRRRAHPDEYNENILAPPPSKKARWNPQDRELLATLEADFILDNNNETPREIDHLLATNFNSRTSGAIRGQRNSQAHKDLVEDLLKKRSLLDSNLDGSELPERSRPRYSESDGPYNPSQKDIIISKIQALTNTFPKRNIISTDRTHLSNIICSGEDHTIALNEFLNKHFTHTVRRRAFRETPSTEARVSKRQQRRQDYATTQKLFSQNRSKCAHEVLDGKHTIHNMQATEAVEHWANTMTQPPPEPLPCPVYTPNSDLFEVSLSISLKEAHVALRGPSKALGLDGICLSSLRKLPLEVVCCILNILIISDIASAHETARLAFIPKINNATSPSDLRPLSISSYLQRTLNKILSRRLQNSIKLLPIQRAFLPYNGTFENLAVLDGILNDAKSAGRELRLASIDLRKAFDMVSHDSVLWSLRTRGYPEVFINYIERLYLSSKTLIEFGQECRTFRPTRGVRQGDPLPPLLFNLVLDDILPKLDKTNIGYQLTDDFRLMGLAFADDLILLASTKSTLQRLLNIADLLLKSRGLEINTNKSFTISHLFNRKEGKGFINTVSEFNVGDRQLPAKGMSDRWRYLGVDFDSNGRVDSTKDILLNLLNRLTIAPLKPHQRLIFLKDFLIPRLLYKLVSGPRPSYALLSDLDKEIRKVVKSKWLKLENSVPNAYLYTHTAHGGLDISCLQTFIPRIRLSRLTALQHSTHLGVQWMLTTEHFKKDLAKTRLLCERLGTSLETATQETDYWSQQLHNTFDGAHFKKAHETPFVHYWIKGMPYLSGKEYLNLLKLRINALPTRARLARGRPGYNKRCRHGCHAPETLVHVAQMCDITHKQTIKRHDDVCDRVARLLRERGHEVVRERVFRRPGAPGLKPDLVITTPTEVWVLDAEVCGPNRDLAKARQDKIAKYDVEFLRAALPYPQKPRRFGSITISMSGVWDSESARTLLGLGVTKRNLMDLTVLTLQGTLRIYRSHRIHKSGGYHQARTRTTDS

SEQ ID NO: 522 - protein, 1088 aa, Dermanyssus gallinae
MASRDGSNTAGRLSCQTCGRVCKSGAGLASHIRLTHNQREVRATSQTPNQSQTNNLILSSSQNDTAASNNNFNPPSTSRVSQPNCKCPSSTCLKVFKSKSGLNLHRRRAHPDEYNENILAPPSKKARWNPQDRELLATLEADFILDNNNETPREIDHLLATNFNSRTPGAIRGQRNSQAHKDLVEDLLKKRPLLDSNLDGSELPEPSRPRYSESDGPYNPSQKDIIISKIQALTNTFPKRNIISTDLTHLSNIICSGENHTIALNEFLNKHFTHTVRRRAFRETPSTEARVSKRQQRRQDYATTQKLFSQNRSKCAHEVLDGKHTIHNMQATEVVEHWANTMTQPPPEPLPCPVYTPNSDLFEVSLPISLKETHVVLHGPSKALGLDGICLSSLRKLPLEVVCCILNILLISDIASAHETARLAFIPKINNATSPSDLRPLSISSYLQRTLNKILSRRLQNSIKLLPIQRAFLPYNGTFENLAVLDGILNDAKSGGRELRLASIDLRKAFDMVSHDSVLWSLRTRGYPEVFINYIERLYLSSKTLIEFGQECRTFRPTRGVRQGDPLSPLLFNLVLDDILSKLDKTNIGYQLTDDFRLMGLAFADDLILLASTKSTLQRLLNIADPLLKSRGLEINTNKSFTISHLFNRKEGKGFINTVPEFNVGDRQLPAKGMSDRWRYLGVDFDSNGRVDSTRDILLNLLNRLTIAPLKPHQRLIFLKDFLIPRLLYKLVSGPRPSYALLSDLDKEIRKVVKSKWLKLENSVPNAYLYTHTAHGGLDIPCLQTFIPRLRLSRLTALQHSTHLGVQWMLTTEHFKKDLAKTRLLCERLGTSIETATQETDYWSQQLHNTFDGAHFKKAHETPFVHYWIKGMPYLSGKEYLNLLKLRINALPTRARLARGRPGYNKRCRHGCHAPETLAHVAQMCDTTHKQTIKRHDDVCDRVARLLRERGHEVVRERVFRRPGAPGLKPDLVITTPTEVWVLDAEVCGPNRDLAKARQDKIAKYDVEFLRAALPDPQKPRRFGSITISMSGVWDSESARTLLGLGVTKRNLMDLTVLTLQGTLRIYRSHRVHKSGGYHQARTRTTDS

SEQ ID NO: 523 - protein, 750 aa, Dermanyssus gallinae
MATTSSSTTTTTTTAAAGATGSVLSSHSQAMTTNAGGFLLGDGRSPPHLRRFKGKKTLWSAVEETRNENVPIYIYIYIYIYIYMYINIYIYIYIYIYIYIYIYIYMYIFIYIYIYIYIYIYMYIFICFPIQRAFLPYNGTFENLAVLDGILNDAKSAGRELRLASIDLRKAFDMVSHDSVLWSLRTRGYPEVFINYIERLYLSSKTLIEFGQECRTFRPTRGVRQGDPLSPLLFNLVLDDILSKLDQTNIGYQLTDDFRLMGLAFADDLILLASTKSTLQRLLNIADPLLKSRGLEINTNKSFTISHLFNRKEGKGFINTVSEFNVGDRQLPAKGMSDRWRYLGVDFDSNGRVDSTKDILLNLLNRLTIAPLKPHQRLIFLKDFLIPRLLYKLVSGPRPSYALLSDLDKEIRKVVKSKWLKLENSVPNAYLYTHTAHGGLDIPCLQTFIPRIRLSRLTALQHSTHLGVQWMLTTEHFKKDLAKTRLLCERLGTSIETATQETDYWSQQLHNTFDGAHFKKAHETPFVHYWIKGMPYLSGKEYLNLLKLRINALPTRARLARGRPGYNKRCRHGCHAPETLAHVAQMCDITHKQTIKRHDDVCDRVARLLRERGHEVVRERVFRRPGAPGLKPDLVITTPTEVWVLDAEVCGPNRDLAKARQDKIAKYDVEFLRAALPYPQKPRRFGSITISMSGVWDSESARTLLGLGVTKRNLMDLTVLTLQGTLRIYRSHRIHKSGGYHQARTRTTDS

SEQ ID NO: 524 - protein, 1088 aa, Dermanyssus gallinae
MASRDGSNTAGRLSCQTCGRVCKSGAGLASHIRLTHNQREVRATSQTPNRSQTNNLILSSSQNDTAASNDNFNPPSTSRVSQPNCKCPSSTCLRVFNSKSGLNLHRRRAHPDEYNENILAPPSKKARWNPQDRELLATLEADFILDNNNETPREIDHLLATNFNSRTPGAIRGQRNSQAHKDLVEDLLKKRSLLDSNLDGSELPERSRPRYSESDGPYNPSQKDIIISKIQALTNTFPKRNIISTDLTHLSNIICSGEDHTIALNEFLNKHFTHTVRRRAFRETPSTEARVSKRQQRRQDYATTQKLFSQNRSKCAHEVLDGKHTIHNMQATEVVEHWANTMTQPPPEPLPCPVYTPNSDLFEVSLPISLKETHAALRGPSKALGLDGICLSSLRKLPLEVVCCILNILIISDIASAHETARLAFIPKINNATSPSDLRPLSISSYLQRTLNKILSRRLQNSIKLLPIQRAFLPYNGTFENLAVLDGILNDAKSAGRELRLASIDLRKAFDMVSHDSVLWSLRTRGYPEVFINYIERLYLSSKTLIEFGQECRTFRPTRGVRQGDPLSPLLFNLVLDDILSKLDQTNIGYQLTDDFRLMGLAFADDLILLASTKSTLQRLLNIADPLLKSRGLEINTNKSFTISHLFNRKEGKGFINTVSEFNVGDRQLPAKGMSDRWRYLGVDFDSNGRVDSTKDILLNLLNRLTIAPLKPHQRLIFLKDFLIPRLLYKLVSGPRPSYALLSDLDKEIRKVVKSKWLKLENSVPNAYLYTHTAHGGLDIPCLQTFIPRIRLSRLTALQHSTHLGVQWMLTTEHFKKGLAKTRLLCERLGTSIETATQETDYWSQQLHNTFDGAHFKKAHETPFVHYWIKGMPYLSGKEYLNLLKLRINALPTRARLARGRPGYNKRCRYGCHAPETLAHVAQMCDITHKQTIKRHDDVCDRVARLLRERGHEVVRERVFRRPGAPGLKPDLVITTPTEVWVLDAEVCGPNRDLAKARQDKIAKYDVEFLRAALPYPQKPRRFGSITISMSGVWDSESARTLLGLGVTKRNLMDLTVLTLQGTLRIYRSHRIHKSGGYHQARTRTTDS

SEQ ID NO: 525 - protein, 1034 aa, Dermanyssus gallinae
MYILISNTIYIYIYIYIYLSLSSFFFLSVSISLLSLSLSLLLSLFSLSLSLSVSSLSSLSLSLSLLFSLSLSLSLSLSLSLSLSLSLSLSLSLVSPLSLSLSLLSPSLALSPSLSLSSLSLSPLFSLSLSLSLYFLITSLFTYFLSIIPLSWLSGFLPSPSLSAFSMAPILHPKRYFIIIQPHNTSQTHYFNRPTLSNIICSGENHTIALNEFLNKHFTHTVRRRAFRETPFTEARVSKRQQRRQDYATTQKLFSQNRSKCAHEVLDGKHTIHNMQATEVVEHWANTMTQPPPEPLPCPVYTPNSDLFEVSLPISLKETHVALRGPSKALGLDGICLSSLRKLPLEVVCCILNILLISDIASAHETARLAFIPKINNATSPGDLRPLSISSYLQRTLNKILSRRLQNSIKLLPIQRAFLPYNGTFENLAVLDGILNDAKSAGRELRLASIDLRKAFDMVSHDSVLWSLRTRGYPEVFINYIERLYLSSKTLIEFGQECRTFRPTRGVRQGDPLSPLLFNLVLDDILSKLDKTNIGYQLTDDFRLMGLAFADDLILLASTKSTLQRLLNIADPLLKSRGLEINTNKSFTISHLFNRKEGKGFINTVPEFNVGDRQLPAKGMSDRWRYLGVDFDSNGRVDSTRDILLNLLNRLTIAPLKPHQRLIFLKDFLIPRLLYKLVSGPRPSYALLSDLDKEIRKVVKSKWLKLENSVPNAYLYTHTAHGGLDIPCLQTFIPRLRLSRLTALQHSTHLGVQWMLTTEHFKKDLAKTRLLCERLGTSIETATQETDYWSQQLHNTFDGAHFKKAHETPFVHYWIKGMPYLSGKEFLNLLKLRINALPTRARLARGRPGYNKRCRHGCHAPETLAHVAQMCDTTHKQTIKRHDDVCDRVARLLRERGHEVVRERVFRRPGAPGLKPDLVITTPTEVWVLDAEVCGPNRDLAKARQDKIAKYDVEFLRAALPDPQKPRRFGSITISMSGVWDSESARTLLGLGVTKRNLMDLTVLTLQGTLRIYRSHRVHKSGGYHQARTRTTDS

SEQ ID NO: 526 - protein, 760 aa, Dermanyssus gallinae
MQATEVVEHWANTMTQPPPEPLPCPVYTPNSDLFEVSLPISLKETHVALRGPSKALGLDGICLSSLRKLPLEVVCCILNILLISDIASAHETARLAFIPKINNATSPSDLRPLSISSYLQRTLNKILFRRLHNSIKLLPIQRAFLPYNGTFENLAVLDGILNDAKSAGRELRLASIDLRKAFDMVSHDSVLWSLRTRGYPEVFINYIERLYLSSKTLIEFGQECRTFRPTRGVRQGDPLSPLLFNLVLDDILSKLDKTNIGYQLTDDFRLMGLAFADDLILLASTKSTLQRLLNIADPLLKSRGLEINTNKSFTISHLFNMKEGKGFINTVSEFNVGDRQLPAKGMSDRWRYLGVDFDSNGRVDSTKDILLNLLNRLTIAPLKPHQRLIFLKDFLIPRLLYKLVSGPRPSYALLSDLDKEIRKVVKSKWLKLENSVPNAYLYTHTAHGGLDIPCLQTFIPRIRLSRLTALQHSTHLGVQWMLTTEHFKKDLARTRLLCERLGNSIETATQETDYWSQQLHNTFDGAHFKKAHETPFVHYWIKGMPYLSGKEYLNLLKLRINALPTRARLARRRPGYNKRCRHGCHAPETLAHVAQMCDITHKQTIKRHDDVCDRVARLLRERGHEVVRERVFRRPGAPGLKPDLVITTPTEVWVLDAEVCGPNRDLAKSRQDKIAKYDVEFLRAALPYPQKPRRFGSITISMSGVWDSESARTLLGLGVTKRNLMDLTVLTLQGTLRIYRSHRVHKSGGYHQARTRTTDS

SEQ ID NO: 527 - protein, 760 aa, Dermanyssus gallinae
MQATEVVEHWANTMTQPPPEPLPCPVYTPNSDLFEVSLPISLKETHAALRGPSKALGLDGICLSSLRKLPLEVVCCILNILIISDIASAHETARLAFIPKINNATSPSDLRPLSISSYLQRTLNKILSRRLQNSIKLLPIQRAFLSYNGTFENLAVLDGILNDAKSAGRELRLASIALRKAFDMVSHDSVLWSLRTRGYPEVFINYVERLYLSSKSLIEFGQECCTFRPTRGVRQGDPLSPLLFNLVLDDILSKLDQTNIGYQLTDDFRLMGLAFADDLILLASTKSTLQRLLNIADPLLKSRGLEINTNKSFTISHLFNRKEGKGFINTVSEFNVGDRQLPAKGMSDRWRYLGVDFDSNGRVDSTKDILLNLLNRLTIAPLKPHQRLIFLKDFLIPRLLYKLVSGPRPSYALLSDLDKEIRKVVKSKWLKLENSVPNAYLYTHTAHGGLDIPCLQTFIPRIRLSRLTALQHSTHLGVQWMLTTEHFKKDLAKTRLLCERLGTSIETATQETDYWSQQLHNTFDGAHFKKAHETPFVHYWIKGMPYLSGKEYLNLLKLRINALPTRARLARGRPGYNKRCRHGCHAPETLAHVAQMCDITHKQTIKRHDDVCDRVARLLRERGHEVVRERVFRRPGAPGLKPDLVITTPTEVWVLDAEVCGPNRDLAKARQDKIAKYDVEFLRAALPYPQKPRRFGSITISMSGVWDSESARTLLGLGVTKRNLMDLTVLTLQGTLRIYRSHRIHKSGGYHQARTRTTDS

SEQ ID NO: 528 - protein, 1088 aa, Dermanyssus gallinae
MASRDGSNTAGRLSCQTCGRVCKPGAGLASHIRLTHNQREVRATSQTPNQSQTNNLILSSSQNDTAASNNNFNPPCTSRVSQPNCKCPSSTCLKVFKSKSGLNLHRRRAHPDEYNENILAPPSKKARWNPQDRELLATLEADFILDNNNETPREIDHLLATNFNSRTPGAIRGQRNSQAHKDLVEDLLKKRSLLDSNLDGSELPEPSRPRYSESDGPYNPSQKDIIISKIQALTNTFPKRNIISTDLTHLSNIICSGENHTIALNEFLNKHFTHTVRRRAFRETPSTEARVSKRQQRRQDYATTQKLFSQNRSKCAHEVLDGKHTIHNMQATEVVEHWANTMTQPPPEPLPCPVYTPNSDLFEVSLPISLKETHVALRGPSKALGLDGICLSSLRKLPLEVVCCILNILLISDIASAHETARLAFIPKINNATSPSDLRPLSISSYLQRTLNKILSRRLQNSIKLLPIQRAFLPYNGTFENLAVLDGILNDAKSAGRELRLASIDLRKAFDMVSHDSVLWSLRTRGYPEVFINYIERLYLSSKTLIEFGQECRTFRPTRGVRQGDPLSPLLFNLVLDDILSKLDKTNIGYQLTDDFRLMGLAFADDLILLASTKSTLQRLLNIADPLLKSRGLEINTNKSFTISHLFNRKEGKGFINTVPEFNVGDRQLPAKGMSDRWRYLGVDFDSNGRVDSTRDILLNLLNRLTIAPLKPHQRLIFLKDFLIPRLLYKLVSGPRPSYALLSDLDKEIRKVVKSKWLKLENSVPNAYLYTHTAHGGLDIPCLQTFIPRLRLSRLTALQHSTHLGVQWMLTTEHFKKDLAKTRLLCERLGTSIETATQETDYWSQQLHNTFDGAHFKKAHETPFVHYWIKGMPYLSGKEYLNLLKLRINALPTRARLARGRPGYNKRCRHGCHALETLAHVAQMCDTTHKQTIKRHDDVCDRVARLLRERGHEVVRERVFRRPGAPGLKPDLVITTPTEVWVLDAEVCGPNRDLAKARQDKIAKYDVEFLRAALPDPQKPRRFGSITISMSGVWDSESARTLLGLGVTKRNLMDLTVLTLQGTLRIYRSHRVHKSGGYHQARTRTTDS

SEQ ID NO: 529 - protein, 1088 aa, Dermanyssus gallinae
MASRDGSNTAGRLSCQTCGRVCKSGAGLASHIRLTHNQREVRATSQTPNRSQTNNLILSSSQNDTAASNNNFNPPSTSRVSQPNCKCPSSTCLKVFNSKSGLNLHRRRAHPDEYNENILAPPSKKARWNPQDRELLATLEADFILDNNNETPREIDHLLATNFNSRTPGAIRGQRNSQAHKDLVEDLLKKRSLLDSNLDGSELPERSRPRYSESDGPYNPSQKDIIISKIQALTNTFPKRNIISTDLTHLSNIICSGEDHTIALNEFLNKHFTHTVRRRAFRETPSTEARVSKRQQRRQDYATTQKLFSQNRSKCAHEVLDGKHTIHNMQATEVVEHWANTMTQPPPEPLPCPVYTPNSDLFEVSLPISLKETHVALRGPSKALGLDGICLSSLRKLPLEVVCCILNILLISDIASAHETARLAFIPKINNATSPSDLRPLSISSYLQRTLNKILSRRLQNSIKLLPIQRAFLPYNGTFENLAVLDGILNDAKSAGRELRLASIDLRKAFDMVSHDSVLWSLRTRGYPEVFINYIERLYLSSKTLIEFGQECRTFRPTRGVRQGDPLSPLLFNLVLDDILSKLDKTNIGYQLTDDFRLMGLAFADDLILLASTKSTLQRLLNIADPLLKSRGLEINTNKSFTISHLFNRKEGKGFINTVSEFNVGDRQLPAKGMSDRWRYLGVDFDSNGRVDSTKDILLNLLNRLTIAPLKPHQRLIFLKDFLIPRLLYKLVSGPRPSYALLSDLDKEIRKVVKSKWLKLENSVPNAYLYTHTAHGGLDIPCLQTFIPRIRLSRLTALQHSTHLGVQWMLTTEHFKKDLAKTRLLCERLGTSIETATQETDYWSQQLHNTFDGAHFKKAHETPFVHYWIKGMPYLSGKEYLNLLKLRINALPTRARLARGRPGYNKRCRHGCHAPETLAHVAQMCDITHKQTIKRHDDVCDRVARLLRERGHEVVRERVFRRPGAPGLKPDLVITTPTEVWVLDAEVCGPNRDLAKARQDKIAKYDVEFLRAALPYPQKPRRFGSITISMSGVWDSESARTLLGLGVTKRNLMDLTVLTLQGTLRIYRSHRVHKSGGYHQARTRTTDS

SEQ ID NO: 530 - protein, 1088 aa, Dermanyssus gallinae
MASRDGSNTAGRLSCQTCGRVCKSGAGLASHIRLTHNQREVRATSQTPNQSQTNNLILSSSQNDTAASNNNFNPPSTSRVSQPNCKCPSSTCLKVFKSKSGLNLHRRRAHPDEYNENILAPPSKKARWNPQDRELLATLEADFILDNNNETPREIDHLLATNFNSRTPGAIRGQRNSQAHKDLVEDLLKKRSLLDSNLDGSELPEPSRPRYSESDGPYNPSQKDIIISKIQALTNTFPKRNIISTDLTHLSNIICSGENHTIALNEFLNKHFTHTVRRRAFRETPSTEARVSKRQQRRQDYATTQKLFSQNRSKCAHEVLDGKHTIHNMQATEVVEHWANTMTQPPPEPLPCPVYTPNSDLFEVSLPISLKETHVALRGPSKALGLDGICLSSLRKLPLEVVCCILNILLISDIASAHETARLAFIPKINNATSPSDLRPLSISSYLQRTLNKILSRRLQNSIKLLPIQRAFLPYNGTFENLAVLDGILNDAKSAGRELRLASIDLRKAFDMVSHDSVLWSPRTRGYPEVFINYIERLYLSSKTLIEFGQECRTFRPTRGVRQGDPLSPLLFNLVLDDILLKLDKTNIGYQLTDDFRLMGLAFADDLILLASTKSTLQRLLNIADPLLKSRGLEINTNKSFTISHLFNRKEGKGFINTVPEFNVGDRQLPAKGMSDRWRYLGVDFDSNGRVDSTRDILLNLLNRLTIAPLKPHQRLIFLKGFLIPRLLYKLVSGPRPSYALLSDLDKEIRKVVKSKWLKLENSVPNAYLYTHTAHGGLDIPCLQTFIPRLRLSRLTALQHSTHLGVQWMLTTEHFKKDLAKTRLLCERLGTSIETATQETDYWSQQLHNTFDGAHFKKAHETPFVHYWIKGMPYLSGKEYLNLLKLRINALPTRARLARGRPGYNKRCRHGCHAPETLAHVAQMCDTTHKQTIKRHDDVCDRVARLLRERGHEVVRERVFRRPGAPGLKPDLVITTPTEVWVLDAEVCGPNRDLAKARQDKIAKYDVEFLRAALPDPQKPRRFGSITISMSGVWDFESARTLLGLGVTKRNLMDLTVLTLQGTLRIYRSHRVHKSGGYHQARTRTTDS

SEQ ID NO: 531 - protein, 1088 aa, Dermanyssus gallinae
MASRDGSNTAGRLSCQTCGRVCKSGAGLASHIRLTHNQREVRATSQIPNRSQTNNLILSSSQNDTAASNNNFNPPSTSRVSQPNCKCPSSTCLKVFNSKSGLNLHRRRAHPDEYNENILAPPSKKARWNPQDRELLATLEADFILDNNNETPREIDHLLATNFNSRTPGAIRGQRNSQAHKDLVEDLLKKRSLLDSNLDGSELPERSRPRYSESDGPYNPSQKDIIISKIQALTNTFPKRNIISTDLTHLSNIICSGEDHTIALNEFLNKHFTHTVRRRAFRETPSTEARVSKRQQRRQDYATTQKLFSQNRSKCAHEVLDGKHTIHNMQATEVVEHWANTMTQPPPEPLPCPVYTPNSDLFEVSLPISLKETHVALRGPSKALGLDGICLSSLRKLPLEVVCCILNILIISDIASAHETARLAFIPKINNATSPSDLRPLSISSYLQRTLNKILSRRLQNSIKLLPIQRAFLPYNGTFENLAVLDGILNDAKSAGRELRLASIDLRKAFDMVSHDSVLWSLRTRGYPEVFINYIERLYLSSKTLIEFGQECRTFRPTRGVRQGDPLSPLLFNLVLDDILSKLDKTNIGYQLTDDFRLMGLAFADDLILLASTKSTLQRLLNIADPLLKSRGLEINTNKSFTLSHLFNRKEGKGFINTVSEFNVGDRQLPAKGMSDRWRYLGVDFDSNGRVDSTKDILLNLLNRLTIAPLKPHQRLIFLKDFLIPRLLYKLVSGPRPSYALLSDLDKEIRKVVKSKWLKLENSVPNAYLYTHTAHGGLDIPCLQTFIPRIRLSRLTALQHSTHLGVQWMLTTEHFKKDLAKTRLLCERLGTSIETATQETDYWSQQLHNTFDGAHFKKAHETPFVHYWIKGMPYLSGKEYLNLLKLRINALPTRARLARGRPGYNKRCRHGCHAPETLAHVAQMCDITHKQTIKRHDDVCDRVARLLRERGHEVVRERVFRRPGAPGLKPDLVITTPTEVWVLDAEVCGPNRDLAKARQDKIAKYDVEFLRAALPYPQKPRRFGSITISMSGVWDSESARTLLGLGVTKRNLMDLTVLTLQGTLRIYRSHRIHKSGGYHQARTRTTDS

SEQ ID NO: 532 - protein, 1081 aa, Dermanyssus gallinae
MASRDGSNTAGRLSCQTCGRVCKSGAGLASHIRLTHNQREVRATSQTPNRSQTNNLILSSSQNDTAASNNNFNPPSTSRVAQPNCKCPSSTCLKVFNSKSGLNLHRRRAHPDEYNENILAPPSKKARWNPQDRELLATLEADFIFDNNNETLREIDHLLATNFNSRTPGAIRGQRNSQAHKDLVEDLLKKRSLLDSNLDGSELPERSRPRYSESDGPYNPSQKDIIISKIQALTNTFPKRNKISTDLTHLSNIICSGEDHIIALNEFLNKHFTHTVRRRAFRETPSTEARVSKRQQRRQDYATTQKLFSQNRSKCAHEVLDGKHTIHNMQATEVVEHWATTMTQPPPEPLPCPVYTPNSDLFEVSLPISLKETHVALRGPSKALGLDGICLSSLRKLPLEVVCCILNILIISDIASAHETARLAFIPKINNATSPSDLRPLSISSYLQRTLNKILSRRLQNSIKLLPIQRAFLPYNGTFENLAVLDGILNDAKSVGRELRLASIDLRKAFDMVSHNSVLWSLRTRGYPEVFINYIERLYLSSKTLIEFRPTRGVRQGDPLSPLLFNLVLDDILSKLDKTNIGYQLTDDFRLMGLAFADDLILLASTKSTLQRLLNIADPLLKSRGLEIKTNKSFTISHLFNRKEGKGFINTVSEFNVGDRQLPAKGMSDRWRYLGVDFDSNGRVDSTKDILLNLLNRLTIAPLKPHQRLIFLKDFLIPRLLYKLVSGPRPSYALLSDLDKEIRKVVKSKWLKLENSVPNAYLYTHTAHGGLDIPCLQTFIPRIRLSRLTALQHSTHLGVQWMLTTEHFKKDLAKTRLHCERLGTSIETATQETDYWSQKLHNTFDGSHFKKAHETPFVHYWIKGMPYLSGKEYLNLLKLRINALPTRARLARGRPGYNKRCRHGCHAPETLAHVAQMCDITHKQTIKRHDDVCDRVARLLRERGHEVVRERVFRRPGAPGLKPDLVITTPSEVWVLDAEVCGPNRDLAKARQDKIAKYDVEFLRAALPYPQKPRRFGSITISMSGVWDSESARTLLGLGITKRNLMDLTVLTLQGTLRIYRSHRIHKSGGYHQARTRTTDS

SEQ ID NO: 533 - protein, 1088 aa, Dermanyssus gallinae
MASRDGSNTAGRLSCQTCGRVCKSGAGLASHIRLTHNQREVRATSQTPNRSQTNNLILSSSQNDTAASNNNFNPPSTSRVSQPNCKCPSSTCLKVFNSKSGLNLHRRRAHPDEYNENILAPPSKKARWNPQDRELLATLEADFILDNNNETPREIDHLLATNINSRTPGAIRGQRNSQAHKDLVEDLLKKRSLLDSNLDGSELPERSRPRYSESDGPYNPSQKEIIISKIQALTNTFPKRNIISTDLTHLSNIICSGEDHTIALNEFLNKHFTHTVRRRAFRETPSTEARVSKRQQRRQDYATTQKLFSQNRSKCAHEVLDGKHTIHNMQAAEVVEHWANTMTQPPPEPLPCPVYTPNSDLFEVSLPISLKETHVALRGPSKALGLDGICLSSLRKLPLEVVCCILNILIISDIASAHETARLAFIPKINNATSPSDLRPLSISSYLQRTLNKILSRRLQNSIKLLPIQRAFLPYNGTFENLAVLDGILNDAKSAGRELRLASIDLRKAFDMVSHDSVLWSLRTRAYPEVFINYIERLYLSSKTLIEFGQECRTFRPTRGVRQGDPLSPLLFNLVLDDILSKLDKTNIGYQLTDDFRLMGLAFADDLILLASTKSTLQRLLNIADPLLKSRGLEINTNKSFTISHLFNRKEGKGFINTVSEFNVGDRQLPAKGMSDRWRYLGVDFDSNGRVDSTKDILLNLLNRLTIAPLKPHQRLIFLKDFLIPRLLYKLVSGPRPSYALLSDLDKEIKKVVKSKWLKLENSVPNAYLYTHTAHGGLDIPCLQTFIPRIRLSRLTALQHSTHLGVQWMLTTEQFKKDLAKTRLLCERLGTSIETATQETDYWSQQLHNTFDGAHFKKAHETPFVHYWIKGMPYLSGKEYLNLLKLRINALPTRARLARGRPGYNKRCRHGCHAPETLAHVAQMCDITHKQTIKRHDDVCDRVARLLRERGHEVVRERVFRRPGAPGLKPDLVITTPTEVWVLDAEVCGPNRDLAKARQDKIAKYDVEFLRAALPYPQKPRRFGSITISMSGVWDSESARTLLGLGVTKRNLMDLTVLTLQGTLRIYRSHRIHKSGGYHQARTRTTDS

SEQ ID NO: 534 - protein, 760 aa, Dermanyssus gallinae
MQATEVVEHWANTMTQPPPEPLPCPVYTPNSDLFEVSLPISLKETHVALRGPSKALGLDGICLSSLRKLPLEVVCCILNILLISDIASAHETARLAFIPKINNATSPSDLRPLSISSYLQRTLNKILSRRLQNSIKLLPIQRAFLPYNGTFENLAVLDSMLNDAKSAGRELRLASIDLRKAFDMVSHDSVLWSLRTRGYPEVFINYIERLYLSSKTLIEFGQECRTFRPTRGVRQGDPLSPLLFNLVLDDILSKLDKTNIGYQLTDDFRLMGLAFADDLILLASTKSTLQRLLNIADPLLKSRGLEINTNKSFTISHLFNRKEGKGFINPVPEFNVGDRQLPAKGMSDRWRYLGVDFDSNGRVDSTRDILLNLLNRLTIAPLKPHQRLIFLKDFLIPRLLYKLVSGPRPSYALLSDLDKEIRKVVKSKWLKLENSVPNAYLYAHTAHGGLDIPCLQTFIPRLRLSRLTALQHSTHLGIQWMLTTEHFKKDLAKTRLLCERLGTSIETATQETDYWSQQLHNTFDGAHFKKAHETPFVHYWIKGMPYLSGKEYLNLLKLRINALPTRARLARGRPGYNKRCRHGCHAPETLAHVAQMCDTTHKQTIKRHDDVCDRVARLLRERGHEVVRERVFRRPGAPGLKPDLVITTPTEVWVLDAEVCGPNRDLAKARQDKIAKYDVEFLRAALPDPQKPRRFGSITISMSGVWDSESARTLLGLGVTKRNLMDLTVLTLQGTLRIYRSHRVHKSGGYHQARTRTTDS

SEQ ID NO: 535 - protein, 760 aa, Dermanyssus gallinae
MQATEVVEHWANTMTQPPPEPLPCPVYTPNSDLFEVSLPISLKETHVALRGPSKALGLDGICLSSLRKLPLEVVCCILNILLISDIASAHETARLAFIPKINNATSPSDLRALSISSYLQRTLNKILSRRLQNSIKLLPIQQAFLPYNGTFENLAVLDGILNDAKSAGRELRLASIDLRKAFDMVSHDSVLWSLRTRGYPEVFINYIERLYLSSKTLIEFGQECRTFRPTRGVRQGDPLSPLLLILVLDDILSKLDKTNIGYQLTDDFRLMGLAFADDLILLASTKSTLQRLLNIADPLLKSRGLEINTNKSFTISHLFNRKEGKGFINTVPEFNVGDRQLPAKGMSDRWRYLGVDFDSNGRVDSTRDILLNLLNRLTIAPLKPHQRLIFLKDFLIPRLLYKLVSGPRPSYALLSDLDKEIRKVVKSKWLKLENSVPNAYLYTHTAHGGLDIPCLQTFIPRLRLSRLTALQHSTHLGVQWMLTTEHFKKDLAKTRLLCERLGTSIETATQETDYWSQQLHNTFDGAHFKKAHETPFVHYWIKGMPYLSGKEYLNLLKLRINALPTRARLARGRPGYNKRCRHGCHAPETLAHVAQMCDTTHKQTIKRHDDVCDRVARLLRERGHEVVRERVFRRPGAPGLKPDFVMTTPTEVWVLDAEVCGPNRDLAKARQDKIAKYDVEFLRAALPDPQKPRRFGFITISMSAVWDSESARTLLGLGVTKRNLMDLTVLTLQGTLRIYRSHRVHKSGGYHQARTRTTDS

SEQ ID NO: 536 - protein, 1088 aa, Dermanyssus gallinae
MASRDGSNTAGRLSCQTCGRVCKSGAGLASHIRLTHNQREVRATSQTPNQSQTNNLILNSSQNDTAASNNNFNPPSTSRVFQPNCKCPSSTCLKVFKSKSGLNLHRRRAHPDEYNENILAPPSKKARWNPQDRELLATLEADFILDNNNETPREIDHLLATNFNSRTPGAIRGQRNSQAHKDLVEDLLKKRSLLDSNLDGSGLPEPSRPRYSESDGPYNPSQKDIIISKIQALTNTFPKRNIISTDLTHLSNIICSGENHTIALNEFLNKHFTHTVRRRAFRETPSTEARVSKRQQRRQDYATTQKLFSQNRSKCAHEVLDGKHTIHNMQATEVVEHWANTMTQPPPEPLPCPVYTPNSDLFEVSLPISLKETHVALRGPSKALGLDGICLSSLRKLPLEVVCCILNILLISDIASAHETARLAFIPKINNATSPSDLRPLSISSYLQRTLNKILSRRLQNSIKLLPIQRAFLPYNGTFENLAVLDGILNDAKSAGRELRLASIDLRKAFDMVSHDSVLWSLRTRGYPEVFINYIERLYLSSKTLIEFGQECRTFRPTRGVRQGDPLSPLLFNLVLDDILSKLDKTNIGYQLTDDFRLMGLAFADDLILLASTKSTLQRLLNIADPLLKSRGLEINTNKSFTISHLFNRKEGKGFINTVPEFNVGDRQLPAKGMSDRWRYLGVDFDSNGRVDSTRDILLNLLNRLTIAPLKPHQRLIFLKDFLIPRLLYKLVSGPRPSYALLSDLDKEIRKVVKSKWLKLENSVPNAYLYTHTAHGGLDIPCLQTFIPRLRLSRLTALQHSTHLGVQWMLTTEHFKKDLAKTRLLCERLGTSIETATQETDYWSQQLHNTFDGAHFKKAHETPFVHYWIKGMPYLSGKEYLNLLKLRINALPTRARLARGRPGYNKRCRHGCHAPETLAHVAQMCDTTHKQTIKRHDDVCDRVARLLRERGHEVVRERVFRRPGAPGLKPDLVITTPTEVWVLDAEVCGPNRDLAKARQDKIAKYDVEFLRAALPDPQKPRRFGSITISMSGVWDSESARTLLGLGVTKRNLMDLTVLTLQGTLRIYRSHRVHKSGGYHQARTRTTDS

SEQ ID NO: 537 - protein, 1089 aa, Dermanyssus gallinae
MASRDGSNTAGRLSCQTCGRVCKSGAGLASHIRLTHNQREVRATSQTPNRSQTNNLILSSSQNDTAASNNNNFNPPSTSRVSQPNCKCPSSTCLKVFNSKSGLNLHRRRAHPDEYNENILAPPSKKARWNPQDREFLATLEADFILDNNNETPREIDHLLATNFNSRTPGAIRGQRNSQAHKDLVEDLLKKRSLLDSNLDGSELPERSRPRYSESDGPYNPSQKDIIISKIQALTNTFPKRNIISTDLTHLSNIICSGEDHTIALNEFLNKHFTHTVLRRAFRETPSTEARVSKRQQRRQDYATTQKLFSQNRSKCAHEVLDGKHTIHNMQATEVVEHWANTMTQPPPEPLPCPVYTPNSDLFEVSLPISLKETHVALRGPSKALGLDGICLSSLRKLPLEVVCCILNILIISDIASAHETARLAFIPKINNATSPSDLRPLSISSYLQRTLNKILSRRLQNSIKLLPIQRAFLPYNGTFENLAVLDGILNDAKSAGRELRLASIDLRKAFDMVSHDSVLWSLRTRGYPEVFINYIERLYLSSKTLIEFGQECRTFRPTRGVRQGDPLSPLLFNLVLDDILSKLDKTNIGYQLTDDFRLMGLAFADDLILLASTKSTLQRLLNIADPLLKSRGLEINTNKSFTISHLFNRKEGKGFINTVSEFNVGDRQLPAKGMSDRWRYLGVDFDRNGRVDSTKDILLNLLNRLTIAPLKPHQRLIFLKDFLIPRLLYKLVSGPRPSYALLSDLDKEIRKVVKSKWLKLENSVPNAYLYTHTAHGGLDIPCLQTFIPRIRLSRLTALQHSTHLGVQWMLTTEHFKKDLAKTRLLCERLGTSIETATQETDYWSQQLHNTFDGAHFKKAHETPFVHYWIKGMPYLSGKEYSNLLKLRINALPTRARLARGRPGYNKRCRHGCHAPETLAHVAQMCDITHKQTIKRHDDVCDRVARLLRERGHEVVRERVFRRPGAPGLKPDLVITTPTEVWVLDAEVCGPNRDLAKARQDKIAKYDVEFLRAALPYPQKPRRFGSITISMSGVWDSESARTLLGLGVTKRNLMDLTVLTLQGTLRIYRSHRIHKSGGYHQARTRTTDS

SEQ ID NO: 538 - protein, 1088 aa, Dermanyssus gallinae
MASRDGSNTAGRLSCQTCGRVCKSGAGLASHIRLTHNQREVRATSQTPNRSQTNNLILSSSQNDTAASNDNFNPPSTSRVSQPNCKCPSSTCLKVFNSKSGLNLHRRRAHPDEYNENILAPPSKKARWNPQDRELLATLEADFILDNNNETPREIDHLLATNFNSRTPGAIRGQRNSQAHKDLVEDLLKKRSLLDSNLDGSELPERSRPRYSESDGPYNPSQKDIIISKIQALTNTFPKRNIISTDLTHLSNIICSGEDHTIALNEFLNKHFTHTVRRRAFRETPSTEARVSKRQQRRQDYATTQKLFSQNRSKCAHEVLDGKHTIHNMQATEVVEHWANTMTQPPPEPLPCPVYTPNSDLFEVSLPISLKETHAALRGPSKALGLDGICLSSLRKLPLEVVCCILNILIISDIASAHETARLAFIPKINNATSPSDLRPLSISSYLQRTLNKILSRRLQNSIKLLPIQRAFLPYNGTFENLAVLDGILNDAKSAGRELRLASIDLRKAFDMVSHDSVLWSLRTRGYPEVFINYIERLYLSSKTLIEFGQECRTFRPTRGVRQGDPLSPLLFNLVLDDILSKLDQTNIGYQLTDDFRLMGLAFADDLILLASTKSTLQRLLNIADPLLKSRGLEINTNKSFTISHLFNRKEGKGFINTVSEFNVGDRQLPAKGMSDRWRYLGVDFDSNGRVDSTKDILLNLLNRLTIAPLKPHQRLIFLKDFLIPRLLYKLVSGPRPSYALLSDLDKEIRKVVKSKWLKLENSVPNAYLYTHTAHGGLDIPCLQTFIPRIRLSRLTALQHSTHLGVQWMLTTEHFKKDLAKTRLLCERLGTSIETSTQETDYWSQQLHNTFDGAHFKKAHETPFVHYWIKGMPYLSGKEYLNLLKLRINALPTRARLARGRPGYNKRCRHGCHAPETLAHVAQMCDITHKQTIKRHDDVCDRVARLLRERGHEVVRERVFRRPGAPGLKPDLVITTPTEVWVLDAEVCGPNRDLAKARQDKIAKYDVEFLRAALPYPQKPRRFGSITISMSGVWDSESARTLLGLGVTKRNLMDLTVLTLQGTLRIYRSHRIHKSGGYHQARTRTTDS

SEQ ID NO: 539 - protein, 760 aa, Dermanyssus gallinae
MQATEVVEHWANTMTQPPPEPLPCPVYTPNSDLFEVSLPISLKETHVALRGPSKALGLDGICLSSLRKLPLEVVCCILNILLISDIASAHETARLAFIPKINNATSPSDLRPLSISSYLQRTLNKILSRRLQNSIKLLPIQRAFLPYNGTFENLAVLDGILNDAKSAGRELRLASIDLRKAFDMVSHDSVLWSLRTRGYPEVFINYIERLYLSSKTLIEFGQECRTFRPTRGVRQGDPLSPLLFNLVLDDILSKLDKTNIGYQLTDDFRLMGLAFADDLILLASTKSTLQRLLNIADPLLISRGLEINTNKSFTISHLFNRKEGKGFINTVSEFNVGDRQLPAKGMSDRWRYLGVDFDSNGRVDSTKDILLNLLNRLTIAPFKPHQRLIFLKDFLIPRLLYKLVSGPRPSYALLSDLDKEIRKVVKSKWLKLENSVPNAYLYTHTAHGGLDIPCLQTFIPRIRLSRLTALQHSTRLGVQWMLTTEHFKKYLAKTRLLCERLGTSIETATQETDYWSQQLHNTFDGAHFKKAHETPFVHYWIKGMPYLSGKEYLNLLKLRINALPTRARLARGRPGYNKRCRHGCHAPETLAHVAQMCDITHKQTIKRHVDVCDRVARLLRERGHEVVRERVFRRPGAPGLKPDLVITTPTEVWVLDAEVCGPNRDLAKARQDKIAKYDVEFLRAALPYPQKPRRFGSITISMSGVWDSESARTLLGLGVTKRNLMDLSVLTLQGTLRIYRSHRVHKSGGYHQARTRTTDS

SEQ ID NO: 540 - protein, 1088 aa, Dermanyssus gallinae
MASRDGSNTAGRLSCQTCGRVCKSGAGLASHIRLTHNQREVRATSQTPNQSQTNNLILSSSQNDTAASNNNFNPPSTSRVSQPNCKCPSSTCLKVFKSKSGLNLHRRRAHPDEYNENILAPPSKKARWNPQDRELLATLEADFILDNNNETPREIDHLLATNFNSRTPGAIRGQRNSQAHKDLVEDLLKKRPLLDSNLDGSELPEPSRPRYSESDGPYNPSQKDIIISKIQALTNTFPKRNIISTDLTHLSNIICSGENHTIALNEFLNKHFTHTVRRRVFRETPSTEARVSKRQQRRQDYATTQKLFSQNRSKCAHEVLDGKHTIHNMQATEVVEHWANTMTQPPPEPLPCPVYTPNSDLFEVSLPISLKETHVALRGPSKALGLDGICLSSLRKLPLEVVCCILNILLISDIASAHETARLAFIPKINNATSPSDLRPLSISSYLQRTLNKILSRRLQNSIKLLPIQRAFLPYNGTFENLAVLDGILNDAKSAGRELRLASIDLRKAFDMVSHDSVLWSLRTRGYPEVFINYIERLYLSSKTLIEFGQECRTFRPTRGVRQGDPLSPLLFNLVLDDILSKLDKTNIGYQLTDDFRLMGLAFADDLILLASTKSTLQRLLNIADPLLKSRGLEINTNKSFTISHLFNRKEGKGFINTVSEFNVGDRQLPAKGMSDRWRYLGVDFDSNGRVDSTRDILLNLLNRLTIAPLKPHQRLIFLKDFLIPRLLYKLVSGPRPSYALLSDLDKEIRKVVKSKWLKLENSVPNAYLYTHTAHGGLDIPCLQTFIPRLRLSRLTALQHSTHLGVQWMLTTEHFKKDLAKTRLLCERLGTSIETATQETDYWSQQLHNTFDGAHFKKAHETPFVHYWIKGMPYLSGKEYLNLLKLRINALPTRARLARGRPGYNKRCRHGCHAPETLAHVAQMCDTTHKQTIKRHDDVCDRVARLLRERGHEVVRERVFRRPGAPGLKPDLVITTPTEVWVLDAEVCGPNRDLAKARQDKIAKYDVEFLRAALPDPQKPRRFGSITISMSGVWDSESARTLLGLGVTKRNLMDLTVLTLQGTLRIYRSHRVHKSGGYHQARTRTTDS

SEQ ID NO: 541 - protein, 1088 aa, Dermanyssus gallinae
MASRDGSNTAGRLSCQTCGRVCKSGAGLASHIRLTHNQREVRATSQTPNRSQTNNLILSSSQNDTAASNNNFNPPSTSRVSQPNCKCPSSTCLKVFNSKSGLNLHRRRAHPDEYNENILAPPSKKARWNPQDRELLATLEADFILDNNNETPREIYHLLATNFNSRTPGAIRGQRNSQAHKDLVEDLLKKRSLLDSNLDGSELPERSRPRYSESDGPYNPSQKDIIISKIQALTNTFPKRNIISTDLTHLSNIICSGEDHTIALNEFLNKHFTHTVRRRTFRETPSTEARVSKRQQRRQDYATTQKLFSQNRSKCAHEVLDGKHTIHNMQATEVVEHWANTMTQPPPEPLPCPVYTPNSDLFEVSLPISLKETHVALRGPSKALGLDGICLSSLRKLPLEVVCCILNILIISDIASAHETARLAFIPKINNATSPSDLRPLSISSYLQRTLNKILSRRLQNSIKLLPIQRAFLPYNGTFENLAVLDGILNDAKSAGRELRLASIDLRKAFDMVSHDSVLWSLRTRGYPEVFINYIERLYLSSKSLIEFGQECRTFRPTRGVRQGDPLSPLLFNLVLDDILSKLDETNIGYQLTDDFRLMGLAFADDLILLASTKSTLQRLLNITDPLLKSRGLEINTNKSFTISHLFNRKEGKGFNNTVSEFNVGDRQLPAKGMSDRWRYLGVDFDSNGRVDSTKDILLNLLNRLTIAPLKPHQRLIFLKDFLIPRLLYKLVSGPRPSYALLSDLDKEIRKVVKSKWLKLENSVPNAYLYTHTAHGGLDIPCLQTFIPRIRLSRLTALQHSTHLGVQWMLTTEHFKKDLAKTRLLCERLGTSIETATQETDYWSQQLHNTFDGAHFKKAHETPFVHYWIKGMPYLSGKEYLNLLKLRINALPTRARLARGRPGYNKRCRHGCHAPETLAHVAQMCDITHKQTIKRHDDVCDRVARLLRERGHEVVRERVFRRPGAPGLKPDLVITTPTEVWVLDAEVCGPNRDLAKARQDKIAKYEIEFLRAALPYPQKPRRFGSITISMSGVWDSESARTLLGLGVTKRNLMDLTVLTLQGTLRIYRSHRIHKSGGYHQARTRTTDS

SEQ ID NO: 542 - protein, 1088 aa, Dermanyssus gallinae
MASRDGSNTAGRLSYQTCGRVCKSGAGLASHIRLTHNQREVRATSQTPNQSQTNNLILSSSQKDTAASNNNFNPPSTSRVSQPNCKCPSSTCLKVFKSKSGLNLHRRRAHPDEYNENILVPPSKKARWNPQDRELLATLEADFILDNNNETPREIDHILATNFNSRTPGAIRGQRNSQAHEDLVEDLLKKSSLLDSNLDGSELPEPSRPRYSESDGPYNPSQKDIIISKIQALTNTFPKRNIISTYLTHLSNIICSVENHTIALNEFLNKHFTHTVRRRAFRETPSTEARVSKRQQRRQDYATTQKLFSQNRSKCAHEVLDGKHTIHNMQATEVVEHWANTMTQPPPEPLPCPVYTPNSDLFEVSLPISLKETHVALRGPSKALGLDGICLSSLRKLPLEVVCCILNILLISDIASAHETARLAFIPKINNATSPSDLRPLSISSYLQRTLNKILSRRLQNSIKLLPIQRAFLPYNGTFENLAVLDGILNDAKSAGRELRLASIDLRKAFDMVSHDSVLWSLRTRGYPEVFINYIERLYLSSKTLIEFGQECRTFRPTRGVRQGDPLSPLLFNLVLDDILSKLDKTNIGYQLTDDFRLMGLAFADDLTLLASTKSTLQRLLNIADPLLKSRGLEINTNKSFTISHLFNRKEGKGFINTVPEFNVGDRQLPAKGMSDRWRYLGVDFDSNGRVDSTRDILLNLLNRLTIAPLKPHQRLIFLKDFLIPRLLYKLVSGPRPSYALLSDLDKEIRKVVKSKWLKLENSVPNAYLYTHTAHGGLDIPCLQTFIPRLRLSRLTALQHSTHLGVQWMLTTEHFKKDLAKTRLLCERLGTSIETATQETDYWSQQLHNTFHGAHFKKAHETPFVHYWIKGMPYLSGKEYLNLLKLRINALPTRARLARGRPGYNKRCRHGCHAPETLAHVAQMCDTTHKQTIKRHDDVCDRVARLLRERGHEVVRERVFRRPGAPGLKPDLVITTPTEVWVLDAEVCGPNRDLAKARQDKIAKYDVEFLRAALPDPQKPRRFGSITISMSGVWDSESARTLLGLGVTKRNLMDLTVLTLQGTLMIYRSHRVHKSGGYHQTKTRTTDS

SEQ ID NO: 543 - protein, 760 aa, Dermanyssus gallinae
MQATEVVEHWASTMTQPPPEPLPCPVYTPNSDLFEVSLPISLKETHAALRGPSKALGLDGICLSSLRKLPLEVVCCILNILIISDIASAHETARLAFIPKINNATSPSDLRPLSISSYLQRTLNKILSRRLQNSIKLLPIQRAFLPYNGTFENLAVLDGILNDAKSAGRELRLASIDLRKAFDMVSHDSVLWSLRTRGYPEVFINYIERLYLSSKTLIEFGQECRTFRPTRGVRQGDPLSPLLFNLVLDDILSKLDQTNIGYQLTDDFRLMGLAFADDLILLASTKSTLQRLLNIADPLLKSRGLEINTNKSFTISHLFNRKEGKGFINTVPEFNVGDRQLPAKGMSDRWRYLGVDFDSNGRVDSTKDILLNLLNRLTIAPLKPHQRLIFLKDFLIPRLLYKLVSGPRPSYALLSDLDKEIRKVVKSKWLKLENSVPNAYLYTHTAHGGLDIPCLQTFIPRIRLSRLTALQHSTHLGVQWMLTTEHFKKDLAKTRLLCERLGTSIETATQETDYWSQQLHNTFDGAHFKKAHETPFVHYWIKGMPYLSGKEYLNLLKLRINALPTRARLARGRPGYNKRCRHGCHAPETLAHVAQMCDITHKQTIKRHDDVCDRVARLLRERGHEVVRERVFRRPGAPGLKPDLVITTPTEVWVLDAEVCGPNRDLAKARQDKIAKYDVEFLRAALPYPQKPRRFGSITISMSGVWDSESARTLLGLGVTKRNLMDLTVLTLQGTLRIYRSHRIHKSGGYHQARTRTTDS

SEQ ID NO: 544 - protein, 1088 aa, Dermanyssus gallinae
MASRDGSNTAGRLSCQTCGRVCKSGAGLASHIRLTHNQREVRATSQTPNRSQTNNLILSSSQNDTAASNNNFNPPSTSRVSQPNCKCPSSTCLKVFNSKSGLNLHRRRAHPDEYNENILAPPSKKARWNPQDRELLATLEADFILDNNNETPREIDHLLATNFNSRTPGAIRGQRNSQAHKDLVEDLLKKRSLLDSNLDGSELPERSRPRYSESDGPYNPSQKDIIISKIQALTNTFPKRNIISTDLTHLSNIICSGEDHTIALNEFLNKHFTHTVRRRAFRETPSTEARVSKRQQRRQDYATTQKLFSQNRSKCAHEVLDGKHTIHNMQATEVVEHWANTMTQPPPEPLPCPVYTPNSDLFEVSLPISLKETHAALRGPSKALGLDGICLSSLRKLPLEVVCCILNILIISDIASAHETARLAFIPKINNATSPSDLRPLSISSYLQRTLNKILSRRLQNSIKLLPIQRAFLPYNGTFENLAVLDGILNDAKSAGRELRLASIDLRKAFDMVSHDSVLWSLRTRGYPEVFINYIERLYLSSKTLIEFGQECRTFRPTRGVRQGDPLSPLLFNLVLDDILSKLDQTNIGYQLTDDFRLMGLAFADDLILLASTKSTLQRLLNIADPLLKSRGLEINTNKSFTISHLFNRKEGKGFINTVSEFNVGDRQLPAKGMSDRWRYLGVDFDSNGRVDSTKDILLNLLNRLTIAPLKPHQRLIFLKDFLIPRLLYKLVSGPRPSYALLSDLDKEIRKVVKSKWLKLENSVPNAYLYTHTAHGGLDIPCLQTFIPRIRLSRLTALQHSTHLGVQWMLTTEHFKKDLAKTRLLCERLGTSIETATQETDYWSQQLHNTFDGAHFKKAHETPFVHYWIKGMPYLSGKEYLNLLKLRINALPTRARLARGRPGYNKRCRHGCHAPETLAHVAQMCDITHKQTIKRHDDVCDRVARLLRERGHEVVRERVFRRPGAPGLKPDLVITTPTEVWVLDAEVCGPNRDLAKARQDKIAKYDVEFLRAALPYPQKPRRFGSITISMSGVWDSESARTLLGLGVTKRNLMDLTVLTLQGTLRIYRSHRIHKSGGYHQARTRTTDS

SEQ ID NO: 545 - protein, 760 aa, Dermanyssus gallinae
MQATEVVEHWANTMTQPPPEPLPCPVYTPNSDLFEVSLPISLKETHVALRGPSKALGLDGICLSSLRKLPLEVVCCILNILLISDIASAHETARLAFIPKINNATSPSDFRPLSISSYLQRTLNKILSRRLQNSIKLLPIQRAFLPYNGTFENLAVLDGILNDAKSAGRELRLASIDLRKAFDMVSHDSVLWSLRTRGYPEVFINYIERLYLSSKTLIEFGQECRTFRPTRGVRQGDPLSPLLFNLVLDDILSKLDKTNIGYQLTDDFRLMGLAFADDLILLASTKSTLQRLLNIADPLLKSRGLEINTNKSFTISHLFNRKEGKGFINTVPEFNVGDRQLPAKGMSDRWRYLGVDFDSNGRVDSTRDILLNLLNRLTIAPLKPHQRLVFLKDFLIPRLLYKLVSGPRPSYALLSDLDKEIRKVVKSKWLKLENSVPNAYLYTHTAHGGLDIPCLQTFIPRLRLSRLTALQHSTHLGVQWMLTTEHFKKDLAKTRLLCERLGTSIETATQETDYWSQQLHNTFDGAHFKKAHETPFVHYWIKGMPYLSGKEYLNLLKLRINALPTRARLARGRPGYNKRCRHGCHAPDTLAHVAQMCDTTHKQTIKRHDDVCDRVARLLRERGHKVVRERVFRRPGAPGLKPDLVITTPTEVWVLDAEVCGPNRDLAKARQDKIAKYDVEFLRAALPDPQKPRRFGSITISMSGVWDSESARTLLGLGVTKRNLMDLTVLTLQGTLRIYRSHRVHKSGGYHQARTRTTDS

SEQ ID NO: 546 - protein, 760 aa, Dermanyssus gallinae
MQATEVVEHWANTMTQPPPEPLPCPVYTPNSDLFEVSLPISLKETHVALRGPSKALGLDGICLSSLRKLPLEVVCCILNILLISDIASAHETARLAFIPKINNATSPSDLRPLSISSYLQRTLNKILSRRLQNSIKLLPIQRAFLPYNGTFENLAVLDGILNDAKSAGRELRLASIDLRKAFDMVSHDSVLWSLRTRGYPEVFINYIERLYLSSKTLIEFGQECRTFRPTRGVRQGDPLSPLLFNLVLDDILSKLDKTNIGYQLTDDFRLMGLAFADDLILLASTKSTLQRLLNIADPLLKSRGLEINTNKSFTISHLFNRKEGKGFINTVPEFNVGDRQLPAKGMSDRWRYLGVDFDSNGRVDSTRDILLNLLNRLTIAPLKPHQRLIFLKDFLIPRLLYKLVSGPRPSYALLSDLDKEIRKVVKSKWLKLENSVPNAYLYTHTAHGGLDIPCLQTFIPRLRLSRLTALQHSTHLGVQWMLTTEHFKKDLAKTRLLCERLGTSIETATQETDYWSQQLHNTFDGAHFKKAHETPFVHYWIKGMPYLSGKEYLNLLKLRINALPTRARLARGRPGYNKRCRHGCHAPETLAHVAQMCDTTHKQTIKRHDDVCDRVARLLRERGHEVVRERVFRRPGAPGLKPDLVITTPTEVWVLDAEVCGPNRDLAKARQDKIAKYDVEFLRAALPDPQKPRRFGSITISMSGVWDSESARTLLGLGVTKRNLMDLTVLTLQGTLRIYRSHRVHKSGGYHQARTRTTDS

SEQ ID NO: 547 - protein, 1088 aa, Dermanyssus gallinae
MASRDGSNTAGRLSCRTCGRVCKSGAGLASHIRLTHNQREVRATSQTPNRSQTNNLILSSSQNDTAASNDNFNPPSTSRVSQPNCKCPSSTCLKVFNSKSGLNLHRRRAHPDEYNENILAPPSKKARWNPQDRELLATLEADFILDNNNETPREIDHLLATNFNSRTPGAIRGQRNSQAHKDLVEDLLKKRSLLDSNLDGSELPERSRPRYSESDGPYNPSQKDIIISKIQALTNTFPKRNIISTDLTHLSNIICSGEDHTIALNEFLNKHFTHTVRRRAFRETPSTEARVSKRQQRRQDYATTQKLFSQNRSKCAHEVLDGKHTIHNMQATEVVEHWANTMTQPPPEPLPCPVYTPNSDLFEVSLPISLKETHAALRGPSKALGLDGICLSSLRKLPLEVVCCILNILIISDIASAHETARLAFIPKINNATSPSDLRPLSISSYLQRTLNKILSRRLQNSIKLLPIQRAFLPYNGTFENLAVLDGILNDAKSAGRELRLASIDLRKAFDMVSHDSVLWSLRTRGYPEVFINYIERLYLSSKTLIEFGQECRTFRPTRGVRQGDPLSPLLFNLVLDDILSKLDQTNIGYQLTDDFRLMGLAFADDLILLASTKSTLQRLLNIADPLLKSRGLEINTNKSFTISHLFNRKEGKGFINTVSEFNVGDRQLPAKGMSDRWRYLGVDFDSNGRVDSTKDILLNLLNRLTIAPLKPHQRLIFLKDFLIPRLLYKLVSGPRPSYALLSDLDKEIRKVVKSKWLKLENSVPNAYLYTHTAHGGLDIPCLQTFIPRIRLSRLTALQHSTHLGVQWMLTTEHFKKDLAKTRLLCERLGTSIETATQETDYWSQQLHNTFDGAHFKKAHETPFVHYWIKGMPYLSGKEYLNLLKLRINALPTRARLARGRPGYNKRCRHGCHAPETLAHVAQMCDITHKQTIKRHDDVCDRVARLLRERGHEVVRERVFRRPGAPGLKPDLVITTPTEVWVLDAEVCGPNRDLAKARQDKIAKYDVEFLRAALPYPQKPRRFGSITISMSGVWDSESARTLLGLGVTKRNLMDLTVLTLQGTLRIYRSHRIHKSGGYHQARTRTTDS

SEQ ID NO: 548 - protein, 760 aa, Dermanyssus gallinae
MQATEVVEHWANTMTQPPLEPLPCPVYTPNSDLFEVSLPISLKETHVALRGPSKALGLDGICLSSLRKLPLEVVCCILNILLISDIASAHETARLAFIPKINNATSPSDLRPLSISSYLQRTLNKILSRRLQNSIKLLPIQRAFLPYNGTFENLAVLDGILNDAKSAGRELRLASIDLRKAFDMVSHDSVLWSLRIRGYPEVFINYIERLYLSSKTLIEFGQECRIFRPTRGVRQGDPLSPLLFNLVLGDILSKLDKTNIGYQLTDDFRLMGLAFADDLILLASTKSTLQRLLNIADPLLKSRGLEINTNKSFTISHLFNRKEGKGFINTVPEFNVGDRQLPAKGMSDRWRYLGVDFDSNGRVDSTRDILLNLLNRLTIAPLKPHQRLIFLKDFLIPRLLYKLVSGPRPSYALLSDLDKEIRKVVKSKWLKLENSVPNAYLYTHTAHGGLDIPCLQTFIPRLRLSRLTALQHSTHLGVQWMLTTEHFKKDLAKTRLLRERLGTSIETATQETDYWSQQLHNTFDGAHFKKAHETPFVHYWIKGMPYLSGKEYLNLLKLKINALPTRARLARGRPGYNKRCRHGCHAPETLAHVAQMCDTTHKQTIKRHYDVCDRVARLLRERGHEVVRERVFRRPGAPGLKPDLVITTPTEVWVLDAEVCGPNRDLAKARQDKIAKYDVEFLRAALPDPQKPRRFGSITISMSGVWDSESARTLLGLGVTKRNLMDLTVLTLQGTLRIYRSHRVHKSGGYHQARTRTTDS

SEQ ID NO: 549 - protein, 760 aa, Dermanyssus gallinae
MQATEVVEHWANTMTQPPPEPLPCPVYTPNSDLFEVSLPISLKETHAALRGPSKALGLDGICLSSLRKLPLEVVCCILNILIISDIASAHETARLAFIPKINNATSPSDLRPLSISSYLQRTLNKILSRRLQNSIKLLPIQRAFLPYNGTFENLAVLDGILNDAKSAGRELRLASIDLRKAFDMVSHDSVLWSLRTRGYPEVFINYIERLYLSSKTLIEFGQECRTFRPNRGVRQGDPLSPLLFNLVLDDILSKLDQTNIGYQLTDDFRLMGLAFADDLILLASTKSTLQRLLNIADPLLKSRGLEINTNKSFTISHLFNRKEGKGFINTVSEFNVGDRQLPAKGMSDRWRYLGVDFDSNGRVDSTKDILLNLLNRLTIAPLKPHQRLIFLKDFLILRLLYKLVSGPRPSYALLSDLDKEIRKVVKSKWLKLENSVPNAYLYTHTAHGGLDIPCLQTFIPRIRLSRLTALQHSTHLGVQWMLTTEHFKKDLAKTRLLCERLGTSIETATQETDYWSQQLHNTFDGAHFKKAHETPFVHYWIKGMPYLSGKEYLNLLKLRINALPTRARLARGRPGYNKRCRHGCHAPETLAHVAQMCDITHKQTIKRHDDVCDRVARLLCERGHEVVRERVFRRPGAPGLKPDLVITTPTEVWVLDAEVCGPNRDLAKARQDKIAKYDVEFLRAALPYPQKPRRFGSITISMSGVWDSESARTLLGLGVTKRNLMDLTVLTLQGTLRIYRSHRIHKSGGYHQARTRTTDS

SEQ ID NO: 550 - protein, 760 aa, Dermanyssus gallinae
MQATEVVEHWANTMTQPPPEPLPCPVYTPNSDLFEVSLPISLKETHVALRGPSKALGLDGICLSSLRKLPLEVVCCILNILIISDIASAHETARLAFIPKINNATSPSDLRPLSISSYLQRTLNKILSRRLQNSIKLLPIQRAFLPYNGTFENLAVLDGILNDAKSAGRELRLASIDLRKAFDMVSHDSVLWSLRTRGYPEVFINYIERLYLSSKTLIEFGQECRTFRPTRGVRQGDPLSPLLFNLVLDDILSKLDETNIGYQLTDDFRLMGLAFADDLILLASTKSTLQRLLNIADPLLKSRGLEINTNKSFTISHLLNRKEGKGFINTVSEFNVGDRQLPAKGMSDRWRYLGVDFDSNGRVDSTKDILLNLLNRLTIAPLKPHQRLIFLKDFLIPRLLYKLVSGPRPSYALLSDLDKEIRKVVKSKWLKLENSVPNAYLYTHTGHGGLDIPCLQTFIPRIRLSRLTALQHSTHLGVQWMLTTEHFKKDLAKTRLLCERLGTSIETATQETDYWSQQLHNTFDGAHFKKAHETPFVHYWIKGMPYLSGKEYLNLLKLRINALPTRARLARGRPGYNKRCRHGCHAPETLAHVAQMCDIAHKQTIKRHDDVCDRVARLLRERGHEVVRERVFRRPGAPGLKPDLVITTPTEVWVLDAEVCGPNRDLAKARQDKIAKYDVEFLRAALPYPQKPRRFGSITISMSGVWDSESARTLLGLGVTKRNLMDLTVLTLQGTLRIYRSHRIHKSGGYHQARTRTTDS

SEQ ID NO: 551 - protein, 1088 aa, Dermanyssus gallinae
MASRDGSNTAGRLSCQTCGRVCKSGAGLASHIRLTHNQREVRATSQTPNRSQTNNLILSSSQNDTAASNDNFNPPSTSRVSQPNCKCPSSTCLKVFNSKSGLNLHRRRAHPDEYNENILAPPSKKARWNPQDRELLATLEADFILDNNNETPREIDHLLATNFNSRTPGAIRGQRNSQAHKDLVEDLLKKRSLLDSNLDGSELPERSRPRYSESDGPYNPSQKDIIISKIQALTNTFPKRNIISTDLTHLSNIICSGEDHTIALNEFLNKHFTHTVRRRAFRETPSTEARVSKRQQRRQDYATTQKLFRQNRSKCAHEVLDGKHTIHNMQATEVVEHWANTMTQPPPEPLPCPVYTPNSDLFEVSLPISLKETHAALRGPSKALGLDGICLSSLRKLPLEVVCCILNILIISDIASAHETARLAFIPKINNATSPSDLRPLSISSYLQRTLNKILSRRLQNSIKLLPIQRAFLPYNGTFENLAVLDGILNDAKSAGRELRLASIDLRKAFDMVSHDSVLWSLRTRGYPEVFINYIERLYLSSKTLIEFGQECRTFRPTRGVRQGDPLSPLLFNLVLDDILSKLDQTNIGYQLTDEFRLMGLAFADDLILLASTKSTLQRLLNIADPLLKSRGLEINTNKSFTISHLFNRKEGKCFINTVSEFNVGDRQLPAKGMSDRWRYLGVDFDSNGRVDSTKDILLNLLNRLTIAPLKPHQRLIFLKDFLIPRLLYKLVSGPRPSYALLSDLDKEIRKVVKSKWLKLENSVPNAYLYTHTAHGGLDIPCLQTFIPRIRLSRLTALQHSTHLGVQWMLTTEHFKKDLAKTRLLCERLGTSIETATQETDYWSQQLHNTFDGAHFKKAHETPFVHYWIKGMPYLSGKEYLNLLKLRINALPTRARLARGRPGYNKRCRHGCHAPETLAHVAQMCDITHKQTIKRHDDVCDRVARLLRERGHEVFRERVFRRPGAPGLKPDLVITTPTEVWVLDAEVCGPNRDLAKARQDKIAKYDVEFLRAALPYPQKPRRFGSITISMSGVWDSESARTLLGLGVTKRNLMDLTVLTLQGTLRIYRSHRIHKSGGYHQARTRTTDS

SEQ ID NO: 552 - protein, 1088 aa, Dermanyssus gallinae
MASRDGSNTAGRLSCQTCGRVCKSGAGLASHIRLTHNQREVRATSQTPNRSQTNNLILSSSQNDTAASNDNFNPPSTSRVSQPNCKCPSSTCLRVFNSKSGLNLHRRRAHPDEYNENILAPPSKKARWNPQDRELLPTLEADFILDNNNETPREIDHLLATNFNSRTPGAIRGQRNSQAHKDLVEDLLKKRSLLDSNLDGSELPERSRPRYSESDGPYNPSQKDIIISKIQALTNTFPKRNIISTDLTHLSNIICSGEDHTIALNEFLNKHFTHTVRRRAFRETPSTEARVSKRQQRRQDYATTQKLFSQNRSKCAHEVLDGKHTIHNMQATEVVEHWANTMTQPPPEPLPCPVYTPNSDLFEVSLPISLKETHAALRGPSKALGLDGICLSSLRKLPLEVVCCILNILIISDIASAHETARLAFIPKINNATSPSDLRPLSISSYLQRTLNKILSRRLQNSIKLLPIQRAFLPYNGTFENLAVLDGILNDAKSAGRELRLASIDLRKAFDMVSHDSVLWSLRTRGYPEVFINYIERLYLSSKTLIEFGQECRTFRPTRGVRQGDPLSPLLFNLVLDDILSKLDQTNIGYQLTDDFRLMGLAFADDLILLASTKSTLQRLLNIADPLLKSRGLEINTNKSFTISHLFNRKEGKGFINTVSEFNVGDRQLPAKGMSDRWRYLGVDFDSNGRVDSTKDILLNLLNRLTIAPLKPHQRLIFLKDFLIPRLLYKLVSGPRPSYALLSDLDKEIRKVVKSKWLKLENSVPNAYLYTHTAHGGLDIPCLQTFIPRIRLSRLTALQHSTHLGVQWMLTTEHFKKDLAKTRLLCERLGTSIETATQETDYWSQQLHNTFDGAHFKKAHETPFVHYWIKGMPYLSGKEYLNLLKLRINALPTRARLARGRPGYNKRCRHGCHAPETLAHVAQMCDITHKQTIKRHDDVCDRVARLLRERGHEVVRERVFRRPGAPGLKPDLVITTPTEVWVLDAEVCGPNRDLAKARQDKIAKYDVEFLRAALPYPQKPRRFGSITISMSGVWDSESARTLLGLGVTKRNLMDLTVLTLQGTLRIYRSHRIHKSGGYHQARTRTTDS

SEQ ID NO: 553 - protein, 760 aa, Dermanyssus gallinae
MQVTEVVEHWANTMTQPPPEPLPCPVYTPNSDLFEVSLPISLKETHVALRGPSKALGLDGICLSSLRKLPLEVVCCILNILIISDIASAHETARLAFIPKINNATSPSDLRPLSISSYLQRTLNKILSRRLQNSIKLLPIQRAFLPYNGTFENLAVLDGILNDAKSAGRELRLASIDLRKAFDMVSHDSVLWSLRTRGYPEVFINYIERLYLSSKTLIEFGQECRTFRPTRGVRQGDPLSPLLFNLVLDDILSKLDKTNIGYQLTDDFRLMGLAFADDLILLASTKSTLQRLLNIADPLLKSRGLEINTNKSFTISHLFNRKEGKGFINTVSEFNVGDRQLPAKGMSDRWRYLGVDFDSNGRVDSTKDILLNLLNRLTIAPLKPHQRLIFLKDFLIPRLLYKLVSGPRPSYALLSDLDKEIRKVVKSKWLKLENSVPNAYLYTHTAHGGLDIPCLQTFIPRIRLSRLTALQHSTHLGVQWMLTTEHFKKDLAKTRLLCERLGTSIETATQETDYWSQQLHNTFDGAHFKKAHETPFVHYWIKGMPYLSGKEYLNLLKLRINALPTRARLARGRPGYNKRCRHGCHAPETLAHVAQMCDITHKQTIKRHDDVCDRVARLLRERGHEVVRERVFRRPGAPGLKPDLVITTPTEVWVLDAEVCGPNRDLAKARQDKIAKYDVEFLRAALPYPQKPRRFGSITISMSGVWDSKSARTLLGLGVTKRNLMDLTVLTLQGTLRIYRSHRIHKSGGYHQARTRTTDS

SEQ ID NO: 554 - protein, 1088 aa, Dermanyssus gallinae
MASRDGSNTAGRLSCQTCGRVCKSGAGLASHIRLTHNQREVRATSQTPNRSQTNNLILSSSQNDTAASNDNFNPPSTSRVSQPNCKCPSSTCLKVFNSKSGLNLHRRRAHPDEYNENILAPPSKKARWNPQDRELLATLEADFILDNNNETPREIDHLLATNFNSRTPGAIRGQRNSQAHKDLVEDLLKKRSLLDSNLDGSELPERSRPRYSESDGPYNPSQKYIIISKIQALTNTFPKRNIISTDLTHLSNIICSGEDHTIALNEFLNKHFTHTVRRRAFRETPSTEARVSKRQQRRQDYATTQKLFSQNRSKCAHEVLDGKHTIHNMQATEVVEHWANTMTQPPPEPLPCPVYTPNSDLFEVSLPISLKETHAALRGPSKALGLDGICLSSLRKLPLEVVCCILNILIISDIASAHETARLAFIPKINNATSPSDLRPLSISSYLQRTLNKILSRRLQNSIKLLPIQRAFLPYNGTFENLAVLDGILNDAKSTGRELRLASIDLRKAFDMVSHDSVLWSLRTREYPEVFINYIERLYLSSKTLIEFGQECRTFRPTRGVRQGDPLSPLLFNLVLDDILSKLDQTNIGYQLTDDFRLMGLAFADDLILLASTKSTLQRLLNIADPLLKSRGLEINTNKSFTISHLFNRKEGKNFINTVSEFNVGDRQLPAKGMSDRWRYLGVDFDSNGRVDSTKDILLNLLNRLTIAPLKPHQRLIFLKDFLIPRLLYKLVSGPRPSYALLSDLDKEIRKVVKSKWLKLENSVPNAYLYTHTAHGGLDIPCLQTFIPRIRLSRLTALQHSTHLGVQWMLTTEHFKKDLAKTRLLCERLGTSIETATQETDYWSQQLHNTFDGAHFKKAHETPFVHYWIKGMPYLSGKEYLNLLKLRINALPTRARLARGRPGYNKRCRHGCHAPETLAHVAQMCDITHKQTIKRHDDVCDRVARLLRERGHEVVRERVFRRPGAPGLKPDLVITTPTEVWVLDAEVCGPNRDLAKARQDKIAKYDVEFLRAALPYPQKPRRFGSITISMSGVWDSESARTLLGLGVTKRNLMDLTVLTLQGTLRIYRSHRIHKSGGYHQARTRTTDS

SEQ ID NO: 555 - protein, 760 aa, Dermanyssus gallinae
MQATEVVEHWANTMTQPPPEPLPCPVYTPNSDLLEVSLPISLKETHVTLRGPSKALGLDGICLSSLRKLPLEEVCCILNILLISDIASAHETARLAFIPKINNATSPSDLRPLSISSYLQRTLNKILSRRLQNSIKLLPIQRAFLPYNGTFENLAVLDGILNDAKSAGRELRLASIDLRKAFDMVSHDSVLWSLRTRGYPEVFINYIERLYLSSKTLIEFGQECRTFRSTRGVRQGDPLSPLLFNLVLDDILSKLDKTNIGYQLTDDFRLMGLAFADDLILLASTKSTLQRLLNIADPLLKSRGLEINTNKSFTISHLFNRKEGKGFINTVSEFNVGDRQLPAKGMSDRWRYLGVDFDSNGRVDPTKDILLNLFNRLTIAPLKPHQRLIFLKDFLIPRLLYKLVSGPRPSYALLSDLDKEIRKVVKSKWLKLENSVPNAYLYTHTARGGLDIPCLQTFIPRIRLSRLTALQHSTHLGVQWMLTTEHFKKDLAKTRLLCERLGTSIETATQETDYWSQQLHNTFDGAHFKKAHETPFVHYWIKGMPYLSGKEYLNLLKLRINALPTRARLARGRPGYNKRCRHGCHAPETLAHVAQMCDITHKQTIKRHDDVCDRVARLLRERGHEVVRERVFRRPGAPGLKPDLVITTPTEVWVLDAEVCGPNRDLAKARQDKIAKYDVEFLRAALPYPQKPRRFVSITISMRGVWDSESARTLLGLGVTKRNLMDLTVLTLQGTLRIYRSHRVHKSGGYHQARTRTADS

SEQ ID NO: 556 - protein, 760 aa, Dermanyssus gallinae
MQATEVVEHRANTMTQPPPEPLPCPVYTPNSDLFEVSLPISLKETHVALRGPSKALGLDGICLSSLRKLPLEVVCCILNILIISDIASAHETARLAFIPKINNATSPSDLRPLSISSYLQRTLNKILSRRLQNSIKLLPIQRAFLPYNGTFENLAVLDGILNDAKSAGRELRLASIDLRKAFDMVSHDSVLWSLRTRGYPEVFINYIERLYLSSKTLIEFGQECRTFRPTRGVRQGDPLSPLLFNLVLDDILSKLDKTNIGYQLTDDFRLMGLAFADDLILLASTKSTLQRLLNIADPLLKSRGLEINTNKSFTISHLFNRKEGKGFINTVSEFNVGDRQLPAKGMSDRWRYLGVDFDSNGRVDSTKDILLNLLNRLTIAPLKPHQRLIFLKDFLIPRLLYKLVSGPRPSYALLSDLDKEIRKVVKSKWLKLENSVPNAYLYTHTAHGGLDIPCLQTFIPRIRLSRLTALQHSTHLGVQWMLTTEHFKKDLAKTRLLCERLGTSIETATQETDYWFQQLHNTFDGAHFKKAHETPFVHYWIKGMPYLSGKEYLNLLKLRINALPTRARLARGRPGYNKRCRHGCHAPETLAHVAQMCDITHKQTIKRHDDVCDRVARLLRERGHEVVRERVFRRPGAPGLKPDLVITTPTEVWVLDAEVCGPNRDLAKARQDKIAKYDVEFLRAALPYPQKPRRFGSITISMSGVWDSESARTLLGLGVTKRNLMDLTVLTLQGTLRIYRSHRIHKSGGYHQARTRTTDS

SEQ ID NO: 557 - protein, 1088 aa, Dermanyssus gallinae
MASRDGSNTAGRLSCQTCGRVCKSGAGLASHIRLTHNQREVRATSQTPNQSQTNNLILSSSQNDTAASNNNFNPPSTSRVSQPNCKCPSSTCLKVFKSKSGLNLHRRRAHPDEYNENILAPPSKKARWNPQDRELLATLEADFILDNNNETPREIDHLLATNFNSRTPGAIRGQRNSQAHKDLVEDLLKKRSLLDSNLDGSELPEPSRPRYSESDGPYNPSQKDIIISKIQALTNTFPKRNIISTDLTHLSNIICSGENHTIALNEFLNKHFTHTVRRRAFRETPSTEARVSKRQQRRQDYATTQKLFSQNRSKCAHEVLDGKHTIHNMQATEVVEHWANTMTQPPPEPLPCPVYTPNSDLFEVSLPISLKETNVALRGPSKALGLDGICLSSLRKLPLEVVCCILNILLISDIASAHETARLAFIPKINNATSPSDLRPLSISSYLQRTLNKILSRRLQNSIKLLPIQRAFLPYNGTFENLAVLDGILNDAKSAGRELRLASIDLRKAFDMVSHDSVLWSLRTRGYPEVFINYIERLYLSSKTLIEFGQECRTFRPTRGVRQGDPLSPLLFNLVLDDILSKLDKTNIGYQLTDDFRLMGLAFADDLILLASTKSTLQRLLNIADPLLKSRGLEINTNKSFTISHLFNRKEGKGFINPVPEFNVGDRQLPAKGMSDRWRYLGVDFDSNGRVDSTRDILLNLLNRLTIAPLKPHQRLIFLKDFLIPRLLYKLVSGPRPSYALLSDLDKEIRKVVKSKWLKLENSVPNAYLYAHTAHGGLDIPCLQTFIPRLRLSRLTALQHSTHLGVQWMLTTEHFKKDLAKTRLLCERLGTSIETATQETDYWSQQLHNTFDGAHFKKAHETPFVHYWIKGMPYLSGKEYLNLLKLRINALPTRARLARGRPGYNKRCRHGCHAPETLAHVAQMCDTTHKQTIKRHDDVCDRVARLLRERGHEVVRERVFRRPGAPGLKPDLVITTPTEVWVLDAEVCGPNRDLAKARQDKIAKYDVEFLRAALPDPQKPRRFGSITISMSGVWDSESARTLLGLGVTKRNLMDLTVLTLQGTLRIYRSHRVHKSGGYHQARTRTTDS

SEQ ID NO: 558 - protein, 760 aa, Dermanyssus gallinae
MQATEVVEHWANTMTQPPPEPLPCPVYTPNSDLFEVSLPISLKETHAALRGPSKALGLDGICLSSLRKLPLEVVCCILNILIISDIASAHETARLAFIPKINNATSPSDLRPLSISSYLQRTLNKILSRRLQNSIKLLPIQRAFLPYNGTFENLAVLDGILNDAKSAGRELRLASIDLRKAFDMVSHDSVLWSLRTRGYPEVFINYIERLYLSSKTLIEFGQECRTFRPTRGVRQGDPLSPLLFNLVLDDIHSKLDQTNIGYQLTDDFRLMGLAFADDLILLASTKSTLQRLLNIADPLLKSRGLEINTNKSFTISHLFNRKEGKGFINTVSEFNVGDRQLPAKGMSDRWRYLGVDFDSNGRVDSTKDILLNLLNRLTIAPLKPHQRLIFLKDFLIPRLLYKLVSGPRPSYALLSDLDKEIRKVVKSKWLKLENSVPNAYLYTHTAHGGLDIPCLQTFIPRIRLSRLTALQHSTHLGVQWMLTTEHFKKDLAKTRLLCERLGTSIETATQETDYWSQQLHNTFDGAHFKKAHETPFVHYWIKGMPYLSGKEYLNLLKLRINALPTRARLARGRPGYNKRCRHGCHAPETLAHVAQMCDITHKQTIKRHDDVCDRVARLLRERGHEVVRERVFRRPGAPGLKPDLVITTPTEVWVLDAEVCGPNRDLAKARQDKIAKYDVEFLRAARPYPQKPRRFGSITISMSGVWDSESARTLLGLGVTKRNLMDLTVLTLQGTLRIYRSHRIHKSGGYHQARTRTTDS

SEQ ID NO: 559 - protein, 902 aa, Dermanyssus gallinae
MVRESIYIYIYIYIYIYIYISRPRYSESDGPYNPSQKDIIISKIQALTNTFPKRNIISTDLTHLSNIICSSEDHTIALNEFLSKHFTHTVRRRAFRETPSTEARVSKRQQRRQDYATTQKLFSQNRSKCAHKVLDGKHTIHNMQATEVVEHWANTLTQPPPEPLPCPVYTPNSDLFEVSLPISLKETHVALCGPSKALGLDGICLSSLRKLPLEVVCCILNILIISDIASAHETARLAFIPKINNATSPSDLRPLSISSYLQRTLNKILSRRLQNSIKLLPIQRAFLPYNGTFENLAVLDGVLNDAKSAGRELRLASIDLRKAFDMVSHDSVLWSLRTRGNPEVFINYIERLYLSSKTLIEFGQECRTFRPTRGVRQGDPLSPLLFNLVLDDILSKLDKTNIGYQLTDDFRLMGLAFADDLILLASTKSTLQRLLNIADPLLKSRGLEINTNKSFTISHLFNRKEGKGFINTVSEFNVGDRQLPAKGMSDRWRYLGVDFDSNGRVDSTKDILLNLLNRLTIAPLKPHQRLIFLKDFLIPRLLYKLVSGPRPSYALLSDLDKEIRKVVKSKWLKLENSVPNAYLYTHTAHGRLDIPCLQTFIPRIRLSRLTALQHSTHLGVQWMLTTEHFKKDLAKTRLLCERLGTSIETATQETDYWSQQLHNTFDGAHFKKAHETPFVHYWIKDMPYQSGKEYLNLLKLRINALPTRARLARGRPGYNKRCRHGCHAPETLAHVAQMCDITHKQTIKRHDDVCDRVARLLRERGHEVVRERVFRRPGAPGLKPDLVITTPTEVWVLDAEVCGPNRDLAKARQDKIAKYDVEFLRAALPYPQKPRRFGSITISMSGVWDSESARTLLGLGVTKRNLMDLTVLTLQGTLRIYRSHRIHKSGDYHQARTRTTDS

SEQ ID NO: 560 - protein, 760 aa, Dermanyssus gallinae
MQATEVVEHWANTMTQPPPEPLPCPVYTPNSDLFEVSLPISLKETHVALCGPSKALGLDGICLSSLRKLPLEVVCCILNILLISDIASAYETARLAFIPKINNATSPSDLRSLSISSYLQRTLNKILSRRLQNSIKLLPIQRAFLPYNGTFENLAVLDGILNDAKSAGRELRLASIDLRKAFDMVSHDSVLWSLRTRGYPEVFINYIERLYLSSKTLIEFGQECRTFRPTRGVRQGDPLSPLLFNLVLDDILSKLDKTNIGYQLTDDFRLMGLAFADDLILLASTKSTLQRLLNIADPLLKSRGLEINTNKSFTISHLFNRKEGKCFINTVSEFNVGDRQLPAKGMSDRWRYLGVDFDSNGRVDSTKDILLNLLNRLTIAPLKPHQRLIFLKDFLIPRLLYKLVSGPRPSYALLSDLDKEIRKVVKSKWLKLENSVPNAYLYTHTAHGGLDIPCLQTFIPRIRLSRLTALQHSTHLGVQWMLTTEHFKKDLAKTRLLCERLGTSIETATQETDYWSQQLHNTFDGAHFKKAHETPFVHYWIKGMPYLSGKEYLNLLKLRINALPTRARLARGRPGYNKRCRHGCHAPETLAHVAQMCDITHKQTIKRHDDVSDRVARLLRERGHEVVRERVFRRPGAPGLKPDLVITTPTEVWVLDAEVCGPNRDLAKARQDKIAKYDVEFLRAALPYPQKPRRFGSITISMSGVWDSESARTLLGLGVTKRNLMDLTVLTLQGTLRIYRSHRVHKSGGYHQARTRTTDS

SEQ ID NO: 561 - protein, 760 aa, Dermanyssus gallinae
MQATEVVEHWANTMTQPPPEPLPCPVYTPNSDLFEVSLPISLKETHVALRGPLKALGLDGICLSSLRKLPLEVVCCILNILLISDIASAHETARLAFIPKINNATSPSDLRPLSISSYLQRTLNKILSRRLQNSIKLLPIQRAFLPYNGTFENLAVLDGILNDAKSAGRELRLASIDLRKAFDMVSHDSVLWSLRTRGYPEVFINYIERLYLSSKTLIEFGQECRTFPPTRGVRQGDPLSPLLFNLVLDDILSRLDKTNIGYQLTDDFRLMGLAFADDLILLASTESTLQRLLNIADPLLKSRGLEINTNKSFTISHLFNRKEGKGFINTVPEFNVGDRQLPAKGMSDRWRYLGVDFDSNGRVDSTRDILLNLHNRLTIAPLKPHQRLIFLKDFLIPRLLYKLVSGPRPSYTLLSDLDKEIRKVVKSKWLKLENSVPNAYLYTHTAHGGLDIPCLQTFIPRLRLSRLTALQHSTHLGVQWMLTTEHFKKDLAKTRLLCERLGTSIETATQETDYWSQQLHNTFDGAHFKKAHETPFVHYWIKGMPYLSGKEYLNLLKLRINALPTRARLARGRPGYNKRCRHGCHAPETLAHVAQMCDTTHKQTIKRHDDVCDRVARLLRERGHEVVRERVFRRPGAPGLKPDLVITTPTEVWVLDAEVCGPNRDLAKARQDKIAKYDVEFLRAALPDPQKPRRFGSITISMSGVWDSESARTLLGLGVTKRNLMDLTVLTLQGTLRIYRSHRVHKSGGYHQARTRTTDS

SEQ ID NO: 562 - protein, 1034 aa, Dermanyssus gallinae
MASRDGSNTAGRLSCQTCGRVCKSGAGLASHIRLTHNQREVRATSQTPNRSQNLILSSSQNDTAASNNNFNPPSTSRVSQPNCKCPSSTCLKVFNSKSGLNLHRRRAHPDEYNENILAPPSKKARWNPQDRELLATLEADFILDNNNETPREIDHLLATNFNSRTPGAIRGQRNSQAHKDLVEDLLKKRSLLDSNLDGSELPERSRPRYSESDGPYNPSQKDIIISKIQALTNTFPKRNIISTDLTHLSNIICSGEDHTIALNEFLNKHFTHTVRRRAFRETPSTEARVSKRQQRGQDYATTQKLFSQNRSKCAHEVLDGKHTIHNMQATEVVEHWANTMTQPPPEPLPCPVYTPNSDLFEVSLPISLKETHVALRGPSKALGLDGICLSSLRKLPLEVVCCILNILIISDIASAHETARLAFIPKINNATSPSDLRPLSISSYLQRTLNKILSRRLQNSIKLLPIQRAFLPYNGTFENLAVLDGILNDAKSAGRELRLASIDLRKAFDMVSHDSVLWSLRTRGYPEVFINYIERLYLSSKTLIEFGQECRTFRPTRGVRQGDPLSPLLFNLVLDDILSKLDKTNIGYQLTDDFRLLGLAFADDLILLASTKSTLQRLLNIADPLLKSRGLEINTNKSFTISHLFNRKEGKGFINTVSEFNVGDRQLPAKGMSDRWRYLGVDFDSNGRVDSTKDILLNLLNRLTIAPLKPHQRLIFLKDFLIPRLLYKLVSGPRPSYALLSDLDKEIRKVVKSKWLKLENSVPNAYLYTHTAHGGLDIPCLQTFIPRIRLSRLTALQHSTHLGVQWMLTTEHFKKDLAKTRLLCERLGTSIETATQETDYWSQQLHNTFDGAHFKKAHETPFVHYWIKGMPYLSGKEYLNLLKLRINALPTRARLARGRPGYNKRCRHGCHAPETLAHVAQMCDITHKQTIKRHDDVCDRVARLLRERGHEVVRERVFRRPGAPGLKPDLVITTPTEVWVLDAEVCGPNRDLAKARQDKIAKYDVEFLRAALPYPQKPRRFGSITISMSGVWDS

SEQ ID NO: 563 - protein, 1088 aa, Dermanyssus gallinae
MASRDGSNTAGRLSCQTCGRVCKSGAGLASHIRLTHNQREVRATSQTPNRSQTNNLILSSSQNDTAASNNNVNPPSTSRVSQPNCKCPSSTCLKVFNSKSGLNLHRRRAHPDEYNENILAPPSKKARWNPQGRELLATLETDFILDNNNETPREIDHLLATNFNSRTPGAIRGQRNSQAHKDLVEDLLKKRSLLDSNLDGSELPERSRPRYSESDGPYNPPQKDIIISKIQALTNTFPKRNIISTEITHLSNIICSGEDHTIALNEFLNKHFTHTVRRRAFRETPSTEARVSKRQQRRQDYATTQKLFSQNRSKCAHEVLDGKHTIHNMQATEVVEHWANTMTQPPPEPLPCPVYTPNSDLFEVSLPISLKETHVALRGPSKALGLDGICLSSLRKLPLEVVCCILNILIISDIASAHETARLAFIPKINNATSPSDLRPLSISSYLQRTLNKILSRRLQNSIKLLPIQRAFLPYNGTFENLAVLDGILNDAKSAGRELRLASIDLRKAFDMVSHDSVLWSLRTRGYPEVFINYIERLYLSSKTLKEFGQECRTFRPTRGVRQGDPLSPLLFNLVLDDILSKLDKTNIGYQLTDDFRLMGLAFADDLILLASTKSTLQRLLNIADLLLKSRGLKINTNKSFTISHLFNRKEGKGFINTVLEFNVGDRQLPAKGMSDRWRYLGVDFDSNGRVDSTKDILLNLLNRLTIAPLKPNQRLIFLKDFLNPRLLYKLVSGPRPSYALLSDLDKEIRKVVKSKWLKLENSVPNAYLYTHTAHGGLDIPCLQTFIPRIRLSRLTALQHSTHLGVQWMLTTEHFKKDLAKTRLLCERLGTSLETATQETDYWSQQLHNTFDGAHFKKAHETPFVHYWIKGMPYLSGKEYLNLLKLRINALPTRARLARGRPGYNKRCRHGCHAPETLVHVAQMCDITHKQTIKRHDDVCDRVARLLRERGHEVVRERVFRRPGAPGLKPDLVITTPTEVWVLDAEVCGPNRDLAKARQDKIAKYDVEFLRAALPYPQKPRRFGSITISMSGVWDSESARTLLGLGVTKRNLMDLTVLTLQGTLRIYRSHRIYKSGGYHHARTRTTDS

SEQ ID NO: 564 - protein, 911 aa, Dermanyssus gallinae
MLPYIYIYIYIYIYTLLDSNLDGSELPERSRPRYSESDGPYNPSQKDIIISKIQALTNTFPKRNIISTDLTHLSNIICSGEDHTIALNEFLNKHFTHTVRRRAFRETPSTEARVSKRQQRRQDYATTQKLFSQNRSKCAHEVLDGKHTIHNMQATEVVEHWANTMTQPPPEPLPCPVYTPNSDLFEVSLPISLKETHVALRGPSKALGLDGTCLSSLRKLPLEVVCCILNILIISDIASAHETARLAFIPKINNATSPSDLRPLSISSYLQRTLNKILSRRLQNSIKLLPIQRAFLPYNGTFENLAVLDGILNDAKSAGRELRLASIDLRKAFDMVSHDSVLWSLRTRGYPEVFINYIERLYLSSKTLIEFGQECRTFRPTRGVRQGDPLSPLLFNLVLDDILSKLDETNIGYQLTDDFRLMGLAFADDLILLASTKSTLQRLLNIADPLLKSRGLEINTNKSFTISHLLNRKEGKGFINTVSEFNVGDRQLPAKGMSDRWRYLGVDFDSNGRVDSTKDILLNLLNRLTIAPLKPHQRLIFLKDFLIPRLLYKLVSGPRPSYALLSDLDKEIRKVVKSKWLKLENSVPNAYLYTHTAHGGLDIPCLQTFIPRIRLSRLTALQHSTHLGVQWMLTTEHFKKDLAKTRLLCERLGTSIETATQETDYWSQQLHNTFDGAHFKKAHETPFVHYWIKGMPYLSGKEYLNLLKLRINALPTRARLARGRPGYNKRCRHGCHAPETLAHVAQMCDITHKQTIKRHDDVCDRVARLLRERGHEVVRERVFRRPGAPGLKPDLVITTPTEVWVLDAEVCGPNRDLAKARQDKIAKYDVEFLRAALPYPQKPRRFGSITISMSGVWDSESARTLLGLGVTKRNLMDLTVLTLQGTLRIYRSHRIHKSGGYHQARTRTTDS

SEQ ID NO: 565 - protein, 1088 aa, Dermanyssus gallinae
MASRDGSNTAGRLSCQTCGRVCKSGAGLASHIRLTHNQREVRATSQTPNRSQTNNLILSSSQNDTAASNNNFNPPSTSRVSQPNCKCPSSTCLKVFNSKSGLNLHRRRAHPDEYNENILAPPSKKARWNPQDRELLATLEADFILDNNNETPREIDHLLATNFNSRTPGAIRGQRNSQAHKDLVEDLLKKRSLLDSNLDGSELPERSRPRYSESDGPYNPSQKDIIISKIQALTNTFPKRNIISTDLTHLSNIICSGEDHTIALNEFLNKHFTHTVRRRAFRETPSTEARVSKRQQRRQDYATTQKLFSQNRSKCAHEVLDGKHTIHNMQATEVVEHWANTMTQPPPEPLPCPVYTPNSDLFEVSLPISLKETHVALRGPSKALGLDGICLSSLRKLPLEVVCCILNILIISDIASAHETARLAFIPKINNATSPSDLRPLSISLYLQRTLNKILSRRLQNSIKLLPIQRAFLPYNGTFENLAVLDGILNDAKSAGRELRLASIDLRKAFDMVSHDSVLWSLRTRGYPEVFINYIERLYLSSKTLIEFGQECRTFRPTRGVRQGDPLSPLLFNLVLDDILSKLDETNIGYQLTDDFRLMGLAFADDLILLASTKSTLQRLLNIADPLLKSRGLEINTTESFTISHLFNRKEGKGFINTVSEFNVGDRQLPAKGMSDRWRYLGVDFDSNGRVDSTKDILINLLNRLTIAPLKPHQRLIFLKDFLIPRLLYKLVSGPRPSHALLSDLDKEIRKVVKSKWLKLENSVPNAYLYTHTAHGGLDIPCLQTFIPRIRLSRLTALQHSTHLGVQWMLTTEHFKKDLAKTRLLCERLGTSIETATQETDYWSQQLHNTFDGAHFKKAHETPFVHYWIKGMPYLSGKEYLNLLKLRINALPTRPRLARGRPGYNKRCRHGCHAPETLAHVAQMCDITHKQTIKRHDDVCDRVARLLRERGHEVVRERVFRRPGAPGLKPDLVITTPTEVWVLDAEVCGPNRDLAKARQDKIAKYDVEFLRAALPYPQKPRRFGSITISMSGVWDSESARTLLGLGVTKRNLMDLTVLTLQGTLRIYRSHRIHKSGGYHQARTRTTDS

SEQ ID NO: 566 - protein, 760 aa, Dermanyssus gallinae
MHATEVVEHWANTMTEPPPEPLPCPVYTPNSDLFEVSLPISLKETHVALRGPSKALGLDGICLSSLRKLPLEVVCCILNILLISDIASAHETARLAFIPKINNATSPSDLRPLSISSYLQRTLNKILSRRLQKSIKLLPIQRAFLPYNGTFENLAVLDGILNDAKSAGRELRLASIDLRKAFDMVSHDSVLWSLRTRGYPEVFINYIERLYLSSKTLIEFGQECRTFRPTRGVRQGDPLSPLLFNLVLDDILSKLDKTNIGYQLTDDFRLMGLAFADDLILLASTKSTLQRLLNIADPLLKSRGLEINTNKSFTISHLFNRKEGKGFINTVSEFNVGDRQLPAKGMSDRWRYLGVDFDSNGRVDSTKDILLNLLNRLTIAPLKPHQRVIFLKDFLIPPLLYKLVSGPRPSYALLSDLDKEIRKVVKSKWLKLENLVPNAYLYTHTAHGGLDIPCLQTFIPRIRLSRLTALQHSTHLGVQWMLTTKHFKKDLAKTRLLCERLGTSIETATQETDYWSQQLHNTFDGAHFKKARETPFVHYWIKGMPYLSGQEYLNLLKLRINALPTRARLARGRPGYNKRCRHGCHAPETLAHVAQMCDITHKQTIKRHDDVCDRVARLLRERGHEVVRERVFRRPGAPGLKPDLVITTPTEVWVLDAEVCGPNRDLAKARQDKIAKYDVEFLRAALPYSQKPRRFGSITISMSGVWDSESARTLLGLGVTKRNLMDLTVLTLQGTLRIYRSHRVHKSGGYHKARTRTTDS

SEQ ID NO: 567 - protein, 1088 aa, Dermanyssus gallinae
MASRDGSNTAGRFSCQTCGRVCKSGAGLASHIRLTHNQREVRATSQTSNRSQTNNLILSSSQNDTAASNNNFNPPSTSRVSQPNCKCPSSTCLKVFNSKSGLNLHRRRAHPGEYNENILAPPSKKARWNPQDRELLATLEADFILDNNNETPREIDHLLATNFNSRTPGAIRGQRNSQAHKDLVEDLLKKRSLLDSNLDGSELPERSRPRYSESDGPYNPSQKDTIISKIQALTNTFPKRNIISTDLTHLSNIICSGEDHTIALNEFLNKHFTHTVRRRAFRETPSTEARVSKRQQRRQDYATTQKLFSQNRSKCAHEVLDGKHTIHNMQATEVVEHWANTMTQPPPEPLPCPVYTPNSDLFEVSLPISLRETHVALRGPSKALGLDGICLSSLRKLPLEVVCCILNILIISDIASAHETARLAFIPKINNATSPSDLRPLSISSYLQRTLNKILSRRLQNSIKLLPIQRAFLPYNGTFENLAVLDGILNDAKSAGRELRLASIDLRKAFDMVSHDSVLWSLRTRGYPEVFINYIERLYLSSKTLIEFGQECRTFRPTRRVRQGDPLSPLLFNLVLDDILSKLDKTNIGYQLTDDFRLMGLAFADDLILLASTKSTLQRLLNIADPLLKSRGLEINTNKSFTISHLFNRKEGKGFINTVSEFNVGDRQLPAKGMSDRWRYLGVDFDSNGRVDSTKDILLNLLNRLTIAPLKPYQRLIFLKDFLIPRLLYKLVSGPRPSYALLSDLDKEIRKVVKSKWLKLENSVPNAYLYTHTAHGGLDIPCLQTFIPRIRLSRLTALQHSTHLGVQWMLTTEHFKKDLAKTRLLCERLGTSIETATQETDYWSQQLHNTFDGAHFKKAHETPFVHYWIKGMPYLSGKEYLNLLKLRINALPTRARLARGRPGYNKRCRHGCHAPETLAHVAQMCDITHKQTIKRHDDVCDRVARLLRERGHEVVRERVFRRPGAPGLKPDLVITTPTEVWVLDAEVCGPNRDLAKARQDKIAKYDVEFLRAALPYPQKPRRFGSITISMSGVWDSESARTLLGLGVTKRNLMDLTVLTLQGTLRIYRSHRIHKSGGYHQARTRTTDS

SEQ ID NO: 568 - protein, 905 aa, Dermanyssus gallinae
MYKHICIYIYIYIYIYMYKYICIYETPREIDHLLATNFNSRTPGAIRGQRNSRAHKDLVEDLLKKRSLLDSNLDGSELPEPSRPRYSESDGPYNPSQKDIIISKIQALTNTFPKRNIISTDLTHLSNIICSGENHTIALNEFLNKHFTHTVRRRAFRETPFTEARVSKRQQRRQDYATTQKLFSKNRSKCAHEVLDGKHTIHNMQATEVVEHWANTMTQPPPEPLPCPVYTPNSDLFEVSLPIFLKETHVALRGPSKALGLDGICLSSLRKLPLEVVSCILNILLISDIASAHETARLAFIPKINNATSPSDLRPLSISSYLQRTLNKILSRRLQNSIKLLPIQRAFLPYNGTFENLAVLDGILNDAKSAGRELRLASIDLRKAFDVVSHDSVLWSLRTRGYPEVFINYIERLYLSSKTLIEFGQECRTFRPTRGVRQGDPLSPLLFNLVLDDILSKLDKTHLFNRKEGKGFINTVPEFNVGDRQLPAKGMSDRWRYLGVDFDSNGRVDSTRDILLNLLNRLTIAPLKPHQRLIFLKDFLIPRLLYKLVSGPTPSYALLSDLDKEIRKVVKSKWLKLENSVPNAYLYTHTAHGGLDIPCLQTFIPRLRLSRLTALQHSTHLGVQWMLTTEHFKKDLAKTRLLCERLGTSIEAATQETDYWSQQLHNTFDGAHFKKAYETPFVHYWIKGMPYLSGKEYLNLLKLRINALPTRARLARGRPGYNKRCRHGCHAPETLAHVAQMCDTTHKQTIKRHDDVCDRVARLLRERGHEVIRERVFRRPGAPGLKPDLVITTPTEVWVLDAEVCGPNRDLAKARQDKIAKYDVEFLRAALPDPQKPRRFGSITISMSGVWDSESARTLLGLGVTKRNLMDLTVLTLQGTLRIYRSHRVHKSGGYHQARTRTTDS

SEQ ID NO: 569 - protein, 757 aa, Dermanyssus gallinae
MQATGVVEHWANTMTQPPPEPLPCPVYTPNSDLFEVSLPISLKETHVALRGPSKALGLDGICLSSLRKLPLEVVCCILNTLLISDIASAHETARLAFIPKINNATSPSDLRPLSISSYLQRTLNKILSRRLQNSVKLLPIQRAFLPYNGTFENLAVLDGILNDAKSAGRELRLASIDLRKAFDMVSHDSVLWSLRTRGYPEVFINYIERLYLSSKTLIEFGQECRTFRPTKGVRQGEPLSPLLFNLVLDDILSKLDKTNIGYQLTDDFRLMGLAFADDLILLASTKSTLQRLLNIADPLLKSRGLEINTNKSFTISHLSNRKEGKGFINTVPEFNVGDRQLPAKGMSDRWRYLGVDFDSNGRVDSTRDILLNLLNRLTIAPLKPHQRLIFLKDFLIPRLLYKLVTGPRPSYALLSDLDKEIRKVVKSKWLKLENSVPNAYLYTHTAHGGLDIQTFIPRLRLSRLTALQHSTHLGVQWMLTTKHFKKDLAKTRLLCERLGTSIETATQETDYWSQQLHNTFDGAHFKKAHETPFVHYWIKGMPYLSGKEYLNLLKLRINALPTRARLARGRPGYNKRCRHGCHAPETLAHVAQMCDTTHKQTIKRHDDICDRVARLLRERGHEVVRERVFRQPGAPGLKPDLVITTPTEVWVLDAEVCGPNRDLAKARQDKIAKYDVEFLRAALPDPQKPRRFGSITISVSGVWDSESARTLLGLGVTKRSLMDLTVLTLQGTLRIYRSHRVHKSGGYHQARTRTTDS

SEQ ID NO: 570 - protein, 738 aa, Dermanyssus gallinae
MQATEVVEHWANTMTQPPPEPLPCPVYTPNSDLFEVSLPISLKETHVALRGPSKALGLDGICLSSLRKLPLEVVCCILNILIISDIASAHETARLAFIPKINNATSPSDLRPLSISSYLQRTLNKILSRRLQNSIKLLPIQRAFLPYNGTFENLAVLDGILNDAKSAGRELRLASIDLRKAFDMVSHDSVLWSLRTRGYPEVFINYIERLYLSSKTLIEFGQECRTFRPTRGVRQGDPLSPLLFNLVLDDILSKLDKTNIGYQLTDDFRPMGLAFADDLILLASTKSTLQRLLNIADPLLKSRGFINTVSEFNVGDRQLPAKGMSDRWRYLGVDFDSNGRLDSTKDILLNLLNRLTIAPLKPHQRLIFLKDFLIPRLLYKLVSGPRPSYALLSDLDKEIRKVVKSKWLKLENSVPNAYLYTHTAHGVLDIPCLQTFIPRIRLSRLTALQHSTHLGVQWMLTTEHFKKDLAITRLLCERLGTSIETATQETDYWSQQLHNTFDGAHFKKAHETPFVHYWIKGMPYLSGKEYLNLLKLRINALPTRARLARGRPGYNKRCRHGCHAPETLAHVAQMCDITHKQTIKRHDDVCDRVARLLRERGHEVVRERVFRRPGAPGLKPDLVITTPTEVWVLDAEVCGPNRDLAKARQDKIAKYDVEFLRAALPYPQKPRRFGSITISMSGVWDSESARTLLGLGVTKRNLMDLTVLTLQGTLRIYSSHRIHKSGGYHQARTRTTDS

SEQ ID NO: 571 - protein, 825 aa, Dermanyssus gallinae
MQATEVVEHWANPMTQPPPEPLPCPVYTLNSDLFEVCLPISLKETHVAFRGPSKALGLDGICLSSLRKLPLEVVCCILNILLISDIALAHETARLAFIPKINNATSPSDLRPLSISSYLQRTLNKILSRRLQNSIKLLPIQQAFLPYNGTFENLAVLDGILNDAKSAGRELRLASIDLRKAFDMVSHDSVLWSLRTRGYPEVFINYIERLYLSSKTLIEFGQECRTFQPTRGVRQGDTLSPLLFNLVLDDILSKLDKTNIEYQLTDDFRLMGLAFADDLILLASTKSTLQRLLNIADPLLKSRSFEINKSFTISHLFNRKEGKGFINTVPEFNVGDRQLPAKGMSDRWRYLGVDFDSNGRVDSTKDILLNLLNRLTIAPLKPYQRLIFLKDFLIPRLLYKLVSGPRPSYALLSDLDKEIRKVVKSKWLKLENSVPNAYPYTHTAHGGLDIPCLQTFIPRIRLSRLTALQHSTHLGVQWMLTTEHFKKYLAKTRLLCERLGTSIETATQETDYWSQQLHNTFDGAHFKKVHETPFVHYWIKGMPYLSGKEYLNLLKLRINALPTRARLARGRPGYNKRCRHGCHAPETLAHVAQMCDITHKQTIKRHDDVCDRVARLLREWGHEVVRERVFRRPGAPGLKPDLVITTPTEVWVLDAEVCGPNRDLAKARQDKIAKYDVEFLKAALPYPQKPRRFGSITISMSGVWDSESARTLLGLGVTKRNLMDLTVLRTGGSVARGVLLFSIIFEKMFKKPAGVSSAPTMPTTSFLMVVCWLTCVCACSHAPPTISSASLLRKTAIPPTGRFMSDAADGYSLSFSRRTLCFSDP

SEQ ID NO: 572 - protein, 758 aa, Dermanyssus gallinae
MQATEVVEHWANTMTQPPPEPHPCPVYTPNSDLFEVSLPISLKETHVALRGPSKALGLDGICFSSLRKLPLEVVCCILNILLISDIASAHETARLAFIPKINNATSPSDLRPLSISSYLQRTLNKILSRRLQNSIKLLPIQRAFLPYTGTFENLAVLDGILNDAKSAGRELRLASIDLRKAFDMVSHDSVLWSLRTRGYPEVFINYIERLYLSSKTLIEFGQECRTFRPTRGVRQGDPLSPLLFNLVLDDILSKLDKTNIGYQLTDDFRLMGLAFADDLLASTKSTLQRLLNIADPLLKSRGLEINTNKSFTISHLFNRKKGKGFINTVSEFNVGDRQLPAKGMSDRWRYLGVDFDSNGRVDSTKDILLNLLNRLTIAPFKPHQRLIFLKDFLIPRLLYKLVSGPRPSYALLSDLDKEIRKVVKSKWLKLKNSVPNAYLYTHTAHGGLDIPCLQTFIPRIRLSRLTALQHSTHLGVQWMLTTQHFKKDLAKTRLLCERLGTSIETATQKTDYWSQQLHNTFDGAHFKKAHETPFVHYWIKGMPYLSGKEYLNLLKLRTNALPTRARLARGRPGYNKRCRHGCHAPETLAHVAQMCDITHKQTIKRHDDVCDRVARLLRERGHKVVCERVFRRPGAPGLKPDLVITTPTEVWVLDAEVCGPNRDLAKARQDKIAKYDVEFLRAALPYPQKPRRFGSITISMSGVWDSESARTLLGLGVTKRNLMDLTVLTLQGTLRIYRSHRVHKSGGYHQARTQTTDS

SEQ ID NO: 573 - protein, 998 aa, Dermanyssus gallinae
MLMALKNGTSKQNKLNNLGGFVSIFQIQITRACPSALSAYMYIYIYIFIYIYIYIYIYIYICIYIYIYIYIYILYIYIYIYIYIKRNSQAHKDLVEDLLKKRSLLDSNLDGSELPERSRPRYSESDGPYNPSQKDIIISKIQALTNTFPKRNIISTDLTHLSNIICSGEDHTIALNEFLNKHFTHTVRRRAFRETPSTEARVSKRQQRRQDYATTQKLFSQNRSKCAHEVLDGKHTIHNMQATEVVEHWANTMTQPPPEPLPCPVYTPNSDLFEVSLPISLKETHAALRGPSKALGLDGICLSSLRKLPLEVVCCILNILIISDIASAHETARLAFIPKINNATSPSDLRPLSISSYLQRTLNKILSRRLQNSIKLLPIQRAFLPYNGTFENLAVLDGILNDAKSAGRELRLASIDLRKAFDMVSHDSVLWSLRTRGYPEVFINYIERLYLSSKTLIEFGQECRTFRPTRGVRQGDPLSPLLFNLVLDDILSKLDQTNIGYQLTDDFRLMGLAFADDLILLASTKSTLQRLLNIADPLLKSRGLEINTNKSFTISHLFNRKEGKGFINTVSEFNVGDRQLPAKGMSDRWRYLGVDFDSNGRVDSTKDILLNLLNRLTIAPLKPHQRLIFLKDFLIPRLLYKLVSGPRPSYALLSDLDKEIRKVVKSKWLKLENSVPNAYLYTHTAHGGLDIPCLQTFIPRIRLSRLTALQHSTHLGVQWMLTTEHFKKDLAKTRLLCERLGTIETATQETDYWSQQLHNTFDGAHFKKAHETPFVHYWIKGMPYLSGKEYLNLLKLRINALPTRARLARGRPGYNKRCRHGCHAPETLAHVAQMCDITHKQTIKRHDDVCDRVARLLRERGHEVVRERVFRRPGAPGLKPDLVITTPTEVWVLDAEVCGPNRDLAKARQDKIAKYDVEFLRAALPYPQKPRRFGSITISMSGVWDSESARTLLGLGVTKRNLMDLTVLTLQGTLRIYRSHRIHKSGGYHQARTRTTDS

SEQ ID NO: 574 - protein, 955 aa, Dermanyssus gallinae
MTSRQTDIRRWVSSTTQTEQLAGQLQADTPTQPITSNRLPNQPFQTDPDQPFHIADYFTKVVEIKSKLKMISCTPRSLRSHVAAELSKTINDLCSSASPENWERLFAFPSLVFSIPAKKEKGRTLTSVIRENLVRYRRRAKISENPHLCGTKRGTPSPCDTDSRRSKMVQTKLALGDISSAARTLLSTDEIAPVDPQTLESLLAKHPEHPPDTTFPGAPATTPPGSEISVTPAEIRNAIRSFPNCSSGGPDRLRPRHLKDLIGRQDENSNPLLLSLCRFVTLAINGQLPDFILPIFYGASLIALRKKDGGIRPIAVGLTLRRLVGKVLVKKSIKDIVELVAPLQLGCGIKGGTEATVHATAAYIESHRAANQKTLVKLDFQNAFNMMRRDHILNSVKRRTPALYAAIYQMYRFPSNLYWQGKTLLSKCGVQQGDPCGPALFCIGLHELQAQLQSELRPWYLDDGLLAGDLPDVLSDIKKVQDFEAVSGLKLNDKKCELLVLSRNDREETAAAVRAKLPNIKWLTEENVELLGAPLTDAAVAGALQKGLSDAKRWCSRLKHLDAHPALYLLRQSLSTPRLIYLLRCSPSYKRDDLLHVLDELFRTTLECLLNVRLEDNAWAQATLPISAGGLGVRSTKDLALSCYVGSITDFKHLIVSIGPEGTSEVIERASRTSLDEFESRWEALPVSPTQESLDRIVVERKQAYLLSQAQTTADKARLRACFDPMSGKWLQALPSPQLGTMLDNNTLRIVSGLRLGESVCAAHLCNRCRFPVTTTGVHALSCRYSAGRHPRHYAINDVVCRALHSAQVPAVKEPLGLSANSGLRPDGKTLTPWERGRLLVWDVTVSCTLARSYVARTSQKAGASACLAEDRKLAKYRELNPQFIVQPIAIETYGPMGEETSKFFKELGKRLNAVTRDPRSGEFLLQRVSIELQRGNAASVEGSLPSAEGFPEIP

SEQ ID NO: 575 - protein, 886 aa, Dermanyssus gallinae
MISCTPRSLRSHVAAELSKTINDLCSSASPENWERLFAFPSLVFSIPAKKEKGRTLTSVIRENLVRYRRRAKISENPHLCGTKRGTPSPCDTDSRRSKMVQTKLALGDISSAARTLLSTDEIAPVDPQTLESLLAKHPEHPPDTTFPDAPATTPPGSEISVTPAEIRNAIRSFPNCSSGGPDGLRPRHLKDLIGRQDENSNPLLLSLCRFVTLAINGQLPDFILPIFYGASLIALRKKDGGIRPIAVGLTLRRLVGKVLVKKSIKDIVELVAPLQLGCGIKGGTEAAVHATAAYIESHRAANQKTLVKLDFQNAFNMMRRDHILNSVKRRTPALYAAIYQMYRFPSNLYWQGKTLLSKCGVQQGDPCGPALFCIGLHELQAQLQSELRPWYLDDGLLAGDLPDVLSDIKKVQDFEAVSGLKLNDKKCELLVLSRNDREETAAAVRAKLPNIKWLTEENVELLGAPLTDAAVAGALQKRLSDAKRWCSRLKHLDAHPALYLLRQSLSTPRLIYLLRCSPSYKRDDLLHVLDELFRTTLECLLNVRLEDNAWAQATLPISAGGLGVRTTKDLALSCYVGSITDFKHLIVSIGPEGTSEVIERASRTSLDEFESRWEALPVSPTQESLDRIVVERKQAYLLSQAQTTADKARLRACFDPMSGKWLQALPSPQLGTMLDNNTLRIVSGLRLGESVCAAHLCNRCRFPVTTTGVHALSCRYSAGRHPRHYAINDVVCRALHSAQVPAVKEPLGLSANSGLRPDGKTLTPWERGRLLVWDVTVSCTLARSYVARTSQKAGASACLAEDRKLAKYRELNPQFIVQPIAIETYGPMGEETSKFFKELGKRLNAVTRDPRSGEFLLQRVSIELQRGNAASVEGSLPSAEGFPEIP

SEQ ID NO: 576 - protein, 955 aa, Dermanyssus gallinae
MTSRQTDIRRWVSSTTQTEQLAGQLQADTPTQPITSNRLLNQQLQPDPGQPFHIADYFPKVVEIKSKLKIISCTPRSLRSHVAAELSKTINDLCSSASPENWERLFAFPSLVFSIPARKEKGRTLTSVIRENLARFRRRAKIDENPHLCGTKRGTPSPCDTDIRRSKMVQTKLAQGDISSAARTLLSTDQMAPVNPQTLESLIAKHPEHPPDATFPDAPVTRPPGSEISVTPAEIRNAIRSFPNCSSGGPDGLRPRHLKDLIGRQDENSNPLLLSLCRFVALAINGQLPEFILPIFYGASLIALRKKDGGIRPIAVGLTLRRLVGKVLVKKSIKNIVELVAPLQLGCGIKGGTEAAVHATAAYIESHRAANHKILVKLDFQNAFNMMRRDHILNSVKQRTPELYAAIYQMYRFPSNLYWQGKTKLSKCGVQQGDPCGPALFCIGLYELQARLQSELRPWYLDDGLLAGDLPGVLSDIKKVQDFEAVSGLKLNDSKCELLVLSHNDREETAAAVRAKLPNIKWLTEENVELLGAPLTDAAVVGALQKRLTDAKRWCSRLKHLDAHPALYLLRESLSTPRLIYLLRCSPSYKRDDLLHVFDELLRTTLECLLNVRLGDNAWAQATLPVSAGGLGVRTTKDLALSCYVGSITDFKHLIASIGPEGTSEVIERASRTSLDEFEARWEALPVSPTQESLDRIVVELKQASLLSQAQTTADKARLRACFDPMSGKWLQALPSPQLGTMLDNNTLRIVSGLRLGETVCAAHLCNRCQSPVTTTGEHALSCRYSAGRHPRHYAINDVVCRALHSAQVPAVKEPPGLSANSGLRPDGKTLTPWERGRLLVWDVTVSCTLARSYVARTSQKAGASACLAEDRKLAKYRELNPQFIVQPIALETYGPMGKETSRFFKELGKRLNAVTRDPRSGEFLLQRVSIELQRGNAASVEGSLPSAEGFPEIP

SEQ ID NO: 577 - protein, 955 aa, Dermanyssus gallinae
MTSRQTDIRRWVSSTTQTEQLPGQLQADTPTQPITSNRLLNQQLQPDPGQPFHIADYFPKVVEIKSKLKIISCTPRSLRSHVAAELSKTINDLCSSASPENWERLFAFPSLVFSIPARKEKGRTLTSVIRENLARFRRRAKIDENPHLCGTKRGTPSPCDTDIRRSKMVQTKLAQGDISSAARTLLSTDQMAPVNPQTLESLIAKHPEHPPDATFPDAPATRPPGSEISVTPAEIRNAIRSFPNCSSGGPDGLRPRHLKDLIGRQDENSNPLLLSLCRFVTLAINGQLPEFILPIFYGASLIALRKKDGGIRPIAVGLTLRRLVGKVLVKKSIKDIVELVAPLQLGCGIKGGTEAAVHATAAYIESHRAANHKILVKLDFQNAFNMMRRDHILNSVKQRTPELYAAIYQMYRFPSNLYWQGKTILSKCGVQQGDPCGPALFCIGLYELQARLQSELRPWYLDDGLLAGDLPGVLSDIKKVQDFEAVSGLKLNDSKCELLVLSHNDREETAAAVRAKLPNIKWLTEENVELLGAPLTDAAVVGALQKRLTDAKRWCSRLKHLDAHPALYLLRESLSTPRLIYLLRCSPSYKRDDLLHVFDELLRTTLECLLNVRLGDNAWAQATLPVSAGGLGVRTTKDLALSCYVGSITDFKHLIASIGPEGTSEVIERALRTSLDEFEARWEALPVSPTQESLDRIVVELKQASLLSQAQTTADKARLRACFDPMSGKWLQALPSPQLGTMLDNNTLRIVSGLRLGETVCAAHLCNRCRSPVTTTGEHALSCRYSAGRHPRHYAINDVVCRALHSAQVPAVKEPPGLSANSGLRPDGKTLTPWERGRLLVWDVTVSCTLARSYVARTSQKAGASACLAEDRKLAKYRELNPQFIVQPIALETYGPMGEETSRFFKELGKRLNAVTRDPRSGEFLLQRVSIELQRGNAASVEGSLPSAEGFPEIP

SEQ ID NO: 578 - protein, 952 aa, Dermanyssus gallinae
MTSRQTDIRRWVSSTTQTEQPAGQLQADTPTQPITSNRLPNQPFQTDSGQPFHIADYFPKVVEIKSKLKMISCTSRSLRSHVAAELSKTINDLCSSASPENWERLFAFPSLVFSIPAKKEKGRTLTSVIRENLVRFRRRAKISENPHLCGTKRGTPSPCDTDSRRSKMVQTKLALGDISSAARTLLSTDEIAPVDPQTLESLLAKHPEHPPDTTFPDAPATSPPGSKISVTPAEIRNAIRSFPTCSSGGPDGLRPRHLKDLIGRQDENSNPLLLSLCRFVTLAINGHFILPIFYGAPLIALRKKDGGIRPIAVGLTLRRLVGKVLVKKSIKDIVELVAPLQLGCGIKGGTEAAVHATAAYIESHRAANQKCLVKLDFQNAFNMMRRDHILNSVKRRTPALYAAIYQMYRFPSNLYWQGKTMLSKCGVQQGDPCGPALFCIGLHELQARLQSELRPWYLDDELLAGDLPDVLSDIKKVQDFEAVSGLKLNDKKCELLVLSRNDREETAAAVRAKLPNIKWLTEENVELLGAPLTDAAVVGALQKRLTDAKRWCSRLKHLDAHPALYLLRQSLSSPRLIYLLRCSPSYKRDDLLYVLDELFRTTLECLLNVRLGDNAWAQATLPISAGGLGVRTTKDLALSCYMGSITDFKHLIVSIVPGGTSEVIERASRTSLDEFELRWEALPVSPTQGSLDRIVVEGKQAYLLSQAQTTADKARLRACFDPMSGKWLQALPSPQLGTMLDNNTLRIVSGLRLGESVCAAHLCNRCRFPVTTTGVHALSCRYSAGRHPRHYAINDVVCRALHSAQVPAVKEPLGLSANSGLRPDGKTLTPWERGRLLVWDVTVSCTLARSYVARTSQKAGASACLAEDRKLAKYRELNPQFIVQPIAIETYGPMGEETSKFFKELGKRLNAVTRDPRSGEFLLQRVSIELQRGNAASVEGSLPSAEGFPEIP

SEQ ID NO: 579 - protein, 954 aa, Dermanyssus gallinae
MTSRQTDIRRWVSSTTQTEQLASQLQADTPTQPITSNRLLNQQLQPDPGQPFHIADYFPKVVEIKSKLKIISCTPRSLRSHVAAELSKTINDLCSSASPENWERLFAFPSLVFSIPARKEKGRTLTSVIRENLARFRRRAKIDENPHLCRTKRGTPSPCDTDIRRSKMVQTKLAQGDISSAARTLLSTDQMAPVNPQTLESLIAKHPEHPPDATFPDAPATRPPGSEISVTPAEIRNAIRSFPNCSSGGPDGLRPRHLKDLIGRQDENSNPLLLSLCRFVTLAINGQLPEFILPIFYGASLIALRKKDGGIRPIAVGLTLRRLVGKVLVKKLIKDIVELVAPLQLGCGIKGGTEAAVHATAAYIESHRAANHKILVKLDFQNAFNMMRRDHILNSVKQRTPELYAAIYQMYRFPSNLYWQGKTILSKCGVQQGDPCGPALFCIGLYELQARLQSELRPWYLDDGLLAGDLPGVLSDIKKVQDFEAVSGLKLNDSKCELLVLSHNDREETAAAVRAKLPNIKWLMEENVELLGAPLTDAAVAGALQKRLTDAKRWCSRLKHLDAHPALYLLRESLSTPRLIYLLRCSPSYKRDDLLHVFDELLRTTLECLLNVRLGDNAWAQATLPVSAGGLGVRTTRDLALSCYVGSITDFKHLIASIGPEGTSEVIERASRTSLDEFEARWEALPASLTQESLDRIVVELKQASLLSQAQTTADKARLRACFDPMSGKWLQALPSPQLGTMLDNNTLRIVSGLRLGETVCAAHLCNRCRSPVTTTGEHALSCRYSAGRHPRHYAINDVVCRALYAQVPAVKEPPGLSANSGLRPDGKTLTPWERGRLLVWDVTVSCTLARSYVARTSQKAGASACLAEDRKLAKYRELNPQFIVQPIALETYGPMGEETSRFFKELGKRLNAVTRDPRSGEFLLQRVSIELQRGNAASVEGSLPSAEGFPEIP

SEQ ID NO: 580 - protein, 955 aa, Dermanyssus gallinae
MTSRQTDIRRWVSSTTQTEQLAGQLQADTPTQPITSNRLPNQPFQTDPDQPFHIADYFTKVVEIKSKLKMISCTPRSLRSHVAAELSKTINDLCSSASPENWERLFAFPSLVFSIPAKKEKGRTLTSVIRENLVRYRRRAKISENPHLCGTKRGTPSPCDTDSRRSKIVQTKLALGDISSAARTLLSTDEIAPVDPQTLESLLAKHPEHPPDTTFPDAPATTPPGSEISVTPAEIRNAIRSFPNCSSGGPDGLRPRHLKDLIGRQDENSNPLLLSLCRFVTLAINGQLPDFILPIFYGASLIALRKKDGGIRPIAVGLTLRRLVGKVLVKKSIKDIVELVAPLQLGCGIKGGTEAAVHATAAYIESHRAANQKTLVKLDFQNAFNMMRRDHILNSVIRRTPALYAAIYQMYRFPSNLYWQGKTLLSKCGVQQGDPCGPALFCIGLHELQAQLQSELRPWYLDDGLLAGDLPDVLSDIKKVQDFEAVSGLKLNDKKCELLVLSRNDREETAAAVRAKLPNIKWLTEENVELLGAPLTDAAVAGALQKRLSDAKRWCSRLKHLDAHPALYLLRQSLSTPRLIYLLRCSPSYKRDDLLHVLDELFRTTLECLLNVRLEDNAWAQATLPISAGGLGVRTTKDLALSCYVGSITDFKHLIVSIGPEGTSEVIERASRTSLDEFESRWEALPVSPTQESLDRIVVERKQAYLLSQAQTTADKARLRACFDPMSGKWLQALPSPQLGTMLDNNTLRIVSGLRLGESVCAAHLCNRCRFPVTTTGVHALSCRYSAGRHPRHYAINDVVCRALHSAQVPAVKEPLGLSANSGLRPDGKTLTPWERGRLLVWDVTVSCTLARSYVARTSQKAGASACLAEDRKLAKYRELNPQFIVQPIAIETYGPMGEETSKFFKELGKRLNAVTRDPRSGEFLLQRVSIELQRGNAASVEGSLPSAEGFPEIP

SEQ ID NO: 581 - protein, 955 aa, Dermanyssus gallinae
MTSRQTDIRRWVSSTTQTEQLAGQLQADTPTQPITSNRLPNQPFQTDPDQPFHIADYFTKVVEIKSKLKMISCTPRSLRSHVAAELSKTINDLCSSASPENWERLFAFPSLVFSIPAKKEKGRTLTSVIRENLVRYRRRAKISENPHLCGTKRGTPSPCDTDSRRSKMVQTKLALGDISSAARTLLSTDEIAPVDPQTLESLLAKHPEHPPDTTFPDAPATTPPGSEISVTPAEIRNAIRSFPNCSSGGPDGLRPRHLKDLIGRQDENSNPLLLSLCRFVTLAINGQLPDFILPIFYGASLIALRKKDGGIRPIAVGLTLRRLVGKVLVKKSIKDIVELVAPLQLGCGIKGGTEAAVHATAAYIESHRAANQKTLVKLDFQNAFNMMRRDHILNSVKRRTPALYAAIYQMYRFPSNLYWQGKTLLSKCGVQQGDPCGPALFCIGLHELQAQLQSELRPWYLDDGLLAGDLPDVLSDIKKVQDFEAVSGLKLNDKKCELLVLSRNDREETAAAVRAKLPNIKWLTEENVELLGAPLTDAAVAGALQKRLSDAKRWCSRLKHLDAHPALYLLRQSLSTPRLIYLLRCSPSYKRDDLLHVLDELFRTTLECLLNVRLEDNAWAQATLPISAGGLGVRTTKDLALSCYVGSITDFKHLIVSIGPEGTSEVIERASRTSLDEFESRWEALPVSPTQESLDRIVVERKQAYLLSQAQTTADKARLRACFDPMSGKWLQALPSPQLGTMLDNNTLRIVSSLRLGESVCAAHLCNRCRFPVTTTGVHALSCRYSAGRHPRHYAINDVVCRALHSAQVPAVKEPLGLSANSGLRPDGKTLTPWERGRLLVWDVTVSCTLARSYVARTSQKAGASACFAEDRKLAKYRELNPQFIVQPIAIETYGPMGEETSKFFKELGKRLNAVTRDPRSGEFLLQRVSIELQRGNAASVEGSLPSAEGFPEIP

SEQ ID NO: 582 - protein, 955 aa, Dermanyssus gallinae
MTSRQTDIRRWVSSTTQTEQLASQLQADTPTQPITSNRLLNQQLQPDPGQPFHIADYFPKVVEIKSKLKIISCTPRSLRSHVAAELSKTINDLCSSASPENWERLFAFPSLVFSIPARKEKGRTLTSVIRENLARFRRRAKIDENPHLCGTKRGTPSPCDTDIRRSKMVQTKLAQGDISSAARTLLSTDQMAPVNPQTLESLIAKHPEHPPDATFPDAPATRPPGSEISVTPAEIRNAIRSFPNCSSGGPDGLRPRHLKDLIGRQDENSNPLLLSLCRFVTLAINGQLPEFILPIFYGASLIALRKKDGGIRPIAVGLTLRRLVGKVLVKKSIKDIVELVAPLQLGCGIKGGTEAAVHATAAYIESHRAANHKILVKLDFQNAFNMMRRDHILNSVKQRTPELYAAIYQMYRFPSNLYWQGKTILSKCGVQQGDPCGPALFCIGLYELQARLQSELRPWYLDDGLLAGDLPGVLSDIKKVQDFEAVSGLKLNDSKCELLVLSHNDREETAAAVRAKLPNIKWLTEENVELLGAPLTDAAVVGALQKRLTDAKRWCSRLKHLDAHPALYLLRESLSTPRLIYLLRCSPSYKRDDLLHVFDELLRTTLECLLNVRLGDNAWAQATLPVSAGGLGVRTTKDLALSCYVGSITDFKHLIASIGPEGTSEVIERASRTSLDEFEARWEALPASLTQESLDRIVVELKQASLLSQAQTTADKARLRACFDPMSGKWLQALPSPQLGTMLDNNTLRIVSGLRLGETVCAAHLCNRCRSPVTTTGEHALSCRYSAGRHPRHYAINDVVCRALYSAQVPAVKEPPGLSANSGLRPDGKTLTPWERGRLLVWDVTVSCTLARSYVARTSQKAGASACLAEDRKLAKYRELNPQFIVQPIALETYGPMGEETSRFFKELGKRLNAVTRDPRSGEFLLQRVSIELQRGNAASVEGSLPSAEGFPEIP

SEQ ID NO: 583 - protein, 955 aa, Dermanyssus gallinae
MTSRQTDIRRWVSSTTQTEQLPGQLQADTPTQPITSNRLLNQQLQPDPGQPFHIADYFPKVVEIKSKLKIISCTPRSLRSHVAAELSKTINDLCSSASPENWERLFAFPSLVFSIPARKEKGRTLTSVIRENLARFRRRAKIDENPHLCGTKRGTPSPCDTDIRRSKMVQTKLAQGDISSAARTLLSTDQMAPVNPQTLESLIAKHPEHPPDATFPDAPATRPPGSEISVTPAEIRNAIRSFPNCSSGGPDGLRPRHLKDLIGRQDENSNPLLLSLCRFVTLAINGQLPEFILPIFYGASLIALRKKDGGIRPIAVGLTLRRLVGKVLVKKSIKDIVELVAPLQLGCGIKGGTEAAVHATAAYIESHRAANHKILVKLDFQNAFNMMRRDHILNSVKQRTPELYAAIYQMYRFPSNLYWQGKTILSKCGVQQGDPCGPALFCIGLYELQARLQSELRPWYLDDGLLAGDLPGVLSDIKKVQDFEAVSGLKLNDSKCELLVLSHNDREETAAAVRAKLPNIKWLTEENVELLGAPLTDAAVVGALQKRLTDAKRWCSRLKHLDAHPALYLLRESLSTPRLIYLLRCSPSYKRDDLLHVFDELLRTTLECLLNVRLGDNAWAQATLPVSAGGLGVRTTKDLALSCYVGSITDFKHLIASIGPEGTSEVIERASRTSLDEFEARWEALPVSPTQESLDRIVVELKQASLLSQAQTTADKARLRACFDPMSGKWLQALPSPQLGTMLDNNTLRIVSGLRLGETVCAAHLCNRCRSPVTTTGEHALSCRYSAGRHPRHYAINDVVCRALHSAQVPAVKEPPGLSANSGLRPDGKTLTPWERGRLLVWDVTVSCTLARSYVARTSQKAGASACLAEDRKLAKYRELNPQFIVQPIALETYGPMGEETSRFFKELGKRLNAVTRDPRSGEFLLQRVSIELQRGNAASVEGSLPSAEGFPEIP

SEQ ID NO: 584 - protein, 955 aa, Dermanyssus gallinae
MTSRQADIRRWVSSTTQTEQLASQLQADTPTQPITSNRLLNQQLQPDPGQPFHIADYFPKVVEIKSKLKIISCTPRSLRSHVAAELSKTINDLCSSASPENWERLFAFPSLVFSIPARKEKGRALTSVIRENLARFRRRAKIDENPHLCGTKRGTPSPCDTDIRRSKMVQTKLAQGDTSSAARTLLSTDQMAPVNPQTLESLIAKHPEHPPDATFPDAPATRPPGSEISVTPAEIRNAIRSFPNCSSGGPNGLRPRHLKDLIGRQDENSNPLLLSLCRFVTLAINGQLPEFILPIFYGASLIALRKKDGGIRPIAVGLTLRRLVGKVLVNKSIKDIVELVAPLQLGCGIKGGTEAAVHATAAYIESHRAANHKILVKLDFQNAFNMMRRDHILNSVKQRTPELYAAIYQMYRFPSNLYWQGKTILSKCGVQQGDPCGPALFCIGLYELQARLQSELRPWYLDDGLLAGDLPGVLSDIKKVQDFEAVSGLKLNDSKCELLVLSHNDREETAAAVRAKLPNIKWLTEENVELLGAPLTDAAVVGALQKRLTDAKRWCSRLKHLDAHPALYLLRESPSTPRLIYLLRCSPSYKRDDLLHVFDELLRTTLECLLNVRLGDNAWAQATLPVSAGGLGVRTTKDLALSCYVGSITDFKHLIASIGPEGTSEVIERASRTSLDEFEARWEALPASLTQESLDRIVVELKQASLLSQAQTTADKARLRACFDPMSGKWLQALPSPQLGTMLDNNTLRIVSGLRLGETVCAAHLCNRCRSPVTTTGEHALSCRYSAGRHPRHYAINDVVCRALYSAQVPAVKEPPGLSANSGLRPDGKTLTPWERGRLLVWDVTVSCTLARSYVARTSQKAGASACLAEDRKLAKYRELNPQFIVQPIALETYGPMGEETSRFFKELGKRLNAVTRDPRSGEFLLQRVSIELQRGNAASVEGSLPSAEGFPEIP

SEQ ID NO: 585 - protein, 955 aa, Dermanyssus gallinae
MTSRQTDIRRWVSSTTQTEQLAGQLQADTPTQPITSNRLLNQQLQPDPGQPFHIADYFPKVVEIKSKLKIISCIPRSLRSHVAAELSKTINDLCSSASPENWERLFAFPSLVFSIPARKQKGRTLTSVIRENLARFRRRAKKDENPHLCGTKRGTPSPCDTHIRRSKMVQTKLAQGDISSAARTLLSTDQMAPVNPQTLESLIAKHPEHPPDAAFPDAPATRPPGSEISVTPAEIRNAIRSFPNCSSGGPDGLRPRHLKDLIGRQDENSNPLLLSLCRFVTLAINGQLPEFILPIFYGASLIALRKKDGGIRPIAVGLTLRRLVGKVLVKKSIKDIVELVAPLQLGCGIKGGTEAAVHATAAYIESHRAANHKILVKLDFQNAFNMMRRDHILNSVKQRTPELYAAIYQMYRFPSNLYWQGKTILSKCGVQQGDPCGPALFCIGLYELQARLQSELRPWYLDDGLLAGDLPVVLSDIKKVQDFEAVSGLKLNDSKCELLVLSHNDREETAAAVRAKLPNIKWLTEENVELLGAPLTDAPVVGALHKRLTDAKRWCSRLKHLDAHPALYLLRESLSTPRLIYLLRCSPSYKRDDLLHVFDELLRTTLECLLNVRLGDNAWAQATLPVSACGLGVRTTKDLALSCYVGSITDFKHLIASIGPEGTSEVIERASRTSLDEFEARWEALPVSPTQESLDRIVVELKQASLLSQAQTTADKARLRACFDPMSGKWLQALPSPQLGTMLDNNTLRIVSGLRLGETVCAAHLCNRCRSPVTTTGEHALSCRYSAGRHPRHYAINDVVCRALHSAQVPAVKEPPGLSANSGLRPDGKTLTPWERGRLLVWDVTVSCALARSYVARTSQKAGASACLAEDRKLAKYRELDPQFIVQPIALETYGPMGEETSRFFKELGKRLNAVTRDPRSGEFLLQQVSIELQRGNAASVEGSLPSAEGFPEIP

SEQ ID NO: 586 - protein, 955 aa, Dermanyssus gallinae
MTSRQTDIRRWVSSTTQTEQLAGQLQADTPTQPITSNRLPNQPFQTDPDQPFHIADYFPKVVEIKSKLKMRSCTPRSLRSHVAAELSKTINDLCSSASPENWERLFAFPSLVFSIPAKKEKGRTLTSVIRENLVRFRRRAKISENPHLCGTKRGTPSPCDTDSRRSKMVQTKLALGDISSAARTLLSTDEIAPVDPQTLDSLLAKHPEHPPDTTFPDAPATSPPGSEISVTPAEIRNAIRSFPNCSSGGPDGLRPRHLKDLIGRQDENSNPLLLSLCRFVTLAINGQLPDFILPIFYGASLIVLRKKDGGIRPIAVGLTLRRLVGKVLVKKSIKDIVELVAPLQLGCGIKGGTEAALHATAAYIESHRAANQIFLVKLDFQNAFNMMRRDHILNSVKRRTPALYAAIYQMYRFPSNLYWQGKTLLSKCGVQQGDPCGPALFCIGLHELQARLQSELRPWYLDDGLLAGDLPDVLSDIKKVQDFEAVSGLKLNDKKCELLVLSRNDREETAAAVRAKLPNIKWLTEENVELLGAPLTDAAVAGALQKRLSDAKRWCSRLKHLDAHPALYLLRQSLSTPRLIYLLRCSPSYKRDDLLHVLDERFRTTLECLPNVRLGDNAWAQATLPISAGGLGVRTTKDLALSCYVGSITDFKHLIVSIGPEGTSEVIERASRTSLDEFESRWEALPVSPTQESLDRIVVERKQAYLLSQAHTTADKARLRACFDPMSGKWLQALPSPQLGTMLDNNTLRIVSGLRLGESVCAAHLCNRCRFPVTTTGVHALSCRYSAGRHPRHYAINDVVCRALHSAQVPAVKEPLGLSANSGLRPDGKTLTPWERGRLLVWDVTVSCTLARSYVARTSQKAGASACLAEDRKLAKYRELNPQFIVQPIAIETYGPMGEETSKFFKELGKRLNAVTRDPRSGEFLLQRVSIELQRGNAASVEGSLPSAEGFPEIP

SEQ ID NO: 587 - protein, 955 aa, Dermanyssus gallinae
MTSRQTDIRRWVSSTTQTEQLAGQLQADTPTQPITSNRLLNQQLQPDPGQPFHIADYFPKVVEIKSKLKIISCIPRSLRSHVAAELSKTINDLCSSASPENWERLFAFPSLVFSIPAAKQKGRTLTSVIRENLARFRRRAKIDENPHLCGTKRGTPSPCDTDIRRSKMVQTKLAQGDISSAARTLLSTDQMAPVNPQTLESLIAKHPEHPPDAAFPDAPATRAPGSEISVTPAEIRNAIRSFPNCSSGGPDGLRPRHLKDLIGRQDENSNPLLLSLCRFVTLAINGQLPEFILPIFYGASLIALRKKDGGIRPIAVGLTLRRLVGKVLVKKSIKDIVELVAPLQLGCGIKGGTEAAVHATAAYIESHRAANHKILVKLDFQNAFNMMRRDHILNSVKQRTPELYAAIYQMYRFPSNLYWQGKTILSKCGVQQGDPCGPALFCIGLYELQARLQSELRPWYLDDGLLAGDLPVVLSDIKKVQDFEAVSGLKLNDSKCELLVLSHNDREETAAAVRAKLPNIKWLTEENVELLGAPLTDAAVVGALHKRLTDAKRWCSRLKHLDAHPALYLLRESLSTPRLIYLLRCSPSYKRDDLLHVFDKLLRTTLECLLNVRLGDNAWAQATLPVSAGGLGVRTTKDLALSCYVGSITDFKHLIASIGPEGTSEVIERASRTSLDEFEARWEALPVSPTQESLDRIVVELKQASLLSQAQTTADKARLRACFDPMSGKWLQALPSPQLGTMLDNNTLRIVSGLRLGETVCAAHLCNRCRSPVTTTGEHALSCRYSAGRHPRHYAINDVVCRALHSAQVPAVKEPPGLSANSGLRPDGKTLTPWERGRLLVWDVTVSCTLARSYVARTSQKAGASACLAEDRKLAKYRELNPQFIVQPIALETYGPMGEETSRFFKELGKRLNAVTRDPRSGEFLLQRVSIELQRGNAASVEGSLPSAEGFPEIP

SEQ ID NO: 588 - protein, 955 aa, Dermanyssus gallinae
MTSRQTDIRRWVSSTTQTEQLAGQLQADTPTQPITSNRLLNQQLQPDPGQPFHIADYFPKVVEIKSKLKIISCIPRSLRSHVAAELSKTINDLCSSASPENWERLFAFPSLVFSIPARKQKGRTLTSVIRENLARFRRRAKIDENPHLCGTKRGTPSPCDTDIRRSKMVQTKLAQGDISSAARTLLSTDQMAPVNPQTLESLIAKHPEHPPDAAFPDAPATKPPGSEISVAPVEIRNAIRSFPNCSSGGPDGFRPRHLKDLIGRQDENSNPLLLSLCRFVTLVINGQLPEFILPIFYGASLIALRKKDGGIRPIAVGLTLRRLVGKVLVKKSIKDIVELVAPLQLGCGIKGGTEAAVHATAAYIESHRAANQKILVKLDFQNAFNMMRRDHILNSVKQRTPELYAAIYQMYRFPSNLYWQGKTILSKCGVQQGDPCGPALFCIGLYELQARLQSELRPWYLDDGLLAGDLPVVLSDIKKVQDFEAVSGLKLNDSKCELLVLSHNDREETAAAVRAKLPNIKWLTEENVELLGAPLTDAAVVGALHKRLTDAKRWCSRLKHLDAHPALYLLRESLSTPRLIYLLRCSPSYKRDDLLHVFDELLQTTLECLLNVRLGDNAWAQATLPVSAGGLGVRTTKDLALSCYVGSITDFKHLIASIGPEGTSEVIERALRTSLDEFEARWEALPVSPTQESLDRIVVELKQASLLSQAQTTADKARLRACFDPMSGKWLQALPSPQLGTMLDNNTLRIVSGLRLGETVCAAHLCNRCRSPVTTTGEHALSCRYSAGRHPRHYAINDVVCRALHSAQVPAVKEPPGLSANSGLRPDDKTLTPWERGRLLVWDVTVSCTLARSYVARTSQKAGASACLAEDRKLAKYRELNPQFIVQPIALETYGPMGEETSRFFKELGKRLNAVTRDPRSGEFLLQRVSIELQRGNAASVEGSLPSAEGFPEIP

SEQ ID NO: 589 - protein, 947 aa, Dermanyssus gallinae
MMSQQDIRRWAVPSVSSMESNGLSPSTRDALHASSVTSTPAQVSLQDVILETSKIKSASKMISCLPRGIRDSMSSELATLINEVCSTASRDSYKRLLQFPTAVFCIPSQKKRGRTLTSVLRENLNRFRAGNGPETNPYGSSLSSRQESSSRNNSAMIRVVQGKLALGDVSSAARVLLSTDTVAPLSAETKLALLGKHPPTSPDLSFSPPPVSAGETHEITVSAMDVINAIRSFANSSGGGPDGLRPRHLKDLIGRDGEENRLLLSLVRFVNLAINGKLPDFVLPVFYGASLIALRKKDGGIRPIAVGLTLRRLVGKIIIRKSMPDIVAMVSPHQLGCGIRGGAEAAVHATRAFVDHNRSAPEKVLVMLDFKNAFNTLRRDHLLKAVRTHLPQLYPLVYQMYRLPSKLIWQGEFIESCSGVQQGDPCGPALFCIAIHELQTRLTSELRPWFLDDGTLAGDVSAVQRDIAQVKDFEAVSGLKLNDAKCEIFFPFQQDPQLGSMLQMVRDLLPAARLIPDNEFELLGAPILTESIGLSLAKKGSDLVRWCSRLRLLDAHLALYLLRASLSTPRLMYLLRCSQAYAEPELLQSFDETLRSTLQGILNVQLRQTSWLQASLPTSAGGMGIRMASQVALSAHLGSLKNTETLVSGITPPDAYTSFIAQLEQARRYYAEKWGPLPERISQSTLDLQVVKSIQERLMTQANNVKEQARLKAVIDPMSGKWLQAIPSPQLGTMLDNTTLRIVSGLRLGESVCFAHNCARCDLPVSSTGEHALACKRSAGRFSRHSALIDVIHRAMQSAHIPAVKEPVGLSANSQLRPDGLTLVPWSEGRCLVYDVTVSCTLAASYARHTSREVGAAAHLAEDRKLAKYRELEQNFIVQPIAFETLGPMGKITRSFLAELGSRVAASTGDRRSWQFLLQRISVEIQRGNAASIIGSLPTGKGLPFLP

SEQ ID NO: 590 - protein, 947 aa, Dermanyssus gallinae
MMSQQDIRRWAVPSVSSMESNGLSPSTRDALHASSVTSTPAQVSLQDVILETSKVKSASKMISCLPRGIRDSMSSELATLINEVCSTASRDSYKRLLQFPTAVFCIPSQKVRGRTLTSVLRENLNRFRAGNGPETNPYGSSLSSRQESPSRNNSAMIRVVQGKLALGDVSSAARVLLSTDTVAPLSAEAKLALLGKHPPAPPDLSFSPPPVSAGETHEITVSAMDVINAIRSFANSSGGGPDGLRPRHLKDLIGRDGEENRLLLSLVRFVNLAINGKLPDFVLPVFYGASLIALRKKDGGIRPIAVGLTLRRLVGKIIIRKSMPDIVAMVSPHQLGCGIRGGAEAAVHATRAFVDHNKSAPEKVLVKLDFKNAFNTLRRDHLLKAVRTYLPQLYPLVYQMYRLPSKLIWQGEFIESCSGVQQGDPCGPALFCIAIHELQTRLTSELRPWFLDDGTLAGDVSAVQRDIAQVKDFEAVSGLKLNDAKCEIFFPFQQDPQLGPMLQMVRDLLPAARLISDNEFELLGAPILTESIGLSLAKKGSDLVRWCSRLRLLDAHPALYLLRASLSTPRLMYLLRCSRAYAEPELLQSFDETLRSTLQGILNVQLRQTSWLQASLPTSAGGMGIRMASQVALSAHLGSLKDTETLVSGITPPDAYTSFIAQLEQARRYYAEKWGPLPERISQSTLDLQVVKSIQERLMTQANNVKEQARLKPVIDPMSGKWLQAIPSPQLGTMLDNTTLRIVSGLRLGESVCFAHNCANCDLPVSSTGEHALACKRSAGRFSRHSALIDVIHRAMQSAHIPAVKEPVGLSANSQLRPDGLTLVPWSEGRCLVYDVTVSCTLAASYARHTSREVGAAAHLAEDRKLAKYRELEQNFIVQPVAFETLGPMGKITRSFLAELGSRVAASTGDRRSWQFLLQRISVEIQRGNAASIIGSLPTGKGLPFLP

SEQ ID NO: 591 - protein, 947 aa, Dermanyssus gallinae
MTSQQDIRRWAVPTVSGRASNGPNLPTRDVPQASSTASTPAQSSLHDVILMTSKIKSASKMISCVPRGIRDQMSLELATLINEVCSTASRDSYKRLLQFPTAVFCIPSQKERGRTLTSVLRENLNRFRAGHGSETNPYASTLLSRQEFSSHNNSGMVRVVQGKLALGDVSSAARVLLSTDSVAPLSAETRLALLDKHPPSPPDLSFSPPPASAGEAHEITVSATDVFNAIRSFPNSSGGGPDGLRPRHLKDLIGRDGEENRLLLSLARFVNLAINGKLPDFALPVFYGASLIALRKKDGGIRPIAVGLTLRRLVGKIIIRKSMPDIVAMVSPHQLGCGIRGGAEAAVHATRAFVDHNRSAPNKVLVKLDFKNAFNMLRRDHLLKAVRTHLPRLYPLVYQMYRLPSKLIWQGEFIESCSGVQQGDPCGPALFCIAIHELQVRLSSELRPWFLDDGTLAGDASAVQRDIAQVIEFEAVSGLKLNDSKCEIFFPFQRAPRLGSMLQMVRNLLPAARLIADHELELLGAPILDDSIGVSLTKKGSDLVRWCSRLRLLDAHPALFLLRVSLSTPRLMYLLRCSRAYAEPDLLQSFDETLRSTLQGILNVQLRQTSWLQASLPTSAGGMGIRMASQIAISAYLGSLKDTEILVSGIAPPDAYTSFIAQSEQACRFYAEKWGPLPERISQSALDLQVVKSIQERLMVQANNVKEQARLRAVIDPMSGKWLQAIPSPQLGTMLDNTTLRIVSGLRLGESVCFAHNCARCDLPVSSTGEHALACKRSAGRFSRHSALIDVIHRAMQSAHIPAVKEPVGLSANSQLRPDGLTLVPWNEGRCLVYDVTVSCTLAASYARHTSREVGAAARLAEDRKLAKYRELEQNFIVQPIAFETLGPMGKITKSFLTELGSRVAASTGDRRAWQFLLQRISVEIQRGNAASIIGSLPTGNGLAFPL

SEQ ID NO: 592 - protein, 946 aa, Dermanyssus gallinae
MTSQQDIRRWAVPTVSSRASNGPNLPTRDVPQASSTASTPQSSLHDVILMTSKIKSASKMISCVPRGIRDQMSLELATLINEVCSTASRDSYKRLLQFPTAVFCIPSQKERGRTLTSVLRENLNRFRAGNGSETNPYASTLLSRQEFSSHNNSGMVRVVQGKLALGDVSSAARVLLSTDSVAPLSAETRLALLDKHPPSPPDLSFSPPPASAREAHEITVSATDVFNAIRSFPNSSGGGPDGLRPRHLKDLIGRDGEENRLLLSLVRFVNFAINGKLPGFALPVFYGASLIALRKKDGGIRPIAVGLTLRRLVGKIIIRKSMPDIVAMVSPHQLGCGIRGGAEATVHATRAFVDHNRSASNKVLVKLDFKNAFNMLRRDHLLKAVRTHLPRLYPLVYQMYRLPSKLIWQGEFIESCSGVQQGDPCGPALFCIAIHELQVRLSSELRPWFLDDGTLAGDASAVQRDIAQVIEFEAVSGLKLNDSKCEIFFPFQRAPRLGSMLQMVRNLLPAAKLIADHELELLGAPILDDSIGVSLTKKGSDLVRWCSRLRLLDAHPAIFLLRVSLSTPRLMYLLRCSRAYAEPDLLQSFDETLRSTLQGILNVQLRQTSWLQASLPTSAGGMGIRMASQIAISAYLGSLKDTETLVSGIAPPDAYTSFIAQSEQACRFYAEKWGPLPERISQSALDLQVVKSIQERLMVQANNVKEQARLRAVIDLMSGKWLQAIPSPQLGTMLDNTTLRIVSGLRLGESICFAHNCARCDLPVSSTGEHALACKRSAGRFSRHSALIDVIHRAMQSAHIPAVKEPVGLSANSQLRPDGLTLVPWNEGRCLVYDVTVSCTLAASYARHTSREVGAAARLAEDRKLAKYRELEQNFIVQPIAFETLGPMGKITKSFLTELGSRVAASTGDRRAWQFLLQRISVEIQRGNAASIIGSLPTGNGLPFPL

SEQ ID NO: 593 - protein, 887 aa, Dermanyssus gallinae
MMSQQDIRRWAVPSVSSMESNGLSPSTRDALHASSVTSTPAQVSLQDVILETSKVKSASKMISCLPRGIRDSMSSELATLINEVCSTASRDSYKRLLQFPTAVFCIPSQKVRGRTLTSVLRENLNRFRAGNGPETNPYGSSLSSRQESPSRNNSAMIRVVQGKLALGDVSSAARVLLSTDTVAPLSAETKLALLGKHPPAPPDLSFSPPPVSAGETHEITVSAMDVINAIRSFANSSGGGPDGLRPRHLKDLIGRDGEENRLLLSLVRFVNLAINGKLPDFVAEAAVHATRAFVDHNKSAPEKVLVKLDFKNAFNTLRRDHLLKAVRTYLPQLYPLVYQMYRLPSKLIWQGEFIESCSGVQQGDPCGPALFCIAIHELQTRLTSELRPWFLDDGTLAGDVSAVQRDIAQVKDFEAVSGLRLNDAKCEIFFPFQQDPQLGPMIQMVRDLLPAARLIPDNEFELLGAPIRTESIGLSLAKKGSDLVRWCSRLRLLDAHPALYLLRASLSTPRLMYLLRCSRAYAEPELLQSFDETLRSTLQGILNVQLRQTSWLQASLPTSAGGMGIRMASQVALSAHLGSLKDTETLVSGITPPDAYTSFIAQLEQARRYYAEKWGPLPERISQSTLDLQVVKSIQERLMTQANNVKEQARLKAVIDPMSGKWLQAIPSPQLGTMLDNTTLRIVSGLRLGESVCFAHNCARCVLPVSSTGEHALACKRSAGRFSRHSALIDVIHRAMQSAHIPAVKEPVGLSANSQLRPDGLTLVPWSEGRCLVYDVTVSCTLAASYARHTSREVGAAAHLAEDRKLAKYRELEQNFIVQPVAFETLGPMGKITRSFLAELGSRVAASTGDRRSWQFLLQRISVEIQRGNAASIIGSLPTGKGLPFLP

SEQ ID NO: 594 - protein, 947 aa, Dermanyssus gallinae
MMSQQDIRRWAVPSVSSMESNGLSRSTRDALHASSVTSTPAQVSLQDVILETSKIKSASKMISCLPRGIRDSMSSELATLINEVCSTASRDSYKRLLQFPAAVFCIPSQKERGRTLTSVLRENLNRFRAGNGPETNPYGSSLSSRQESSSRNNSAMIRVVQGKLALGDVSSAARVLLSTDTVAPLSAETKLALLGKHPPTPPDLSFSPPPVSAGETHEITVSAMDVINAIRSFANSSGGGPDGLRPRHLKDLIGRDGEENRLLLSLVRFVNLAINGKLPDFVLPVFYGASLIASRKKDGGIRPIAVGLTLRRLVGKIITRKSMPDIVAMVSPHQLGCGIRGGAEAAVHATRAFVDHNRSAPEKVLVKLDFKNAFNTLRRDHLLKAVRTHLPQLYPLVYQMYRLPRKLIWQGEFIESCSGVQQGDPCGPALFCIAIHELQTRLTSELRPWFLDDGTLAGDVSAVQRDIAQVKDFEAVSGLKLNDAKCEIFFPFQQDPQLGSMLQMVRDLLPAARLIPDNEFELLGAPILTESIGLSLAKKGSDLVRWCSRLRLLDAHPALYLLRASLSTPRLMYLLRCSQAYAEPELLQSFDETLRSTLQGILNVQLRQTSWLQASLPTSAGGMGIRMASQVALSAHLGSLKNTETLVSGITPPDAYTSFIAQLEQARRYYAEKWGPLPERISQSTLDLQVVKSIQERLMTQANNVKEQARLKAVIDPMSGKWLQAIPSPQLGTMLDNTTLRIVSGLRLGESVCFAHNCARCDLPVSSTGEHALACKRSAGRFSRHSALIDVIHRAMQSAHIPAVKKPVGLSANSQLRPDGLTLVPWSEGRCLVYDVTVSCTLAASYARHTSREVGAAAHLAEDRKLAKYRELEQNFIVQPIAFETLGPMGKITRSFLAELGSRVAASTGDRRSWQFLLQRISVEIQRGNAASIIGSLPTGKGLPFLP

SEQ ID NO: 595 - protein, 947 aa, Dermanyssus gallinae
MMSQQDIRRWAVASASSRDNNSSAPSSTEGPYASSVASAPAQTSLHDVILATSKIKSASKMISCLPRGIRNNVSLELSNLINEVCSSASRESYRRLLQFPTAVFCIPRQKERGRTLTSVLRENLNRFRAGNGPETIPIASASTTRLSSASFKGFSLARVVQGKLALGDVSSAARALLSTDTVAPHSDETRLALIDKHPPCPRNFSLVPPPVSAGQSHEITVSAIDVINAIRSFANSSGGGPDGLRPRHLKDLIGRDGEENQLVLSLVRFVNLAVNGKLPDFVVPVFYGASLMALRKKDGGIKPIAVGLTLRRVVGKIITRKSMPDIIGLVSPHQLGCGIRGGAEAAVHATRAFINRNKSVPGKVIVKLDFKNAFNSLRRDHLLKAVRSLLPRLYPLVHQMYRFPSKLIWQGEFIESCSGVQQGDPCGPALFCVAIHELQSRLSSELRPWFLDDGTLAGDTLTVLRDLALVKEFEAVSGLTLNDSKCEVFFPFHEDPHRSSAFQEVRNLLPAARLIPVNEMELLGAPILDDSVDISLSKKGSDLVRWCSRLRLLDAHPALYLLRVSLSTPRLMYLFRCSRAYTNPDLLHSIDETLRNTLQGILNVQLRQSSWVQASLPTSSGGLGIRMTSQVAISAYLGSLKATETLVQGIAPPNAHPSFSDQIEQACRDYENKWGQLPESTSQSSLDSQVVKAIQEQLLTQASNTNERARLRAAIDPWSGKWLQAIPSPQLGTMLDSTTLRIASGLRLGESVCFAHNCARCDLPVSSTGEHALACKRSAGRFSRHSALNDVIHRALQTAHIPAVKEPIGLSSNSQLRPDGLTLVPWSEGRCLVYDVTVSCTLAASYVRHTSREVGAAARLAEDRKLAKYRELEQNFIVQPVAFETLGPMGEITKGFLAELGSRVAVATGDRRAWQFLLQRISVEIQRGNAASIIGSLPTGKGLTFLP

SEQ ID NO: 596 - protein, 946 aa, Dermanyssus gallinae
MTSQQDIRRWAVPTVSGRASNGPNLPTRDVPQASSTASTPQSSLHDVILMTSKVKSASKMISCVPRGIRDQMSLELATLINEACSTASRDSYKRLLQFPTAVFCIPSQKERGRTLTSVLRENLNRFRAGNGSETNPYASTLLSRQEFSSHNNSGMVRVVQGKLALGDVSSAARVLLSTDSVAPLSAETRLALLDKHPPSPPDLSFSPPPASAGETHEITVSATDVFNAIRSFPNSSGGGPDGLRPRHLKDLIGRDGEENRLLLSLVRFVNLAINGKLPDFALPVFYGASLIALRKKDGGIRPIAVGLTLRRLVGKIIIRKSMPDIVAMVSPHQLGCGIRGGAEAAVHATRAFVDHNRSAPNKVLVKLDFKNAFNMLRRDHLLKAVRTHLPRLYPLVYQMYRLPSKLIWQGEFIESCSGVQQGDPCGPALFCIAIHELQVRLSSELRPWFLDDGTLAGDASAVQRDIAQVIEFEAVSGLKLNDSKCEIFFPFQRAPCLGSMLQMVRNLLPAARLIADHELELLGAPILDDSIGVSLTKKGSDLVRWCSRLRLLDAHPALFLLRVSLSTPRLMYLLRCSRAYAEPDLLQSFDETLRSTLQGILNVQLRQTSWLQASLPTSAGGMGIRMASQIAISAYLGSLKDTETLVSGIAPPDAYTSFIAQSEQACRFYAEKWGPLPERISQSALDLQVVKSIQERLMVQANNVKEQARLRAVIDPMSGKWLQAIPSPQLGTMLDNTTLRIVSGLRLGESVCFAHNCARCDLPVSSTGEHALACKRSAGRFSRHSALIDVIHRAMQSAHIPAVKEPVGLSANSQLRPDGLTLVPWNEGRCLVYDVTVSCTLAASYARHTSREVGAAARLAEDRKLAKYRELEQNFIVQPIAFETLGPMGKITKSFLTELGSKVAASTGDRRAWQFLLQRISVEIQRGNAASIIGSLPTGNGLPFPL

SEQ ID NO: 597 - protein, 947 aa, Dermanyssus gallinae
MTSQQDIRRWAVPTVSGRASNGPNLPTRDVPQASSTASTPAQSSLHDVILMTSKIKSASKMISCVPRGIRDQMSLELATLINEVCSTASRDSYKRLLQFPTAVFCIPSQKERGRTLTSVLRENLNRFRAGHGSETNPYASTLLSRQEFSSHNNSGMVRVVQGKLALGDVSSAARVLLSTDSVAPLSAETRLALLDKHPPSPPDLSFSPPPASAGEAHEITVSATDVFNAIRSFPNSSGGGPDGLRPRHLKDLIGRDGEENRLLLSLVRFVNLAINGKLPDFALPVFYGASLIALRKKDGGIRPIAVGLTLRRLVGKIIIRKSMPDIVAMVSPHQLGCGIRGGAEAAVHATRAFVDHNRSAPNKVLVKLDFKNAFNMLRRDHLLKAVRTHLPRLYPLVYQMYRLPSKLIWQGEFIESCSGVQQGDPCGPALFCIAIHELQVRLSSELRPWFLDDGTLAGDASAVQRDIAQVIEFEAVSGLKLNDSKCEIFFPFQRAPRLGSMLQMVRNLLPAARLIADHELELLGAPILDDSIGVSLTKKGSDLVRWCSRLRLLDAHPALFLLRVSLSTPRLMYLLRCSRAYAEPDLLQSFDETLRSTLQGILNVQLRQTSWLQASLPTSAGGMGIRMASQIAISAYLGSLKDTETLVSGIAPPDAYTSFIAQSEQACRFYAEKWGPLPERISQSALDLQVVKSIQERLMVQANNVKEQARLRAVIDPMSGKWLQAIPSPQLGTMLDNTTLRIVSGLRLGESVCFAHNCARCDLPVSSTGEHALACKRSAGRFSRHSALIDVIHRAMQSAHIPAVKEPVGLSANSQLRPDGLTLVPWNEGRCLVYDVTVSCTLAASYARHTSREVGAAARLAEDRKLAKYRELEQNFIVQPIAFETLGPMGKITKSFLTELGSRVAASTGDRRAWQFLLQRISVEIQRGNAASIIGSLPTGNGLPFPL

SEQ ID NO: 598 - protein, 947 aa, Dermanyssus gallinae
MMSQQDIRRWAVASASSRDNNSSAPSSREGPYASSVASAPAQTSLHDVILATSKIKSASKMISCLPRGIHNNVSLELSNLINEVCSSASRESYRRLLQFPTAVFCIPRQKERGRTLTSVLRENLNRFRAGNGPETIPIASASTTRLSSASFKGFSLARVVQGKLALGDVSSAARALLSTDTVAPHSDETRLALIDKHPPCPRNFSLVPPPVSAGQSHEITVSAIDVINAIRSFANSSGGGPDGLRPRHLKNLIGRDGEENQLVLSLVRFVNLAVNGKLPDFVLPVFYGASLMALRKKDGGIRPIAVGLTLRRVVGKIITRKSMPDIIGLVSPHQLGCGIRGGAEAAVHATRAFINRNKSVPGKVIVKLDFKNAFNSLRRDHLLKAVRSLLPRLYPLVHQMYRFPSKLIWQGEFIESCSGVQQGDPCGPALFCVAIHELQSRLSSELRPWFLDDGTLAGDTLTVLKDLALVKEFEAVSGLTLNDSKCEVFFPFHEDPHRSSAFQEVRNLLPAARLIPVNEMELLGAPILDDSVDISLSKKGSDLVRWCSRLRLLDAHPALYLLRVSLSTPRLMYLFRCSRAYTNLDLLHSIDETLRNTLQGILNVQLRQSSWVQASLPTSSGGLGIRMTSQVAISAYLGSLKATETLVQGIAPPNAHPSFSDQIEQACRDYENKWGQLPESTSQSSLDSQVVKAIQEQLLTQASNTNERARLRAAIDPWSGKWLQAIPSPQLGTMLDSTTLRIASGLRLGESVCFAHNCARCDLPVSSTGEHALACKRSAGRFSRHSALNDVIHRALQTAHIPAVKEPVGLSSNSQLRPDGLTLVPWSEGRCLVYDVTVSCTLAASYVRHTSREVGAAARLAEDRKLAKYRELEQNFIVQPVAFETLGPMGEITKGFLAELGSRVAVATGDRRAWQFLLQRISVEIQRGNAASIIGSLPTGKGLTFLP

SEQ ID NO: 599 - protein, 947 aa, Dermanyssus gallinae
MMSQQDIRRWAVPSVSSMESNGLSRSTRDALHASSVTSTPAQVSLQDVILETSKIKSASKMISCLPRGIRDSMSSELATLINEVCSTASRDSYKRLLQFPTAVFCIPSQKERGRTLTSVLRENLNRFRAGNGPETNPYGSSLSSRQESSSRNNSAMIRVVQGKLALGDVSSAARVLLSTDTVAPLSAETKLALLGRHPPTPPDLSFSPPPVSAGETHEITVSAMDVINAIRSFANSSGGGPDGLRPRHLKDLIGRDGEENRLLLSLVRFVNLAINGKLPDFVLPVFYGASLIALRKKDGGIRPIAVGLTLRRLVGKIITRKSMPDIVAMVSPHQLGCGIRGGAEAAVHATRAFVDHNRSAPEKVLVKLDFKNAFNTLRRDHLLKAVRTHLPQLYPLVYQMYRLPSKLIWQGEFIESCSGVQQGDPCGPALFCIAIQELQTRLTSELRPWFLDDGTLAGDVSAVQRDIAHVKDFEAVSGLKLNDAKCEIFFPFQQDPQLGSMLQMVRDLLPAARLIPDNEFELLGAPILTESIGLSLAKKGSDLVRWCSRLRLLDAHPALYLLRASLSTPRLMYLLRCSQAYAEPELLQSFDETLRSTLQGILNVQLRQTSWLQASLPTSAGGMGIRMASQVALSAHLGSLKNTETLVSGITPPDAYTSFIAQFEQARRYYAEKWGPLPERISQSTLDLQVVKSIQERLMTQANNVKEQARLKAVIDPMSGKWLQAIPSPQLGTMLDNTTLRIVSGLRLGESVCFAHNCARCDLPVSSTGEHALACKRSAGRFSRHSALIDVIHRAMQSAHIPAVKEPVGLSANSQLRPDGLTLVPWSEGRCLVYDVTVSCTLAASYARHTSREVGAAAHLAEDRKLAKYRELEQNFIVQPIAFETLGPMGKITRSFLAELGSRVSASTGDRRSWQFLLQRISVEIQRGNAASIIGSLPTGKGLPFLS

SEQ ID NO: 600 - protein, 947 aa, Dermanyssus gallinae
MTSQQDIRRWAVPTVSGRASNGPNLPTRDVPQASSTASTPAQSSLHDVILMTSKIKSASKMISCVPRGIRDQMSLELATLINEVCSTASRDSYKRLLQFPTAVFCIPSQKERGRTLTSVLRENLNRFRAGHGSETNPYASTLLSRQEFSSHNNSGMVRVVQGKLALGDVSSAARVLLSTDSVAPLSAETRLALLDKHPPSPPDLSFSPPPASAGEAHEITVSATDVFNAIRSFPNSSGGGPDGLRPRHLKDLIGRDGEENRLLLSLVRFVNLAINGKLPDFALPVFYGASLIALRKKDGGIRPIAVGLTLRRLVGKIIIRKSMPDIVAMVSPHQLGCGIRGGAEAAVHATRAFVDHNRSAPNKVLVKLDFKNAFNMLRRDHLLKAVRTHLPRLYPLVYQMYRLPSKLIWQGEFIESCSGVQQGDPCGPALFCIAIHELQVRLSSELRPWFLDDGTLAGDASAVQRDIAQVIEFEAVSGLKLNDSKCEIFFPFQRAPRLGSMLQMVRNLLPAARLIADHELELLGAPILDDSIGVSLTKKGSDLVRWCSRLRLLDAHPALFLLRVSLSTPRLMYLLRCSRAYAEPDLLQSFDETLRSTLHGILNVQLRQTSWLQASLPTSAGGMGIRMASQIAISAYLGSLKDTETLVSGIAPPDAYTSFIAQSEQACRFYAEKWGPLPERISQSALDLQVVKSIQERLMVQANNVKEKARLRAVIDPMSGKWLQAIPSPQLGTMLDNTTLRIVSGLRLGESVCFAHNCARCDLPVSSTGEHALACKRSAGRFSRHSALIDVIHRAMQSAHIPAVKEPVGLSANSQLRPDGLTLVPWNEGRCLVYDVTVSCTLAASYARHTSREVGAAARLAEDRKLAKYRELEQNFIVQPIAFETLGPMGKITKSFLTELGSRVAASTGDRRAWQFLLQRISVEIQRGNAASIIGSLPTGNGLPFPL

SEQ ID NO: 601 - protein, 946 aa, Dermanyssus gallinae
MMSQQDIRRWAVPTVSGRASNGPNLPTRDVPQASSTASTPQSSLHDVILMTSKIKSASKMISCVPRGIRDQMSLELATLINEVCSTASRDSYKRLLQFPTAVFRIPSQKERGRTLTSVLRENLNRFRAGNGSETNPYASTLLSRQEFSSHNNSGMVRVVQGKLALGDVSSAARVLLSTDSVAPLSAETRLALLDKHPPSPPDLSFSPPPASAGEAHEITVSATDVFNAIRSFPNSSGGGPDGLRPRHLKDLIGRDGEENRLLLSLVRFVNLAINGKLPDFALPVFYGASLIALRKKDGGIRPIAVGLTLRRLVGKIIIRKSMPDIVAMVSPHQLGCGIRGGAEAAVHATRAFVDHNRSASNKVLVKLDFKNAFNMLRRDHLLKAVRTHLPPLYPLVYQMYRLPSKLIWQGEFIESCSGVQQGDPCGPALFCIAIHELQVRLSSELRPWFLDDGTLAGDASAVQRDIAQVIEFEAVSGLKLNDSKCEIFFPFQRAPRLGSMLQMVRNLLPAARLIADHELELLGAPILDDSIGVSLTKKGSDLVRWCSRLRLLDAHPALFLLRVSLSTPRLMYLLRCSRAYAEPDLLQSFDETLRSTHQGILNVQLRQTSWLQASLPTSAGGMGIRMASQIAISAYLGSLKDTETLVSGIAPPDAYTSFIAQSEQACRFYAEKWGPLPERISQSALDLQVVKSIQERLMVQANNVKEQARLRAVIDPMSGKWLQAIPSPQLGTMLDNTTLRIVSGLRLGESVCFAHNCARCDLPVSSTGEHALACKRSAGRFSRHSALIDVIHRAMQSAHIPAVKEPVGLSANSQLRPDGLTLVPWNEGRCLVYDVTVSCTLAASYARHTSREVGAAARLAEDRKLAKYRELEQNFIVQPIAFETLGPMGKITKSFLTELGSRVAASTGDRRAWQFLLQRISVEIQRGNAASIIGSLPTGNGLPFPL

SEQ ID NO: 602 - protein, 910 aa, Dermanyssus gallinae
MTSQQDIRRWAVPTVSGRASNGPNLLTRDVTHASSTASTPAQASLHDVILMTSKIKSASKMISCVPRGIRDNLSLELATLINEVCSTASRDSYKRLLQFPTAVFCIPSQKERGRTLTSVLRENLNRFRAGNGSETNPYASTLLSRQECSSHNNSGMVRVVQGKLALGDVSSAARVLLSTDSVAPLSAETRLALLDKHPPSPPDLSFSPPPPSAGEAHEITVSASDVFNAIRSFPNSSGGGPDGLRPRHLKDLIGRDGEENRLLLSLVRFVNLAINGKLPDFALPVFYGASLIALRKKDGGIRPIAVGLTLRRLVGKVIIRKSMPDIVAMVSPHQLGCGIRGGAEAAVHATRAFVDHNRSAPNKVLVKLDFKNAFNMLRRDHLLKAVRTHLPRLYPLVYQMYRLPSKLIWQGEFIESCSGVQQGDPCGPALFCIAIHELQVRLSSELRPWFLDDGTLAGDASAVQRDIAQVIEFEAVSGLKLNDAKCEIFFPFQRAPRLGSMLQMVRNLLPAARLIADHELELLGAPILDDSIGVTLTKKGYDLVRWCSRLRLLDAHPALFLLRVSLSTPRLMYLLRCSRAYAEPDLLQSFDETLRSTLQGILNVQLRQTSWLQASLPTSAGGMGIRMASQIAISAYLGSLKDTETLVSGIAPPDAYTSFIAQSEQACRFYAEKWGPLPERISQSALDLQVVKSIQERLMVQANNVKEQARLRAVIDPMSGKWLQAIPSPQLGTMLDNTTLRIVSGLRLGESVCFAHNCARCDLPVSSTGEHALACKRSAGRFSRHSALIDVIHRAMQSAHIPAVKEPVGLSANSQLRPDGLTLVPWNEGRCLVYDVTVSCTLAASYARHTSREVGAAARLAEDRKLAKYRELEQNFIVQPIAFETLGPMGKITKSFLTELGSRVAASTWR

SEQ ID NO: 603 - protein, 947 aa, Dermanyssus gallinae
MMSQQDIRRWAVPSVSSMESNGLSPSTRDALHASSVTSTSAQVSLQDVILETSKVKSASKMISCLPRGIRDSMSSELATLINEVCSTASRDSYKRLLQFPTAVFCIPSQKVRGRTLTSVLRENLNRFRAGNGPETNPYGSSLSSRQESPSRNNSAMIRVVQGKLALGDVSSAARVLLSTDTVAPLSAETKLALLGKHPPAPPDLSFSPPPVSAGETHEITVSAMDVINAIRSFANSSGGGPDGLRPRHLKDLIGRDGEENRLLLSLVRFVNLAINGKLPDFVLPVFYGASLIALRKKDGGIRPIAVGLTLRRLVGKIIIRKSMPDIVAMVSPHQLGCGIRGGAEAAVHATRAFVDHNKSAPEKVLVKLDFKNAFNTLRRDHLLKAVRTYLPQLYPLVYQMYRLPSKLIWQGEFIESCSGVQQGDPCGPALFCIAIHELQTRLTSELRPWFLDDGTLAGDVSAVQRDIAQVKDFEAVSGLRLNDAKCEIFFPFQQDSQLGPMIQMVRDLLPAARLIPDNEFELLGAPILTESIGLSLAKKGSDLVRWCSRLRLLDAHPALYLLRASLSTPRLMYLLRCSRAYAEPELLQSFDETLRSTLQGILNVQLRQTSWLQASLPTSAGGMGIRMASQVALSAHLGSLKDTETLVSGITPPDAYTSFIAQLEQARRYYAEKWGPLPERISQSTLDLQVVKSIQERLMTQANNVKEQARLKAVIDPMSGKWLQAIPSPQLGTMLDNTTLRIVSGLRLGESVCLAHNCARCDLPVSSTGEHALACKRSAGRFSRHSALIDVIHRAMQSAHIPAVKEPVGLSANSQLRPDGLTLVPWSEGRCLVYDVTVSCTLAASYARHTSREVGAAAHLAEDRKLAKYRELEQNFIVQPVAFETLGPMGKITRSFLAELGSRVAASTGDRRSWQFLLQRISVEIQRGNAASIIGSLPTGKGLPFLP

SEQ ID NO: 604 - protein, 946 aa, Dermanyssus gallinae
MTSQQDIRRWAVPTVSSRASNGPNLPTRDVPQASSTASTPQWSLHDVILMTSKIKSASKMISCVPRGIRDQMSLELATLINEVCSTASRDSYKRLLQFPTAVFCIPSQKERGRTLTSVLRENLNRFRAGNGSETNPYASTLLSRQEFSSHNNSGMVRVVQGKLALGDVSSAARVLLSTDSVAPLSAETRLALLDKHPPSPPDLSFSPPPASAGEAHEITVSATDVFNAIRSFPNSSGGGPDGLRPRHLKDLIGRDGEENRLLLSLVRFVNFAINGKLPDFALPVFYGASLIALRKKDGGIRPIAVGLTLRRLVGKIIIRKSMPDIVAMVSPHQLGCGIRGGAEAAVHATRAFVDHNRSAPNKVLVKLDFKNAFNMLRRDHLLKAVRTHLPRLYPLVYQMYRLPSKLIWQGEFIESCSGVQQGDPCGPALFCIAIHELQVRLSSELRPWFLDDGTLAGDASAVQRDIAQVIEFEAVSGLKLNDSKCEIFFLFQRAPRLGSMLQMVRNLLPAARLIADYKLELLGAPILDDSIGVSLTKKGSDLVRWCSRLRLLDAHPALFLLRVSLSTPRLMYLLRCSRAYAEPDLLQSFDETLRSTLQGILNVQLRQTSWLQASLPTSAGGMGIRMASQIAISAYLGSLKDTETLVSGIAPPDAYTSFIAQSEQACRFYAEKWGPLPERISQSALDLQVVKSIQERLMVQANNVKEQARLRAVIDPMSGKWLQAIPSPQLGMMLDNTTLRIVSGLRLGESVCFAHNCARCDLPVSSTGEHALACKRSAGRFSRHSALIDVIHRAMQSAHIPAVKEPVGLSANSQLRPDGLTLVPWNEGRCLVYDVTVSCTLAASYARHTSREVGATARLAEDRKLAKYRELEQSFIVQPIAFETLGPMGKITKSFLTELGSRVAASTGDRRAWQFLLQRISVEIQRGNAASIIGSLPTGNGLPFPL

SEQ ID NO: 605 - protein, 947 aa, Dermanyssus gallinae
MTSQQDIRRWAVPTVSGRASNGPNLPTRDVPQASSTASTPAQSSLHDVILMTSKIKSASKMISCVPRGIRDQMSLELATLINEVCSTASRDSYKRLLQFPTAVFCIPSQKERGRTLTSVLRENLNRFRARNGSETNPYASTLLSRQELSSHNNSGMVRVVQGKLALGDVSSAARVLLSTDSVAPLSAETRLALLDKHPPSPPDLSFSPPPASAGEAHEITVSATDVFNAIRSFPNSSGGGPDGLRPRHLKDLIGRDGEENRLLLSLVRFVNLAINGKLPDFALPVFYGASLIALRKKDGGIRPIAVGLTLRRLVGKIIIRKSMPDIVAMVSPHQLGCGIRGGAEAAVHATRAFVDHNRSAPNKVLVKLDFKNAFNMLRRDHLLKAVRTHLPRLYPLVYQMYRLPSKLIWQGEFIESCSGVQQGDPCGPALFCIAIHELQVRLSSELRPWFLDDGTLAGDASAVQRDIAQVIEFEAVSGLKLNDSKCEIFFPFQRAPRLGSMLQMVRNLLPAARLIADHELELLGAPILDDSIGVSLTKKGSDLVRWCSRLRLLDAHPALFLLRVSLSTPRLMYLLRCSRAYAEPDLLQSFDETLRSTLQGILNVQLRQTSWLQASLPTSAGGMGIRMASQIAISAYLGSLKDTETLVSGIAPPDAYTSFIAQSEQACRFYAEKWGPLPERISQSALDLQVVKSIQERLMVQANNVKEQARLRAVIDPMSGKWLQAIPSPQLGTMLDNTTLRIVSGLRLGESVCFAHNCARCDLPVSSTGEHALACKRSAGRFSRHSALIDVIHRAMQSAHIPAVKEPVGLSANSQLRPDGLTLVPWNEGRCLVYDVTVSCTLAASYARHTSREVGAAARLAEDRKLAKYRELEQNFIVQPIAFETLGPMGKITKSFLTELGSRVAASTGDRRAWQFLLQRISVEIQRGNAASIIGSLPTGNGLPFPL

SEQ ID NO: 606 - protein, 945 aa, Dermanyssus gallinae
MRLCGFNGMDFCSAIMRRGQCSEAKYCAQQEFTSIKKFFSDLPKMISCLPKMISCLPKMISCLPRGIRDSMSSELATLINEVCSTESRDSYKRLLQFPTAVFCIPSQKERGRTLTSVLRENLNRFRAGNGPETNPYGSSLSSRQESSSRNNSAMIRVVQGKLALGDVSSAARVLLSTDTVAPLSAETKLALLGKHPPTPPDLSFSPPPVSAGETHEITVSAMDVINAIRSFANSSGGGPDGLRPRHLKDLIGRDGEENRLLLSLVRFVNLAINGKLPDFVLPVFYGASLIALRKKDGGIRPIAVGLTLRRLVGKIITRKSMPVIVAMVSPHQLGCGIRGGAEAAVHATRAFVDHNRSAPEKVLVKLDFKNAFNTLRRDHLLKAVRTHLPQLYPLVYQMYRLPSKLIWQGEFIESCSGVQQGDPCGPALFCIAIHELQTRLTSELRPWFLDDGTLAGDVSAVQRDIAQVKDFEAVSGLKLNDAKCEIFFPFQQDPQLGSMLQMVRDLLPAARLIPDNEFELLGAPILTESIGLSLAKKGSDLVRWCSRLRLLDAHPALYLLRASLSTPRLMYLLRFSQAYAEPELLQSFDETLRSTLQGILNVQLRQTSWLQASLPTSAGGMGIRMASQVALSAHLGSLKNTETLVSGITPPDAYTSFIAQLEQARRYYAEKWGPLPERISQSTLDLQVVKSIQERLMTQANNVKEQARLKAVIDPMSGKWLQAIPSPQLGTMLDNTTLRIVSGLRLGESVCFAHNCARCDLPVSSTGEHALACKRSAGRFSRHSALIDVIHRAMQSAHIPAVKEPVGLSANSQLRPDGLTLVPWSKGRCLVYDVTVSCTLAASYARHTSREVGAAAHLAEDRKLAKYRELEQNFIVQPIAFETLGPMGKITRSFLAELGSRVAASTGDRRSWQFLLQRISVEIQRGNAASIIGSLPTGKGLPFLP

SEQ ID NO: 607 - protein, 947 aa, Dermanyssus gallinae
MTSQQDIRRWAVPTVSGRASNGPNLPTRDVPQASSTASTPAQSSLHDVILMTSKIKSASKMISCVPRGIRDQMSLELATLINEVCSTASRDSYKRLLQFPTAVFCIPSQKERGRTLTSVLRENLNRFRARNGSETNPYASTLLSRQELSSHNNSGMVRVVQGKLALGDVSSAARVLLSTDSVAPLSAETRLALLDKHPPSAPDLSFSPPPASAGEAHEITVSATDVFNAIRSFPNSSGGGPDGLRPRHLKDLIGRDGEENRLLLSLVRFVNLAINGKLPDFALPVFYGASLIALRKKDGGIRPIAVGLTLRRLVGKIIIRKSMPDIVAMVSPHQLGCGIRGGAEAAVHATRAFVDHNRSAPNKVLVKLDFKNAFNMLRRDHLLKAVRTHLPRLYPLVYQMYRLPSKLIWQGEFIESCSGVQQGDPCGPALFCIAIHELQVRLSSELRPWFLDDGTLAGDASAVQRDIAQVIEFEAVSGLKLNDSKCEIFFPFQRAPRLGSMLQMVRNLLPAARLIADHELELLGAPILDDSIGVSLTKKGSDLVRWCSRLRLLDAHPALFLLRVSLSTPRLMYLLRCSRAYAEPDLLQSFDETLRSTLQGILNVQLRQTSWLQASLPTSAGGMGIRMASQIAISAYLGSLKDTETLVSGIAPPDAYTSFIAQSEQACRFYAEKWGPLPERISQSALDLQVVKSIQERLMVQANNVKEQARLRAVIDPMSGKWLQAIPSPQLGTMLDNTTLRIVSGLRLGESVCFAHNCARCDLPVSSTGEHALACKRSAGRFSRHSALIDVIHRAMQSAHIPAVKEPVGLSANSQLRPDGLTLVPWNEGRCLVYDVTVSCTLAASYARHTSREVGAAARLAEDRKLAKYRELEQNFIVQPIAFETLGPMGKITKSFLTELGSRVAASTGDRRAWQFLLQRISVEIQRGNAASIIGSLPTGNGLPFPL

SEQ ID NO: 608 - protein, 947 aa, Dermanyssus gallinae
MMSQQDIRRWAVPSVSSMESNGLSPSTRDALHASSVTSTPAQVSLQDVILETSKVKSASKMISCLPRGIRDSMSSELATLINEVCSTASRDSYKRLLQFPTAVFCIPSQKVRGRTLTSVLRENLNRFRAGNGPETNPYGSSLSSRQESPSRNNSAMIRVVQGKLALGDVSSAARVLLSTDTVASLSAETKLALLGKHPPAPPDLSFSPPPVSAGETHEITVSAMDVINAIRSFANSSGGGPDGLRPRHLKDLIGRDGEENRLLLSLVRFVNLAINGKLPDFVLPVFYGASLIALRKKDGGIRPIAVGLTLRRLVGKIIIRKSMPDIVAMVSPHQLGCGIRGGAEAAVHATRAFVDHNKSAPEKVLVKLDFKNAFNTLRRDHLLKAVRTYLPQLYPLVYQMYRLPSKLIWQGEFIESCSGVQQGDPCGPALFCIAIHELQTRLTSELRPWFLDDGTLAGDVSAVQRDIAQVKDFEAVSGLRLNDAKCEIFFPFQQDPQLGPMIQMVRDLLPAARLIPDNEFELLGAPILTESIGLSLAKKGSDLVRWCSRLRLLDAHPALYLLRASLSTPRLMYLLRCSRAYAEPELLQSFDETLRSTLQGILNVQLRQTSWLQASLPTSAGGMGIRMASQVALSAHLGSLKDTETLVSGITPPDAYTSFIAQLEQARRYYAEKWGPLPERISQSTLDLQVVKSIQERLMTQANNVKEQARLKAVIDPMSGKWLQAIPSPQLGTMLDNTTLRSVSGLRLGESVCFAHNCARCDLPVSSTGEHALACKRSAGRFSRHSALIDVIHRAMQSAHIPAVKEPVRLSANSQLRPDGLTLVPWSEGRCLVYDVTVSCTLAASYARHTSREVGAAAHLAEDRKLAKYRELEQNFIVQPVAFETLGPMGKITRSFLAELGSRVAASTGDRRSWQFLLQRISVKIQRGNAASIIGSLPTGKGLPFLP

SEQ ID NO: 609 - protein, 947 aa, Dermanyssus gallinae
MMSQQDIRRWAVPSVSSMESNGLSPSTRNALHASSVTSTPAQVSLQDVILETSKVKSASKMISCLPRAIRDSMSSELATLINEVCSTASRDSYKRLLQFPTAVFCIPSQKVRGRTLTSVLRENLNRFRAGNGPETNPYGSSLSSRQESPSRNNSAMIRVVQGKLAPGDVSSAARVLLSTDTVAPLSAETKLALLGKHPPAPPDLSFSPPPVSAGGTHEITVSAMDVNNAIRSFANSSGGGPDGLRPRHLKDLIGRDGEENRLLLSLVRFVNLAINGKLPDFVLPVFYGASLIAFHKKDGGIRPIAVGLTLRRLVGKIIIRKSMPDIVAMVSPHQLGCGIRGGAEAAVHATRAFVDHNKSAPEKVLVKLDFKNAFNTLRRDHLLKANRTYLPQLYPLVYQMYRLPSKLIWQGEFIESCSGVQQGDPCGPALFCIAIHELQTRLTSELRPWFLDDSTLAGDVSAVQRDIALVKDFEAVSGLKLNDAKCEIFFPFQQDPQLGPMLQMVRDLLPAARLIPDNEFELLGAPILTESIGLSLAKKGSDLVRWCSRLRLLDAHPALYLLRASLSTPRLMYLLRCSRAYAEPELLQSFDETLRSTLQGILNVQLRQTSWLQASLPTSAGGMGIRMASQVALSAHLGSLKDTETLVSGITPPDAYTSFIAQLEQARRYYAEKWGPLPERISQSTLDLQVVKSIQERLMTQANNVKEQARLKAVIDPMSGKWLQAIPSPQLGTMLDNTTLRIVSGLRLGESVCFAHNCARCDLPVSSTGEHALACKRSAGRFSRHSALIDVIHRAMQSAHIPAVKEPVGLSANSQLRPDGLTLVPWSEGRCLVYDVTVSCTLAASYARHTSREVGAAAHLAEDRKLAKYRELEQNFIVQPIAFETLDPMGKITRSFLAELGSRVAASTGDRRSWQFLLQRISVEIQRGNAASIIGSLPTGKGLPFLP

SEQ ID NO: 610 - protein, 947 aa, Dermanyssus gallinae
MMSQQDIRRWAVPSVSSMESSGLSRSTRDALHASSVTSTPAQVSLQDVILETSKIKSASKMISCLPRGIRDSMSSELATLINEVCSTASRDSYTRLLQFPTAVFCIPFQKERDRTLTSVLRENLNRFRAGNGPETNPYGSSLSSRQESSSRNNSAMIRVVQGKLALGDVSSAARVLLSTDTVAPLSAETKLALLGKHPPTPPDLSFSPPPVSAGETHEITVSAMDVINAIRSFANSSGGGPDGLRPRHLKDLIGRDGEENRLLLSLVRFVNLAINGKLPDFVLPVFYGASLIALRKKDGGIRPIAVGLTLRRLVGKIITRKSMPDIVAMVSLHQLGCGIRGGAEAAVHATRAFVDHNRSAPEKVLVKLDFKNAFNTLRRDHLLKAVRTHLPQLYPLVYQMYRLPSKLIWQGEFIESCSGVQQGDPCGPALFCIAIHELQTRLTSELRPWFLDDGTLAGDVSAVQRDIAQVKDFEAVSGLKLNDAKCEIFFPVQQDPQLGSMLQMVRDLLPAARLIPDNEFELLGAPILTESIGLSLAKKGSDLVRWCSRLRLLDAHPALYLLRASLSTPRLMYLLRCSQAYAEPELLQSFDETLRSTLQGILNVQLRQTSWLQASLPTSAGGMGIRMASQVALSAHLGSLKNTETLVSGITPPDAYTSFIAQLEQARRYYAEKWGPLPERISQSTLDLQVVKSIQERLMTQANNVKEQARLKAVIDPMSGKWLQAIPSPQLGTMLDNTTLRIVSGLRLGEAVCFAHNCARCDLPVSSTGEHALACKRSAGRFSRHSALIDVIHRAMQSAHIPAVKEPVGLSANSQLRPDGLTLVPWSEGRCLVYDVTVSCTLAASYARHTSREVGAAAHLAEDRKLAKYRELEQKFIVQPIAFETLGPMGKITRSFLAELGSRVAASTGDRRSWQFLLQRISVEIQRGNAASIIGSLPTGKGLPFLP

SEQ ID NO: 611 - protein, 947 aa, Dermanyssus gallinae
MMSQQDIRRWAVPSVSSMESNGLSPSTRDALHASSVTSTPAQVSLQDVILETSKVKSASKMISCLPRGIRDSMSSELATLINEVCSTASRDSYKRLLQFPTAVFCIPSQKVRGRTLTSVLRENLNRFRAGNGPETNPYGSSLSSRQESPLRNNSAMIRVVQGKLALGDVSSAARVLLSTDTVAPLSAETKLALLGKHPPAPPDLSFSPPPVSAGETHEITVSAMDVINAIRSFANSSGGGPDGLRPRHLKDLIGRDGEENRLLLSLVRFVNLAINGKLPDFVLPVFYGASLIALRKKDGDIRPIAVGLTLRRLVGKIIIRKSMPDIVAMVSPHQLGCGIRGGAEAAVHATRAFVDHNKSAPEKVLVKLDFKNAFNTLRRDHLLKAVRTYLPQLYPLVYQMYRLPSKLIGQGEFIESCSGVQQGDPCGPALFCIAIHELQTRLTSELRPWFLDDGTLAGDVSAVQRDIAQVKDFEAVSGLRLNDAKCEIFFPVQQDPQLGPMIQMVRDLLPAARLIPDNEFELLGAPILTESIGLSLAKKGSDLVRWCSRLRLLDAHPALYLLRASLSTPRLMYLLRCSRAYAEPELLQSFDETLRSTLQGILNVQLRQTSWLQASLPTSAGGMGIRMASQVALSAHLGSLKDTETLVSGITPPDAYTSFIAQLEQARRYYAEKWGPLPERISQSTLDLQVVKSIQERLMTQANNVKEQARLKAVIDPMSGKWLQAIPSPQLGTMLDNTTLRIVSGLRLGESVCFAHNCARCDLPVSSTGEHALACKRSAGRFSRHSALIDVIHRAMQSAHIPAVKEPVGLSANSQLRPDGLTLVPWSEGRCLVYDVTVSCTLAASYARHTSREVGAAAHLAEDRKLAKYRELEQNFIVQPVAFETLGPMGKITRSFLAELGSRVAASTGDRRSWQFLLQRISVEIQRGNAASIIGSLPTGKGLPFLP

SEQ ID NO: 612 - protein, 947 aa, Dermanyssus gallinae
MMSQQDIRRWAVASASSRDNNSSAPSSREGPYASSVASAPAQTSLHDVILATSKIKSASKMISCLPRGIRNNVSLELSNLINEVCSSASRESYRRLLQFPTAVFCIPRQKERGRTLTSVLRENLNRFRAGNGPETIPIASASTTRLSSASFKGFSLARVVQGKLALGDVSSAARALLSTDTVAPHSDETRLALIDKHPPCPRNFSLVPPPVSAGQSHEITVSAIDVINAIRSFANSSGGGPDGLRPRHLKDLIGRDGEENQLVLSLVRFVNLAVNGKLPDFVLPVFYGASLMALRKKDGGIRPIAVGLTLRRVVGKIITRKSMPDIIGLVSPHQLGCGIRGGAEAAVHATRAFINRNKSVPGKVIVKLDFKNAFNSLRRDHLLKAVRSLLPRLYPLVHQMYRFPSKLIWQGEFIESCSGVQQGDPCGPALFCVAIHELQSRLSSELRPWFLDDGTLAGDTLTVLRDLALVKEFEAVSGLTLNDSKCEVFFPFHEDPHRSSAFQEVRNLLPAARLIPVNEMELLGAPILDDSVDISLSKKGSDLVRWCSRLRLLDAHPALYLLRVSLSTPRLMYLFRCSRAYTNPDLLHSIDETLRNTLQGILNVQLRQSSWVQASLPTSSGGLGIRMTSQVAISAYLGSLKATETLVQGIAPPNAHPSFSDQIEQACRDYENKWGQLPESTSQSSLDSQVVKAIQEQLLTQASNTNERARLRAAIDPWSGKWLQAIPSPQLGTMLDSTTLRIASGLRLGESVCFAHNCARCDLPVSSTGEHALACKRSAGRFSRHSALNDVIHRALQTAHIPAVKEPVGLSSNSQLRPDGLTLVPWSEGRCLVYDVTVSCTLAASYVRHTSREVGAAARLAEDRKLAKYRELEQNFIVQPVAFETLGPMGEITKGFLAELGSRVAVATGDRRAWQFLLQRISVEIQRGNAASIIGSLPTGKGLTFLP

SEQ ID NO: 613 - protein, 1275 aa, Dermanyssus gallinae
MQYLGVTEAIRVRSKSARTGIVMPTDSVILTFTGIEFPAEVRLGFKTHGVVLYREPHHCYRCFSLDHIRPKCPWTSPRCRRCGSTNHLRKDCTQPPKCCLCKGAHESTWGTCPHRLHRMEQLRKSAPLRIQQNASAPTVKICSPVNDIQPSASFSKRSFSAVVQNGIKVQPSASLPKRSFSAVVQNGAKAPSRPVKQLQKTGGDVKELSPNAIAPPQGDCLDRIMLAITEKIIPTIIETIVTHISSAIKKAFSCILPGAPTQVTSVGPAIGSPNNLTAGLRDQLKDALLSAVASSLTCLRAPETDPALTATSLCCRGRQRTGVSCGLTMTSQQDIRRWAVPTVSGRASNGPNLPTRDVPQASSTASTPAQSSLHDVILMTSKIKSASKMISCVPRGIRDQMSLELATLINEVCSTASRDSYKRLLQFPTAVFCIPSQKERGRTLTSVLRENLNRFRAGNGSETNPYASTLLSRQEFSSHNNSGMVRVVQGKLVLGDVSSAARVLLSTDSVAPLSAETRLALLDKHPPSPPDLSFSPPPASAGEAHEITVSATDVFNAIRSFPNSSGGGPDGLRPRHLKDLIGRDDEENRLLLSLVRFVNLAINGKLPDFALPVFYGASLIALRKKDGGIRPIAVGLTLRRLVGKIIIRKSMPDIVAMVSPHQLGCGIRGGAEAAVHATRAFVDHNRSAPNKVLVKLDFKNAFNMLRRDHLLKAVRTHLPRLYPLVYQMYRLPSKLIWQGEFIESCSGVQQGDPCGPALFCIGIHELQVRLSSELRPWSLDDGTLAGDASAVQRYIAQVIEFEAVSGLKLNDSKCEIFFPFQRAPRLGSMLQMVHNLLPAARLIADHELELLGAPILDDSIGVSLTQKGSDLVCWCSRLRLLDAHPALFLLRVSLSTPRLMYLLRCSRAYAEPDLLQSFDETLRSTLQGILNVQLRQTSWLQASLPTSAGGMGIRMASQIAISAYLGSLQDTETLVSRIAPPDAYTSFIAQSEQACRFYVEKWGPLPERISQSALDLQVVKSIQERLMVQANNVKEQARLRAVIDPMSGKWLQAIPSPQLGTMLDNTTLRIVSGLRLGESVCFAHNCARCDLPVSSTGEHALACQRSAGRFSRHSALIGVIHRAMQSAHIPAVKEPVGLSANSQLRPDGLTLVPWNEGRCLVYDVTVSCTLAASYARHTSREVGAAARLAEDRKLAKYRELEQNFIVQPIAFETLGPMGKITKSFLTELGSRVAASTGDRRAWQFLLQRISVEIQRGNAASIIGSLPTGNGLPFPL

SEQ ID NO: 614 - protein, 947 aa, Dermanyssus gallinae
MMSQQDIRRWAVPSVSSMESNGLSPSTRDALHASSVTSTPAQVSLQDVILETSKVKSASKMISCLPRGIRDSMSSELATLINEVCSTASRDSYKRLLQFPTAVFCIPSQKVRGRTLTSVLRENLNRFRAGNGPETNPYGSSLSSRQESPSRNNSAMIRVVQGKLALGDVSSAARVLLSTDTVAPLSAETKLALLGKHPPAPPDLSFSPPPVSAGETHEITVSAMDVINAIRSFANSSGGGPDGLRPRHLKDLIGRDGEENRLLLSLVRFVNLAINGKLPDFVLPVFYGASLIALRKKDGGIRPIAVGLTLRRLVGKIIIRKSMPDIVAMVSPHQLGCGIRGGAEAAVHATRAFVDHNKSAPEKVLVKLDFKNAFNTLRRDHLLKAVRTYLPQLYPLVYQMYRLPSKLIWQGEFIESCSGVQQGDPCGPALFCIAIHELQTRLTSELRPWFLDDGTLAGDVSAVQRDIAQVKDFEAVSGLRLNDAKCEIFFPFQQDPQLGPMIQMVRDLLPAARLIPDNEFELLGAPILTESIGLSLAKKGSDLVRWCSRLRLLDAHPALYLLRASLSTPRLMYLLRCSQAYAEPELLQSFDETLRSTLQGILNVQLRQTSWLQASVPTSAGGMGIRMASQVALSAHLGSLKDTETLVSGITPPDAYTSFIAQLEQARRYYAEKWGPLPERISQSTLDLQVVKSIQERLMTQANNVKEQARLKAVINPMSGKWLQAIPSPQLGTMLDNTTLRIVSGLRLGESVCFAHNCARCDLPVSSTGEHALACKRSAGRFSRHSALIDVIHRAMQSAHIPAVKEPVGLSANSQLRPDGLTLVPWSEGRCLVYDVTVSCTLAASYARHTSREVGAAAHLAEDRKLAKYRELEQNFIVQPVAFETLGPMGKITRSFLAELGSRVAASTGDRRSWQFLLQRISVEIQRGSAASIIGSLPTGKGLPFLP

SEQ ID NO: 615 - protein, 1510 aa, Dermanyssus gallinae
MAVEHSPKGDPPSGKPIAGTTTTTTTPPPPADVNNNDDPPPADVNNTDDPSVSCVRNVGAETAVTAESVAAAANSPSTSGKGCCTKKKKRQATSPPQQQQPSKEAKDVGTTTVLSTSGAATTGAGCVVLCNAANGETTTDATTIVCESSGESSTHVPGQTVSPGSAGEAVSLDDKQVAGDGDALNDGDTEGWIEVGAGGKPAQKMTAPNVVTKERTEAVLFSADDKQLEKNFTKVCIDIAQHIKGEIDEPCFARSGELVIVAADIVDRATLLSLTQLAGIPVQSRTSGQRSTVKGKICGVHPSLSEDLIVNELKTLGVTEAIRVRSKNVRTGIVMPTDSVILTFAGIEFPAEVRLGLKTHGVVLYREPHHCYRCFSLDHIRPKCPWSSPRCRRCGSTNHLRKDCTQPPKCCLCKGSHESTWGSCPHRLHRMEQLKRSAPLRIQQNASAPTVKICSPVNNIQPSASFSKRSFSAVVQNGVRVQPSASLPKRSFSAVVQNGVKVPSRPADQAQKAEDDVKEPIPNVIAPPQGDWLDRIMLAITEKIIPSVIDTIVTHISSAIEKAFSCILPGAPLQVASAGPAIGSPNNLTVGLRDQLKDALLTSVTSSLAGLRPSRNGSHDDSCLPCCRVRHRSEVSSGLAMMSQQDIRRWAVPSVSSMESNGLSRSTRDALHASSVTSTPAQVSLQDVILETSKIKSASKMISCLPRGIRDSMSSELATLINEVCSTASRDSYKRLLQFPTAVFCIPSQKERGRTLTSVLRENLNRFRAGNGPETNPYGSSLSSRQESSSRNNSAMIRVVQGKLALGDVSSAARVLLSTDTVAPLSAETKLALLGKHPPTPPDLSFSPPPVSAGETHEITVSAMDVINAIRSFANSSGGGPDGLRPRHLKDLIGRDGEENRLLLSLVRFVNLAINGKLPDFVLPVFYGASLIALRKKDGGIRPIAVGLTLRRLVGKIITRKSMPDIVAMVSPHQLGCGIRGGAEAAVHATRAFVDHNRSAPDKVLVKLDFKNAFNTLRRDHLLKAVRTHLPQLYPLVYQMYRLPSKLIWQGEFIESCSGVQQGDPCGPALFCIAIHELQTRLTSELRPWFLDDGTLAGDVSAVQRDIAQVKDFEAVSGLKLNDAKCEIFFPFQQDPQLGSMLQMVRDLLPAARLIPDNEFELLGAPILTESIGLSLAKKGSDLVRWCSRLRLLDAHPALYLLRASLSTPRLMYLLRCSQAYAEPELLQSFDETLRSTLQGILNVQLRQTSWLQASLPTSAGGMGIRMASQVALSAHLGSLKNTETLVSGITPPDAYTSFIAQLEQARRYYAEKWGPLPERISQSTLDLQVVKSIQERLMTQANNVKEQARLKAVIDPMSGKWLQAIPSPQLGTMLDNTTLRIVSGLRLGESVCFAHNCARCDLPVSSTGEHALACKRSAGRFSRHSALIDVIHRAMQSAHIPAVKEPVGLSANSQLRPDGLTLVPWSEGRCLVYDVTVSCTLAASYARHTSREVGAVRSPCRRSQVGKIS

SEQ ID NO: 616 - protein, 947 aa, Dermanyssus gallinae
MMSQQDIRRWAVASASSRDNNSSASSSREGPYASSVASAPAQTSLHDVILATSKIKSASKMISCLPRGIRDNVSLELSNLINEVCSSASRESYRRLLQFPTAVFCIPRQKERGRTLTSVLRENLNRFRAGNGPETIPIASASTTRLSSASFKGFSLARVVQGKLALGDVSSAARALLSTDTVAPHSDETRLALIDKHPPCPRNFSLAPPPVSAGQSHEITVSAIDVINAIRSFANSSGGGPDGLRPRHLKDLIGRDGEENQLVLSLVRFVNLAVNGKLPDFVLPVFYGASLMALRKKDGGIRPIAVGLTLRRVVGKIITRKSMPDIIGLVSPHQLGCGIRGGAEAAVHATRAFINRNKSVPGKVIVKLDFKNAFNSLRRDHLLKAVRSLLPRLYPLVHQMYRFPSKLIWQGEFIESCSGVQQGDPCGPALFCVAIHELQSRLSSELRPWFLDDGTLAGDTLTVLRDLALVKEFEAVSGLTLNDSKCEVFFPFHEDPHRSSAFQEVRNLLPAARLIPVNEMELLGAPILDDSVDISLSKKGSDLVRWCSRLRLLDAHPALYLLRVSLSTPRLMYLFRCSRAYTNPDLLHSIDETLRNTLQGILNVQLRQSSWVQASLPTSSGGLGIRMASQVAISAYLGSLKATETLVQGIAPPNAHPSFSDQIEQACRDYENKWGQLPESTSQSSLDSQVVKAIQEQLLTQASNTNERARLRAAIDPWSGKWLQAIPSPQLGTMLDSTTLRIASGLRLGESVCFAHNCARCDLPVSSTGEHALACKRSAGRFSRHSALNDVIHRALQTAHIPAVKEPVGLSSNSQLRPDGLTLVPWSEGRCLVYDVTVSCTLAASYVRHTSREVGAAARLAEDRKLAKYRELEQNFIVQPVAFETLGPMGEITKGFLAELGSRVAVATGDRRAWQFLLQRISVEIQRGNAASIIGSLPTGKGLTFLP

SEQ ID NO: 617 - protein, 946 aa, Dermanyssus gallinae
MTSQQDIRRWAVPTVSGRASNGPNLPTRDVPQASSTASTPQSSLHDVILMTSKIKSASKMISCVPRGIRDQMSLELATLINEVCSTASRDSYKRLLQFPTAVFCIPSQKERGRTLTSVLRENLNRFRAGNGSETNPYASTLLSRQEFSSHNNSGMVRVVQGKLALGDVSSAARVLLSTDSVAPLSAETRLALLDKHPPSPPDLSFSPPPASAGEAHEITVSATDVFNAIRSFPNSSGGGPDGLRPRHLKDLIGRDGEENRLLLSLVRFVNLAINGKLPDFALPVFYGASLIALRKKDGGIRPIAVGLTLRRLVGKIIIRKSMPDIVAMVSPHQLGCGIRGGAEAAVHATRAFVDHNRSAPNKVLVKLDFKNAFNMLRRDHLLKAVRTHLPRLYPLVYQMYRLPSKLIWQGEFIESCSGVQQGDPCGPALFCIAIHELQVRLSSELRPWFLDDGTLAGDASAVQRDIAQVIEFEAVSGLKLNDSKCEIFFPFQRAPRLGSMLQMVRNLLPAARLIADHELELLGAPILDDSIGVSLTKKGSDLVRWCSRLRLLDAHPALFLLRVSLSTPRLMYLLRCSRAYAEPDLLQSFDETLRSTVQGILNVQLRQTSWLQASLPTSAGGMGIRMASQIAISAYLGSLKDTETLVSGIAPPDAYTSFIAQSEQACRFYAEKWGPLPERISQSALDLQVVKSIQERLMVQANNVKEQARLRAVIDPMSGKWLQAIPSPQLGTMLDNTTLRIVSGLRLGESVCFAHNCARCDLPVSSTGEHALACKRSAGRFSRHSALIDVIHRAMQSAHIPAVKEPVGLSANSQLRPDGLTLVPWNEGRCLVYDVTVSCTLAASYARHTSREVGAAARLAEDRKLAKYRELEQNFIVQPIAFETLGPMGKITKSFLTELGSRVAASTGDRRAWQFLLQRISVEIQRGNAASIIGSLPTGNGLPFPV

SEQ ID NO: 618 - protein, 774 aa, Dermanyssus gallinae
MAQLKRSAPLRIQQNTSAPTVKVCAPVSDIQLSASFSKRSYSAVVRNGVKVPSRPVDPPQKTHVAVEERIDKHPPCPRNFSLVPPPVSAGQSHEITVSAIDVINAIRSFANSSGGGPDGLRPRHLKDLIGRDGEENQLVLSLVRFVNLAVNGKLPDFVLPVFYGASLMALRKKDGGIRPIAVGLTLRRVVGKIITRKSMPDIIGLVSPHQLGCGIRGGAEAAVHATRAFINRNKSVPGKVIVKLDFKNAFNSLRRDHLLKAVRSLLPRLYPLVHQMYRFPSKLIWQGEFIESCSGVQQGDPCGPALFCVAIHELQSRLSSELRPWFLDDGTLAGDTLTVLRDLALVKEFEAVSGLTLNDSKCEVFFPFHEDPHRSSAFQEVRNLLPAARLIPVNEMELLGAPILDDSVDISLSKKGSDLVRWCSRLRLLDAHPALYLLRVSLSTPRLMYLFRCSRAYTNPDLLHSIDETLRNTLQGILNVQLRQSSWVQASLPTSSGGLGIRMTSQVAISAYLGSLKATETLVQGIAPPNAHPSFSDQIEQACRDYENKWGQLPESTSQSSLDSQVVKAIQEQLLTQASNTNERARLRAAIDPWSGKWLQAIPSPQLGTMLDSTTLRIASGLRLGESVCFAHNCARCDLPVSSTGEHALACKRSAGRFSRHSALNDVIHRALQTAHIPAVKEPVGLSSNSQLRPDGLTLVPWSEGRCLVYDVTVSCTLAASYVRHTSREVGAAARLAEDRKLAKYRELEQNFIVQPVAFETLGPMGEITKGFLA

SEQ ID NO: 619 - protein, 947 aa, Dermanyssus gallinae
MMSQQDIRRWAVPSVSSMESNGLSRSTRDALHANSVTSTPAQVSLQDVILETSKIKSASKMISCLPRGIRDSMSSELATLINEVCSTASRDSYKRLLQFPTAVFCIPSQKERGRTLTSVLRENLNRFRAGNGPETNPYGSSLSSRQESSSRNNSAMIRVVQGKLALGDVSSAARVLLSTDTVAPLSAETKLALLGKHPPTPPDLSFSPPPVSAGETHEITVSAMDVINAIRSFANSSGGGPDGLRPRHLKDLIGRDGEENRLLLSLVRFVNLAINGKLPDFVLPVFYGASLIALRKKDGGIRPIAVGLTLRRLVGKIITRKSMPDIVAMVSPHQLGCGIRGGAEAAVHATRAFVDHNRSAPEKVLVKLDFKNAFNTLRRDHLLKAVRTHLPQLYPLVYQMYRLPSKLIWQGEFIESCSGVQQGDPCGPALFCIAIHELQTRLTSELRPWFLDDGTLAGDVSAVQRDIAQVKDFEAVSGLKLNDAKCEIFFPFQQDPQLGSMLQMVRDLLPAARLIPDNEFELLGAPILTESIGLSLAKKGSDLVRWCSRLRLLDAHPALYLLRASLSTPRLMYLLRCSQAYAEPELLQSFDETLRSTLQGILNVQLRQTSWLQASLPTSAGGMGIRMASQVALSAHLGSLKNTETLVSGITPPDAYTSFIAQLEQARRYYAEKWGPLPERISQSTLDLQVVKSTLERLMTQANNVKEQARLKAVIDPMSGKWLQAIPSPQLGTMLDNTTLRIVSGLRLGESVCFAHNCARCDLPVSSTGEHALACKRSAGRFSRHSALIDVIHRAMQSAHIPAVKEPVGLSANSQLRPDGLTLVPWSEGRCLVYDVTVSCTLAASYARHTSREVGAAAHLAEDRKLAKYRELEQNFIVQPIAFETLGPMGKITRSFLAELGSRVAASTGDRRSWQFLLQRISVEIQRGNAASIIGSLPTGKGLPFLP

SEQ ID NO: 620 - protein, 947 aa, Dermanyssus gallinae
MMSQQDIRRWAVPSVSSMESNGLSPSTRDALHASSVTSTPAQVSLQDVILETSKVKSASKMISCLPRGIRDSMSSELATLINEVCSTASRDSYKRLLQFPTAVFCIPSQKVRGRTLTSVLRENLNRFRAGNGLETNPYGSSLSSRQESPSRNNSAMIRVVQGKLALGDVSSAARVLLSTDTVAPLSAETKLALLGKHPPAPPDLSFSPPPVSAGETHEITVSAMDVINAIRSFANSSGGGPDGLRPRHLKDLIGRDGEENRLLLSLVRFVNLAINGKLPDFVLPVFYGASLIALRKKDGGIRPIAVGLTLRRLVGKIIIRKSMPDIVAMVSPHQLGCGIRGGAEAAVHATRAFVDHNKSAPEKVLVKLDFKNAFNTLRRDHLLKAVRTYLPQLYPLVYQMYRLPSKLIWQGEFIESCSGVQQGDPCGPALFCIAIHELQTRLTSELRPWFLDDGTLAGDVSAVQRDIALVKDFEAVSGLKLNDAKCEIFFPFQQDPQLGPMLQMVRDLLPAARLIPDNEFELLGAPILTESIGLSLAKKGSDLVRWCSRLRLLDAHPALYLLRASLSTPRLMYLLRCSRAYAEPELLQSFDETLRSTLQGILNVQLRQTSWLQASLPTSAGGMGIRMASQVALSAHLGSLKDTETLVSGITPPDAYTSFIAQLEQARRYYAEKWGPLPERISQSTLDLQVVKSIQERLMTQANNVKEQARLKAVIDPMSGKWLQAIPSPQLGTMLDNTTLRIVSGLRLGESVCFAHNCARCDLPVSSTGEHALACKRSAGRFSRHSALIDVIHRAMQSAHIPAVKEPVGLSANSQLRPDGLTPVPWSEGRCLVYDVTVSCTLAASYARHTSREVGAAAHLAEDRKLAKYRELEQNFIVQPIAFETLGPMGKITRSFLAELGSRVAASTGDRRSWQFLLQRISVEIQRGNAASIIGSLPTGKGLPFLP

SEQ ID NO: 621 - protein, 947 aa, Dermanyssus gallinae
MMSQQDIRRWAVPSVSSMESNGLSRSTRDALHASSVTSTPAQVSLQDVILETSKIKSASKMISCLPRGIRDSMSSELATLINEVCLTASRDSYKRLLQFPTAVFCIPSQKERGRTLTSVLRENLNRFRAGNGPETNPYGSSLSSRQESSSRNNSAMIRVVQGKLALGDVSSAARVLLSTDTVPPLSAETKVALLGKHPPTPPDLSFSPPPVSAGETHEITVSAMDVINAIRSFANSSGGGPDGLRPRHLKDLIGRDGEENRLLLSLVRFVNLAINGKLPDFVLPVFYGASLIALRKKDGGIRPIAVGLTLRRLVGKIITRKSMPDIVAMVSPHQLGCGIRGGAEAAVHATRAFVDHNRSAPEKVLVKLDFKNAFNTLRRDHLLKAVRTHLPQLYPLVYQMYRLPSKLIWQGEFIESCSGVQQGDPCGPALFCIAIHELQTRLTSELRPWFLDDGTLAGDVSAVQRDIAQVKDFEAVSGLKLNDAKCEIFFPFQQDPQLGSMLQMVRDLLPAARLIPDNEFELLGAPILTESIGLSLAKKGSDLVRWCSRLRLLDAHPALYLLRASLSTPRLMYLLRCSQAYAEPELLQSFDETLRSTLQGILNVQLRQTSWLQASLPTSAGGMGIRMASQVALSAHLGSLKNTETLVSGITPPDAYTSFIAQLEQARRYYAEKWGPLPERISQSTLDLQVVKSIQERLMTQANNVKEQARLKAVIDPMSGKWLQAIPSPQLGTMLDNTTLRIVSGLRLGESVCFAHNCARCDLPVSSTGEHALACKRSAGRFSRHSALIDVIHRAMQFAHIPAVKEPVGLSANSQLRPDGLTLVPWSEGRCLVYDVTVSCTLAASYARHTSREVGAAAHLAEDRKLAKYRELEQNFIVQPIAFETLGPMGKITRSFLAELGSRVAASTGDRRSWQFLVQRISVEIQRGNAASIIGSLPTGKGLPFLP

SEQ ID NO: 622 - protein, 947 aa, Dermanyssus gallinae
MTSQQDIRRWAVPTVSGRASNGPNLPTRDVPQASSTASTPAQSSLHDVILMTSKIKSASKMISCVPRGIRDQMSLELATLINEVCSTASRDSYKRLLQFPTAVFCIPSQKERGRTLTSVLRENLNRFRAGHGSETNPYASTLLSRQEFSSHNNSGMVRVVQGKLALGDVSSAARVLLSTDSVTPLSAETRLALLDKHPPSPPDLSFSPPPASAGETHEITVSATNVFNAIRSFPNSSGGGPDGLRPRHLKDLIGRDGEENRLLLSLVRFVNLAINGKLPDFALPVFYGASLIALRKKNGGIRPIAVGLTLRRLVGKIIIRKSMPDIVAMVSPHQLGCGIRGGAEAAVHATRAFVDHNRSAPNKVLVKLDFKNAFNMLRRDHLLKAVRTHLPRLYPLVYQMYRLPSKLIWQGEFIESCSGVQQGDPCGPALFCIAIHELQVRLSSALRPWFLDDGTLAGDAWAVQRDIAQVIEFEAVSGLKLNDSKCEIFFPFQRAPRLGSMLQMVRNLLPAARLIADHELELLGAPILDDSIGVSLTKKGSDLVRWCSRLRLLDAHPALFLLRVSLSTPRLMYLLRCSRAYAEPDLLQSFDETLRSTLQGILNVQLRQTSWLQASLPTSAGGMGIRMASQIAISAYLGSLKDTETLVSAIAPPDAYTSFIAQSEQACRFYAEKWGPLPERISQSALDLQVVKSIQERLMVQANNVKEQARLRAVIDPMSGKWLQAIPSPQLGTMLDNTTLRIVSGLRLGESVCFAHNCARCDLPVSSTGEHALACKRSAGRFSRHSALIDVIHRAMQSAHIPAVKEPVGLSANSQLRPDGLTLVPWNEGRCLVYDVTVSCTLAASYARHTSREVGAAARLAEDRKLAKYRELEQNFIVQPIAFETLGPMGKITKSFLTELGSRVAASTGDRRAWQFLLQRISVEIQRGNAASKIGSLPTGNGLPFPL

SEQ ID NO: 623 - protein, 910 aa, Dermanyssus gallinae
MTSQQDIRRWAVPTVSGRASNGPNLPTRDVPQASSTASTPAQSSLHDVILMTSKIKSASKMISCVPRGIRDQMSLELATLINEVCSTASRDSYKRLLQFPTAVFCIPSQKERGRTLTSVLRENLNRFRAGNGSETNPYASTLLSRQEFSSHNNSGMVRVVQGKLALGDVSSAARVLLSTDSVAPLSAETRLALLDKHPPSPPDLSFSPPPASAGEAHEITVSATDVFNAIRSFPNSSGGGPDGLRPRHLKDLIGRDGEENRLLLSLVRFVNLAINGKLPDFALPVFYGASLIALRKKDGGIRPIAVGLTLRRLVGKIIIRKSMPDIVAMVSPHQLGCGIRGGAEAAVHATRAFVDHNRSAPNKVLVKLDFKNAFNMLRRDHLLKAVRTHLPRLYPLVYQMYRLPSKLIWQGEFIESCSGVQQGDPCGPALFCIAIHELQVRLSSELRPWFLDDGTLAGDASAVQRDIAQVIEFEAVSGLKLNDSKCEIFFPFQRAPRLGSMLQMVRNLLPAARLIADHELELLGAPILDDSIGVSLTKKGSDLVRWCSRLRLLDAHPALFLLRVSLSTPRLMYLLRCSRAYAEPDLLQSFDETLRSTLQGILNVQLRQTSWLQASLPTSAGGMGIRMASQIAISAYLGSLKDTETLVSGIAPPDAYTSFIAQSEQACRFYAEKWGPLPERISQSALDLQVVKSIQERLMVQANNVKEQARLRAVIDPMSGKWLQAIPSPQLGTMLDNTTLRIVSGLRLGESVCFAHNCARCDLPVSSTGEHALACKRSAGRFSRHSALIDVIHRAMQSAHIPAVKEPVGLSANSQLRPDGLTLVPWNEGRCLVYDVTVSCTLAASYARHTSREVGAAARLAEDRKLAKYRELEQNFIVQPIAFETLGPMGKITKSFLTELGSRVAGVNRR

SEQ ID NO: 624 - protein, 947 aa, Dermanyssus gallinae
MMSQQDIRRWAVPSVNSMESNGLSRSTRDALHASSVTSTPAQVSLQDVILETSKIKSASKMISCLPRGIRDSMSSELATLINEVCSTASRDSYKRLLQFPTAVFCIPSQKERGRTLTSVLRENLNRFRAGNGPETNPYGSSLSSRQESSSRNNSAMIRVVQGKLALGDVSSAARVLLSTDTVAPLSAETKLALLGKHPPTPPDLSFSPPPVSAGETHEITVSAMDVINAIRSFANSSGGGPDGLRPRHLKDLIGRDGEENRLLLSLVRFVNLAINGKLPDFVLPVFYGASLIALRKKDGGIRPIAVGLTLRRLVGKIITRKSMPVIVAMVSPHQLGCGIRGGAEAAVHATRAFVDHNRSAPEKVLVKLDFKNAFNTLRRDHLLKAVRTHLPQLYPLVYQMYRLPSKLIWQGEFIESCSGVQQGDPCGPALFCIAIHELQTRLTSELRPWFLDDGTLAGDVSAVQRDIAQVKDFEAVSGLKLNDAKCEIFFPFQQDPQLGSMLQMVRDLLPAARLIPDNEFELLGAPILTESIGLSLAKKGSDLVRWCSRLRLLDAHPALYLLRASLSTPRLMYLLRCSQAYAEPELLQSFDETLRSTLQGILNVQLRQTSWLQASLPTSAGGMGIRMASQVALSAHLGSLKNTETLVSGITPPDAYTSFIAQLEQARRYYAEMWGPLPERISQSTLDLQVVKSIQERLMTQANNVKEQARLKAVIDPMSGKWLQAIPSPQLGTMLDNTTLRIVSGLRLGESVCFAHNCARCDLPVSSTGEHALACKRSAGRFSRHSALIDVIHRAMQSAHIPAVKEPVGLSANSQLRPDGLTLVPWSEGRCLVYDVTVSCTLAASYARHTSREVGAAAHLAEDRKLAKYRELEQNFIVQPIAFETLGPMGKITRSFLAELGSRVAASTGDRRSWQFLLQRISVEIQRGNAASIIGSLPTGKGLPFLP

SEQ ID NO: 625 - protein, 945 aa, Dermanyssus gallinae
MTSQQDIRRWAVPTVSGRASNGPNLPTRDVPQASSTASTPAQSSLHDVILMTSKIKSASKMISCVPRGIRDQMYLELATLINEVCSTASRDSYKRLLQFPTAVFCIPSQKERGRTLTSVLRENLNRFRAGHGSETNPYALTLLSRQEFSSHNNSGMVRVVQGKLALGDVSSAARVLLSTDSVAPLSAETRLALLDKHPPSPPDLSFSPPPASAGEAYEITVSATDVFNAIRSFPNSSGGGPDGLRPRHLKDLIGRDGEENRLLLSLVRFVNLAINGKLPNFALPVFYGASLIALRKKDGGIRPIAVGLTLRRLVGKIIIRKSMPDIVAMVSPHQLGCGIRGGAEAAVHATRAFVDHNRSAPNKVLVKLDFKNAFNMLRRDHLLKAVRTHLPRLYPLVYQMYRLPSKLIWQGEFIESCSGVQQGDPCGPALFCIAIHELQVRLSSELRPWFLDDGTLAGDASAVQRDIAQVIEFEAVSGLKLNDSKCEIFFPFQRAPRLGSMLQMVRNLLPAARLIADHELELLGAPILDDSIGVSLTKKGSVRWCSRLRLLDAHPALFLLRVSLSTPRLMYLLRCSRAYAEPDLLQSFDETLRSTLQGILNVQLRQTSWLQASLPTSAGGMGIRMASQIAISAYLGSLKDTETLVSAITPPDAYTSFIAQSKQACRFYAEKWGPLPERISQSALDLQVVKSIQERLMVQANNVKEQARLRAVIDPMSGKWLQAIPSPQLGTMLDNTTLRIVSGLRLGESVCFAHNCARCDLPVSSTGEHALACKRSAGRFSRHSALIDVIHRAMQSAHIPAVKEPVGLSANSQLRPDGLTLVPWNEGRCLVYDVTVSCTLAASYARHTSREVGAAARLAEDRKLAKYRELEQNFIVQPIAFETLGPMGKITKSFLTELGSRVAASTGDRRAWQFLLQRISVEIQRGNAASIIGSLPTGNGLPFPL

SEQ ID NO: 626 - protein, 945 aa, Dermanyssus gallinae
MTSQQDIRRWAVPTVSGRASNGPNLPTRDVPQASSTASTPAQSSLHDVILMTSKIKSASKMISCVPRGIRDHMSLELATLINEVCSTASRDSYKRLLQFPTAVFCIPSQKERGRTLTSVLRENLNRFRAGNGSENNPYASTLLSRQEFSSHNNSGMVRVVQGKLALGDVFSAARVLLSTDSVAPLSAETRLVLLDKHPPSPPDLSFSPPPASAGEAHEITVSATDVFNAIRSFPNSSGGGPDGLRPRHLKDLIGRDGEENRLLLSLVRFVNLAINGKLPDFALPVFYGASLIALRKKDGGIRPIAVGLTLRRLVGKIIIRKSMPDIVAMVSPHQLGCGIRGGAEAAVHATRAFVDHNRSAPNKVLVKLDFKNAFNMLMRDHLLKAVRTHLPRLYPLVYQMYRLPSKLIWQGEFIESCSGVQQGDPCGPALFCIAIHELQVRLSSELRPWFLDDGTLAGDASAVQRDIAQVIEFEAVSGLKLNDSKCEIFFPFQRAPRLGSMLQMVRNLLPAARLIADHELELLGASILDDSIGVSLTKKGSDLVRWCSRLRLLDAHPALFLLRVSLSTPRLMYLLRCSRAYAEPDLLQSLDETLRSTLQGILKLRQTSWLQASLPTSAGGMRIRMASQIAISAYLGSLKDTETLVSGIAPPDAYTSFIAQSEQACRFYAEKWGPLPERISQSALDLQVVKSIQERLMVQANNVKEQARLRTVIDPMSGKWLQAIPSPQLRTMLDNTTLRIVSGLRLGESVCFAHNCARCDLPVSSTGEHALACKKSAGRFSRHSALIDVIHRAMQSAHIPAVKEPVGLSANSQLRPDGLTLVPWNEGRCLVYDVTVSCTLAASYARHTSREVGAAARLAEDRKLAKYRELEQNFIVQPIAFETLGPMGKITKSFLTELGSRVAASTGDRRAWQFLLQRISVEIQRGNAASIIGSLLTGNGLPFPL

SEQ ID NO: 627 - protein, 949 aa, Dermanyssus gallinae
MTSQQDIRRWAVPTVSSRASNGPNLLTRDATHASSTASTPAQASLHDVILMTSKIKSASKMISCVPRGIRDNLSLELATLINEVCSTASRECYKRLLQFPTAVFCIPSQKERGRTLTSVLRENLNRFRAGNGSETNPYASTLLSRQECSSHNNSGMVRVVQGCKNAVALGDVSSAARVLLSTDSVAPLSAETRLALLDKHPPSPPDLSFSPPPPSAGEAHEITVSASDVFNAIRSFPNSSGGGPDGLRPRHLKDLIGRDGEENRLLLSLVRFVNLAINGKLPDFALPVFYGASLIALRKKDGGIRPIAVGLTLRRLVGKIIIRKSMPDIVAMVSPHQLGCGIRGGAEAAVHATRAFVDHNRSAPNKVLVKLDFKNAFNMLRRDHLLKAVRTHLPRLYPLVYQMYRLPSKLIWQGEFIESCSGVQQGDPCGPALFCIAIHELQVRLSSELRPWFLDDGTLAGDASAVQRDIVQVIEFEAVSGLKLNDAKCEIFFPFQRAPRLGSMLQMVRNLLPAARLIADHELELLGAPILDDSIGVSLTKKGSDLVRWCSRLRLLDAHPALFLLRVSLSTPRLMYLLRCSRAYAEPDLLQSFDETLRSTLQGILNVQLRQTSWLQASLPPSAGGMGIRMASQIAISAYLGSLKDTETLVSGIAPPDAYTSFIAQSEQACRFYAEKWGPLPERISQSALDLQVVKSIQERLMVQANNVKEQARLRAVIDPMSGKWLQAIPSPQLGTMRNTTLRIVSGLRLGESVCFAHNCARCDLPVSSTGEHALACKRSAGRFSRHSALIDVIHRAMQSAHIPAVKEPVGLSANSQLRPDGLTLVPWNEGRCLVYDVTVSCTLAASYARHTSREVGAAARLAEDRKLAKYRELEQNFIVQPIAFETLGPIGKITKSFLTELGSRVAASTGDRRAWQFLLQRVSVEIQRGNAASIIGSLPTGNGLLFPL

SEQ ID NO: 628 - protein, 904 aa, Dermanyssus gallinae
MTSQQDIRRWAVPTVSGRASNGPNLPTRDVPRASSTASTPQSSLHDVILMTSKIKSASKMISCVPRGIRDQMSLELATLINEVCSTASRDSYKRLLQFPTAVFCIPSQKERGRTLTSVLRENLNRFRAGNGSETNPYASTLLSRQEFSSHKNSGMVRVVQGKLALGDVSSAARVLLSTDSVAPLSAETRLALLDKHPPSPPDLSFSPPPASAGEAHEITVSATDVFNAIRSFPNSSGGGPDGLRPRHLKDLIGRDGEENRLLLSLVRFVNLAINGKLPDFALPVFYGASLIALRKKDGGIRPIAVGLTLRRLVGKIIIRKSMPDIVAMVSPHQLGCGIRGGAEAAVHATRAFVDHNRSAPNKVLVKLDFKNAFNMLRRDHLLKAVRTHLPRLYPLVYQMYRLPSKLIWQGEFIESCSGVQQGDPCGPALFCIAIHELQVCLSSELRPWFLDDGTLAGDASTVQRDIAQVIEFEAVSGLKLNDSKCEIFFPFQRTPRLGSMLQMVRNLLPAARLIADHELELLGAPILDDSIGVSLTKKGSDLVRWCSRLRLLDAHPALFLLQLRQTSWLQASLPTSAGGMGIRMASQIAISAYLGSLKDTETLVSGIAPPDAYTSFIAQSEQACRFYAEKWGPLPERISQSALDLQVVKSIQERLMVQANNVKEQARLRAVIDPMSGKWLQAIPSPQLGTMLDNTTLRIVSGLRLGESVCFAHNCARCDLPVSSTGEHALACKRSAGRFSRHSALIDVIHRAMQSAHIPAVKEPVGLSANSQLRPDGLTLVPWNEGRCLVYDVTVSCTLAASYARHTSREVGAAARLAEDRKLAKYRELEQNFIVQPIAFETLGPMGKITKSFLTELGSRVAASTGDRRAWQFLLQRISVEIQRGNAASIIGSLPTGNGLPFPL

SEQ ID NO: 629 - protein, 900 aa, Dermanyssus gallinae
MRVVPRAVRPLVAELLCDVLDLVAANNDLPSWESLLSFAYVVLQLPLRTLSSISLAATVRSNLRAFRDGWRFEYRVGGIRRARTNPCDSPEDSARRVSSKLSEGDVSGAARLLCSTDSFASGDGVLASLATKHPPVPPHLAFPVPPDSMSQHQTSVDDVLGAVAGFPASSSAGPDGLRPRHLKDLLSPGIGPVARRLAASLARVMNVLRWGRLPAEVRAIVFGANLFALRKKDASIRPIACSLTLRRIAAKIACREAKELIMEQLGPHQVGFGMAGGTETVVHAARAFMQSSPPGTALLKLDFRNAFNTIRRDHLLRAVQDTVPELFTLVEHAYKEPSVLLFGAETLFSASGIQQGDPLGPALFSLGIRELVNSVKVPFNAWYLDDGTLGGPMVDLLDEVRRVLAFEAVSGLVLNTAKCEVFAPETDPDDPSLRALLELLPGCRVVTDHELNLLGAPVLPSALPGQLDPLMDRLWAMQERLPLVGARQGLYLLRSSFSACRIVHILRSIDCSGDLNHLLQPFDDQVVEALQTVLSLNLRPREVRQAALPTSMGGLGLPSARSLAGPAVAASMHATSDNVQRLLPPAAQAMFEAARDDIATGLQASSPGPDRLACQRAWAEKAHEASLSSLLEECRDDQDKARLLAVARPGASDWLHALPADSLGTRLDDQFTRICVGLRLGADLVEPHRCSCGEPVGRLARHGLSCAHAAGRRPRHTALNEMLARSLRRAGIPCVLEPPGLSRDDGKRPDGMTLIPFYKGRSLVWDATVTDSLTPSLVGPGASPPGTAVTRAETSKMRKYADLSRAHHFSPFAFETMGGPGPLTVTLISRVGDALQQATMDKRAHAFFSQRLSLEIQRGNATSVLGTMRDWMDPDLRARGRAGLLTGMSDRATTARRRSN

SEQ ID NO: 630 - protein, 945 aa, Dermanyssus gallinae
MSPEPTQSPGAAPHPPRLSVSIAGNPPVRVTCPRCGRDFTRRGLPIHQARCRPTSTTPESSSTASSTPALPSQPRQSLVDRLILASQQSRVMRVVPRAVRPLVAESLCDVLDLVAANNEVPSWESLLSFAYVVLQLPPRTSSSTSLAATVRSNLRAFRDGWRFEFRVGGVKRVTSDACDSPEDSLASKHPPAPSDSVFPDPPDSMTQRHSSVDDVLGAVASFPASSSAGPDALRPRHLKDLLAPVLGPVARRLAAALVRVVHVLRWGTLPTEVSEIIFGAKLFALRKKDSSIRPIACSLTIRRIAAKIACREAKDLIIEQLGPHQLGFGLAGGAEAAVHAARAFVQSSPPRKALLKLDFRNAFNTIRRDHILRAVRDAVPEIFNLVNHAYREPSVLLFGAHTLSSASGIQQGDPLGPALFSLGICELVNSIQVPFNAWYLDDGTLGGPMEDLLEEVRRILAFETVSGLALNTAKCEVFAPGTDPDDPTLSALLALLPGCTVVSEHEVTLLGAPLLPSALSSLHDPMMDRLWAMQISLPLVGAHQGLYLLRSSFSACRIVHIIRSMDCSGTVNQLLQPFDDQVVEALETVLGLNLRPREVRQAALPTSMGGLGLPSARSLAGPAVAASMHATLGHVQRLLPPGAWALFEATRDAIAAGLQASPPDMNRLACQRAWAEKVHEYSLTELLEECGDNQDRARLLAIARPGASDWLHALPADSLGTRLDDQSTRICVDLRLGADLVEPHRCTCGEPVGRLARHGLSCAHSAGRRPRHTALNDILARSLRKAGIPCVLEPPGLSRDDGKRPDGLTLIPFYKGRSLVWDATVTDSLTPSLVGPGASRPGTAASRAETSKTRKYANVGRAYHFSPFAFETLGGPGPLTTTLISQVGDALQQATMDKRAGTFFCQRLSLEIQRGNAISVLGTMKDWMDPRLRVRGRARLPLGHE

SEQ ID NO: 631 - protein, 1433 aa, Dermanyssus gallinae
MDGDADADGESSGSRGYPLELASATPTSSAALAALSAMAVDGCRTMRSRLELLSDAPTPDVRCTSPATSATVYGASDAAVRPIEQPRPADNDTTTAETVATETASGVSAAQKPAVKRARAASDTEDSSNSAGVSRSAGDTANDDGFVTIMNKKSARRVLKAEAELSRFRESVDSGAGPIYTVRFLPQDLSALPPEAPNKQQQSQRPEFSAEQLLKVFKALHDLVPAATLGGGPKGITATVPTISAASELVSLKVLGGVTVVGLCSSMDQFWGVIKDVNPAFSDECLLSELASYGAVKIRRDTRPGWKDKQNIRVPSSRIHVLFKRTPPSKVFIVWRDHDVTVEASSSIVCFNCQRTGHTATRCTRARACRRCDAHDHLAASCRNRARCVDCRGPHPRGDSSCPVFALAREKSKALLGSRMLQHAQLSAPVATLVTAPDPVLPGPRESAPGTYAAAVRRLDPGSASYPPPQSAPVADNPSIRVTGPRCGRDFTRRGLPIHQARCRSTSATAAPSPTVSSAPTLPSQPRQPLVDRLSIAIQQSRVMRVVPRAVRPLVAELLCDVLDLVAANNDLPSWESLLSFAHVVLQLPLRTLSSISLAATVRSNLRAFRDGWRFEYRVGGIRRARTDPCDSPENSARRVSSKLSEGDVSGAARLLCSTDSFASGDGVLASLATKHPPAPPHLAFPAPPDSMSQHQTSVDDVLGAVAGFPASSSAGPDGLRPRHLTDLLSPGIGPVAGRLAASLARVMNVLRWGRLPAEVRAIVFGANLFALRKKDASIRPIACSLTLRRIAAKIACREAKELIMEQLGPHQLGFGMAGGTETVVHAARAFMQSSPPGTALLKLDFRNAFNTIRRDHLLRAVRDTVPELFTLVEHAYKEPSVLLFGAETLFSASGIQQGDPLGPALFSLGIRELVNSVQVPFNAWYLDDGTLGGPMVDLLDEVRRVLAFEAVSDLVLNTAKCEVFAPGTDPNDPSLRALLELLPGCRVVADHEINLLGAPVLPSALPGQLDPLMDRLWAMQERLPLVGAHQGLYLLRSSFSACRIVHILRSIDCSGDLNHLLQPFDDQVVEALQTVLSLNLRPREVRQAALPTSMGGLGLPSARSLAGPAVAASMHATSDNVQRLLPPAAQAMFEAARDDIATGLQASSPGPDRLASQRAWAEKAHEASLSSLLEECRDDQDKARLLAVARPGASDWLHALPADSLGTRLDDQSTRICVGLRLGADLVEPHRCSCGEPVGRLARHGLSCAHAAGRRLRHTALNEMLARSLRRAGIPCVLEPPGLSRDDGKRPNGMTLIPFYKGRSLVWDATVTDSLTPSLVGPGASRPGTAVTRAETSKMRKYADLSRAHHFSPFAFETMGGPVPLTVTLNSRVGDALRQATMDKRAHAFFSQRLSLEIQRGNATSVLGTMRDWMDPDLRARGRTGLPHGHER

SEQ ID NO: 632 - protein, 914 aa, Dermanyssus gallinae
MMNPEPTQSPGAAPHPPRLSVSIAGNPPVKVTCPRCSRDFTRRGLPIHQARCRPTSTTPESSSTASSTPALPSQPRQSLDDRLILASQQSRVMRVVPRAVRPSVAESLCDVLDLVAANNDVPSWESLLSFDYVVFQLPPRSSSSTSLAATVRSNLRALRDGWRFEFRVGGVRRVTSDACDSPEDSARRVSSKLSEGDVSGAARLLCSTDSFVSGDEVLTSLAAKHPPAPSDSVFPDPPDSMTQRHSSVDDVLGAVASFPASSSAGPDALRPRHLKDPLAPVLGPVARRLAAALARVVDVLRWGTLPTEVRQIIFGAKQFALRKKDSSIHPIACSLTIRRIAAKMACREAKDIIIEQLGPHQLGFGLAGGAETAVHAARAFVQSSPPRTALLKLDFCNAFNTIRRDHILSAVRDAVPEIFNLVNHSYREPSVLLFGAHTLSSASGILQGDPLGPALFSLGIRELVNLIQVPFNAWYLDDGTLGGPIEDLLEEVRRILAFETVSGLVLNTAKCDVFAPGTDPDDPTLSALLALPPGCRVVSEHEVTLLGARLLPSALSSLLDPMMDRLWAMQERLPLVGAHQGLYLLRLSFSACRIVHIIRSMDCSGTVNQLLQPFDDQVVEALETVLGLNLQPREVRQAALPTSMGGLSRPSARSLAGPAVAASMHATSGHVQRLLPPGAWALFEATRDAIAAGLQASPPDMNRLACQRAWAEKVHESSLTELLEECGDDQDRACLLAVARPGASDWLQALPADSLGTRLYDQSTRICVGLRLGADLVEPHRCTCGEPVGRLARHGLSCAHSAGRRPRHTALNDILAKSLRKAGIPCVLEPPGLSRDDGKRPDGLTLIPFYKGRSLVWDATVTDSLTPSLVGPGASRPGTAASRAETSKTRKYANLGRAYHFSPSHSRRWVALGP

SEQ ID NO: 633 - protein, 942 aa, Dermanyssus gallinae
MTDPGSASYPPPQSAPVADNPSIRVTCPRCGRDFTRRGLPIHQARCRSTSATAAPSPTVSSAPTLPSQPRQPLVDRLSIAIQQSRVMRVVPRAVRPLVAELLCDVLDLVAANNDLPSWESLLSFAYVVLQLPLRTLSSISLAATVRSNLRAFRDGWRFEYRVGGIRRARTDPCDSPKDSARRVSSKLSEGDVSGAARLLCSTDSFASGDGVLASLATKHPPAPPHLAFPAPPDSMSQHQTSVDDVLGAVAGFPASSSAGPDGLRPRHLKDLLSPGIGPVAGRLAASLARVMNVLTWGRLPAEVRAIVFGANLFALRKKDASIRPIACSLTLRRIAAKIACREAKELIMEQLGPHQLGFGMAGGTETVVHAARAFMQSSPPGTALLKLDFRNAFNTIRRDHLLRAVRDTVPELFTLVEHAYKEPSVLLFGAETLFSASGIQQGDPLGPALFSLGIRELVNSVQVPFNAWYLDDGTLGGPMVDLLDEVRRVLAFEAVSGLVLNTAKCEVFAPGTDPDDPSLRALLELLPGCRVVADHEINLLGAPVLPSALPGQLDPLMDRLWAMQERLPLVGAHQGLYLLRSSFSACRIVHILRSIDCSGDLNHLLQPFDDQVVEALQTVLSLNLRPREVRQAALPTSMGGLGLPSARSLAGPAVAASMHATSDNVQRLLPPAAQAMFEAARDDIATGLQASSPGPDRLACQRAWAEKAHEASLSSLLEECRDDQDKARLLAVARPGASDWLHALPADSLGTRLDDQSTRICVGLRLGADLVEPHRCSCGEPVGRLARHGLSCAHAAGRRPRHTALNEMLARSLRRAGIPCVLEPPGLSRDDGKRPDGMTLIPFYKGRSLVWDATVTDSLTPSLVGPGASRPGTAVMRAETSKMRKYADLSRAHYFSPFAFETMGGPGPLTVTLISRVGDALRQATMDKRAHAFFSQRLSLEI

SEQ ID NO: 634 - protein, 976 aa, Dermanyssus gallinae
MTDPGSASYPPPQSASVADNPSIRVTCPRCGRDFTRRGLPIHQARCRFTSATAAPSPTVSSAPTLPSQPRQPLVDRLSIAIQQSRVMRVVPRAVRPLVAELLCDVLDLVAANNDLSSWESLLSFAYVVLQLPLRTLSSISLAATVRSNLRAFRDGWRFEYRVGGIRRARTDPCDSPEDSARRVSSKQSEGDVSGAARLLCSTDSFASKDGVLASLATKHPPAPPHLAFPAPPDSMSQHQTSVDDVLGAVAGFPASSSAGPDGLRPRHLKDLLSPGIGPVAGRLAASLASVMNVLRWGRLPAEVRAIVFGANLFALRKKDASIRPIACSLTLRRIAAKIACREAKELIMEQLGPHQLGFGMAGGTETVVHAARAFMQSSPPSTALLKLDFRNAFNTIRGDHLLRAVRDTVPELFTLVEHAYKEPSVLLFGAETLFSASGIQQGDPLGPALFSLGIRELVNSVQVPFNAWYLDDGTLGGPMVDLLDEVRRVLAFEAVSGLVLNTAKCEVFAPGTDPDDPSLRAWIELLPGCRVVADHEINLLGAPVLPSALPGQLDPLMDRLWAMQEGLPLVGAHQGLYLLRSSFSACRIVHILRSIDCSGDLNHLLQPFDDQVVEALQTVLSLNLRPREVRQAALPTSMGGLGLPSARSLAGPAVAASMHATSDNVQRLLPPAAQAMFEAARDDIATGLQASSPGPDRLACQRAWAEKAHKASLSSLLEECRDDQDKARLLAVARPGASDWLHALPADSLGTRLDDQSTRICVGLRLGADLVEPHRCSCGEPVGRLARHGLSCAHAAGRRPRHTALNEMLARSLRRAGIPCVLEPPGLSRDDGKRPDGMTLIPFYKGRSLVWDATVTDSLTPSLVGPGASRPGTAVTRAETSKMRKYADLSRAHHFSPFAFETMGGPGPLTVTLISRVGDALRQATMDKRAHAFFSQRLSLEIQRGNAISVLGTMRDWMDPDFRARGRAGLPHGHER

SEQ ID NO: 635 - protein, 975 aa, Dermanyssus gallinae
MTDPGSASYPPPQSAPVADNPSIRVTCPRCGRDFTRRGLPIHQARCRSTSATAAPSPTVSSAPTLPSQPRQPLVDRLSIAIQQSRVMRVVPRAVRPLVAELLCDVLDLVAANNDLPSWESLLSFAYVVLQLPLRTLSSIALAATVRSNLRAFRNGWRFEYRVGGIRRARTDPCDSPEDSARRVSSKLSEGDVSGAARLLCSTDSFASGDGVLASLATKHPPAPPHLAFPAPPDSMSQHQTSVDNVLGAVAGFPASSSAGPDGLRPRHLKDLLSPGIGPVAGRLAASIAKVMNVLRWGRLPAEVRAIVFGGNLFALRKKDASIRPIACSLTLRRIAAEIACEAKELIMEQLGPHQLGFGMAGGTETVVHAARAFMQSSPPGTALLKLDFRNAFHTIRRDHLLRAVRDTVPELFTIVEHAYKEPSVLLFGAETLFSASGIQQGDPLGPALFSLGIRELVNSVQVPFNAWYLDDGTLGGLMVDLLDEVRRVLAFEAVSDLVLNTAKCEVFAPGTDPDDPSLRALLELLPGCRVVADHEINLLGAPVLPSALPGQLDPLMDRLWAMQERLPLVGAHQGLYLLRSSFSACRIVHILRPIDCSGDLNHLLQPFDDQVVEALQTVLSLNLRPREVRQAALPTSMGGLGLPSARSLAGPAVAASMHATSDNVQRLLPPAAQAMFEAARDDIATGLQASSPGPDRLACQRAWAEKAHKASLSSLLEECRDDQDKARLLAVARPGASDWLHALPADSLGTRLDDQSTRICVGLRLGADLVEPHRCSCGEPVGRLARHGLSCAHPAGRRPRHTALNEMLARSLRRAGIPCVLEPPGLSRDDGKRPDGMTLIPFYKGRSLVWDATVTDSLTPSLVGPGASRPGTAVTRAETSKMRKYADLSRAHHFSPFAFETMGGPGPLTVTLISRVGDALRQATMDKRAHAFFSQRLSLEIQRGNATSVLGTMRDWMDPDLRARGRAGLPHGHER

SEQ ID NO: 636 - protein, 981 aa, Dermanyssus gallinae
MMNPEPTQSPGAAPHPPRLSVSIAGNPPVRVTCPRCGRDFTRRGLPIHQARCRPTSTTPESSSTASSTPALPSQPRQSLVDRLILASQQSRVMRVVPRAVRPLVAESLCDVLDLVAANNDVPSWESLLLFAYVVFHLPPRTSSSTSLAATVRSNLRAFRDGWRFEFRVGGVRRVTSDACDSPEDSARRVSSKLSEGDVSGAARLLCSTDSFVSGDEVLASLAAKHPPAPSDSVFPDPPDSMTQRHSAVDDVLGAVASFPASSSAGPDALRPRHLKDLLAPVLGPVTRRLAAALARVVDVLRWGTLPTEVREIIFGAKLFAFRKKDSSIRPIACSLTIRRIAAKIACREAKDLIIEQLGPHRLGVGLAGGAEAAVHAARAFVQSSPSRAALLKLDFRNAFNTIRRDHILRAVRDAVPEIFNLVNHAYREPSVLLFGAHTLSSASGIQQGDPLGPALFSLGIRELVNSIQVPFNAWYLDGGTLGGPMEDLLEEVRRILAFETVSGLVLNTAKCEVFAPGTDPDDTTLSALLALLPGCRVVSEHEVTLLGAPLLPSALSSLLDPMMDRLWAMQERLPLVGAHQGLYLLRSSFSACRIVHIIRSMDCSGTVNQLLQPFDDQVVEALETVSGLNLPPREVRQAALPTSMGGLGLPSACSLAGPAVTASMHATSGHVQRLLPPGAWALFEATRDAIAAGLQASPPDMNRLACQRAWAEKVHESSLTELLEECGDDQDRARLFAVARPGASDWLHALPADSLGTRLDDQSTRICVGLRLGAGLVEPHRCTCGEPVGRLARHGLSCAHSAGRRPRHTALNDILARSLRKAGIPCVLEPPGLSRDDGKRPDGLTLIPFDKGRSLVWDATVTDSLTPSLVGPGASRPGTAASRAETSKTRKYANLGRAYHLSPFAFETLGGPGPLTTTLISQVGDALQQATVDKRAGTFFCQRLSLEIQRGNAISVLGTMKDWMDPRLRVRGRARLPLGHE

SEQ ID NO: 637 - protein, 850 aa, Dermanyssus gallinae
MRVVPRAVRPLVAELLCDVLDLVAANNDLPSWELLLSFAYVVLQLPLRTLSSISLAATVRSNLCAFRDGWRFEYRVGGIRRARTDPCDLPEDSARRVSSKLSEGDVSGAARLLCSTDSFASGDGVLASLATKHPPAPPHLAFPAPPDSMTQHQTSVDDVLGTVAGFPASSSAGPDGLRPRHLKDLLSPGIGPVTGRLAASLARVMNVLRWGRLPAEVRAIVFGANLFALRKKDASIRPIACSLTLRRIAAKIACREAKELIMEQLGPHQLGFGMAGGTETAVHAARAFMQSSPPGTALLELDFRNAFNTIRSDHLLRAVRDTVPELFTLVKHAYKKPSVLLFDAETLFSASGIQQGDPLGPALFSLGIRELVNSVQVPFNAWYLDDGTLGGPMVDLLDEVRRVLAFEAVSGLVLNTAKCEVFAPGTDPDDPSLRALLELLPGCRVVADHEINLLGAPVLPSALPRQLELLMDRLWAVQERLPLVGAHQGLYLLRSSFSACHIVHILRSIDCSGDLNHLLQPFNDQVVEALQTVLSLNLQPREMRQAALPTSMGGLGLPSARSLAGPAVAVSMHATSENVQRLLPPAAQAMVEAARDDIATGFQASSPGPDRLACQRAWAEKAHEASLSSLLEECGDDQDKARLLAVARPGASDWLHALPADSLGTRLDDQSTRICVGLSCAHAAGRRPRHTALNEMLARSLRRAGIPCVLEPPGLSRDDGKRPDGMTFIPFYKGRSLVWDATVTDSLTPSLVGPGASRPGTAISRAETSKIRKYADLSRAHHFSPFAFETMGGPGPLTVTLISRVGDALRQATTITLRQGDKRAHAFFSQRLSLEIQRGNATSVLGYIFY

SEQ ID NO: 638 - protein, 852 aa, Dermanyssus gallinae
MRVVPRAVRPLVAESLCDVLDLVAANNDVPSWESLLSFAYVVLQLPPRTSSSTSLAATVRSNLRAFRDGWRFEFRVGGVRRVTSDACDSPEDSARRVSSKLSEGDVSGAARLLCSTDSFVSGDEVLASLAAKHPPAPSDSIFPDPPDSMTQRHSSVDDVLGAVASFPASSSAGPDALRPRHLKDLLAPVLGPVARRLAAALARVVDVLRWGTLPTEVREIIFGAKLFALRKKDSSIRPIACSLTIRRIAAKIACREAKDLITEQLGPHQLGFGLAGGAEAAVHAARAFVQSSPPRTALLKLDFRNAFNTIRRDHILRAVRDAVPEIFNLVNHAYREPSVLLFGAHTLSSASGIQQGDPLGPALFSLGIRELVNSIQVPFNAWYLDDGTLGGPMEDLLEEVRRILAFETVSGLVLNTAKCEVFAPGTDPDDPTLSALLALLPGCRVVSEHEVTLFGAPLLPSALSSLLDPMMDRLWAMQERLPLVGAHQGLYLLRSSFSACRIVHIIRSMDCSGTVNQLLQPFDDQVVEALETVLGLNLRPREVRQAALPTSMGGLGLPSARFLAGPAVAASMHATSGHVQRLLPPGAWALFEATRDAIAAGLQALPPDMNRLACQRAWAGKVHESSLTELLEECGDDQDRARLLAVARPGASDWLHALPADSLGTRLDDQSTRICVGLRLGADLVEPHRCTCGEPVGRLARHGLSCAHSAGRRPRHTALNDILARSLRKAGIPCVLEPPGLSRDDGKRPDGLTLIPFYKGRSLVWDATVTDSLTPSLVGPGASRPGTAASRAETSKTRKYANLGRAYHFSPFAFETHNHANFPGWRRITAGYDGQEGGHFLLPTAFPRDSER

SEQ ID NO: 639 - protein, 981 aa, Dermanyssus gallinae
MMNPEPTQSPGAAPHPPRLSVSIAGNPPVRVTCPRCGRDFTRRGLPIHQARCRPTSTTPESSSTASSTPALPSQPRQSLVDRLILASQQSRVMRVVPRAVRPLVAESLCDVLDLVAANNDVPSWESLLSFAYVVLQLPPRTSSSTSLAATVRSNLRAFRDGWRFEFRVGGVKRVTSDACDSPEDSARRVSSKLSEGDVSGAARLLGSTDSFVSGDEVLASLAAKHPPAPSDSVFPDPPDSMTQRHSSVDDVLGAVASFPASSSAGPDALRPRHLKDLLAPVLGPVARRLAAALARVVDVLRWGTLPTEVREIIFGAKLFALRKKDSSIRPIACSLTIRRIAAKIACREAKDIIIEQLGPHQLGFGLAGGAEAAVHAARAFVQSSPPRTALLKLDFRNAFNTVRRDHILRAVRDAVPEIFNLVNHAYREPSVLLFGAHTLSSASGIQQGDPLGPALFSLGIRELVNSIQVPFNAWYLDDGTLGGPMKDLLEEVRRILAFETVSGLVLNTAKCEVFAPGTDPDDPTLSALLALLPGCRVVSEHEVTLLGAPLLPSALSSLLDPMMDRLWAMQERLPLVGAHQGLYLLRSSFSACRIVHIIRSMDCSGTVNQLLQPFDDQVVEALETVLGLNLRPREVRQAALPTSMGGIGLPSARSLAGPAVAASMHATSGHVQRLLPPGAWALFEATRDAIAAGLQASPPDMNRLACQRAWAEKVHESSLTELLEECGDDQDRARLLAVARPGASDWLHALPADSLGTRLDDQSTRICVGLRLGADLVEPHRCTCGEPVGRLARHGLSCAHSAGRRPRHTALNDILARSLRKAGIPCVLEPPGLSRDDGKRPDGLTLIPFYKGRSLVWDATVTDSLTPSLVGPGASRPGTVASRAETSKTRKYANLGRAYHFSPFAFETLGGPGPLTTTLISQVGDALQQATMDKRAGTFFCQRLSLEIQRGNAISVLGTMKDWMDPRLRVRGRARLPLGHE

SEQ ID NO: 640 - protein, 891 aa, Dermanyssus gallinae
MRVVPRAVRPLVAELLCDVLDLVAANNDLPSWESLLSFAYVVLQLPLRTLSSISLAATVRSNLRTFRDGWRFEYRVGGIRRARTDPCDSPEDSARRVSSKLSERDVSGAARLLLCSTDSFASGDGVLASVATKHPPAPPHLAFPAPPDTMSQHQTSVDDVLGAVAGFPASSSAGPDGLRPRHLKDLLSPGIGRVSGKLAASLARVMNVLRWGRLPAEVRAIVFGANLFALRKKDASIHPIACSLTLRRIAAKIACREAKELIMEQLGPHQLGFGMAGGTETAVHAARAFMQSSPPATALLKLDFRNAFNTIRRDHLLRAVRDTVPELFTLVEHAYKEPSVLLFGAETLFSASGIQQGDPLGPALFSLGIRELVNSVQVPFNAWYLDDGTLGGPMVDLLDEVRRVLAFEAVSGLVLNTAKCEVFAPGTDPDDPSLRALLELLPGCRVVADHEINLLGAPVLPSALPGQLDPLMDRLWAMQERLPLVGAHQGLYLLRSSFSACRIVHILRSIDCSGDLNHLLQPFDDQVVEALQTVLSLNLRPREVRQAALPTSMGGLGLPSARSLAGPAVAASMHATSDNVQRLLPPAAQAMFEAARDDIATGLLASSPGPDRLACQRAWAEKAHEASLSSLLEECRDDQDKTRLLAVAHPGASDWLHALPADSLGTRLDDQSTRICVGLRLGADLVEPHGCSCGEPVGRLARHGLSCAHAAGRRPRQTALNEMLARSLRRAGIPCVLEPLGLSRHDGKRPDGMTLIPFYKGRSLVWDATVTDSLTPSLVGPGATRPGTAVTRAETSKMRKYADQSRAHHFSPFAFETMGGPSPLTVTLISRVGDALRQATMDKRAHAFFSQRLSLEIQRGNATSVLGTMRDWMDPDLRARGRAGLPHGHER

SEQ ID NO: 641 - protein, 890 aa, Dermanyssus gallinae
MRVVPRAVRPLVAELLCDVLDLVAANNDLPSWESLLSFAYVVLQLPLRTLSSISLAAIVRSNLRAFRDGWRFEYRVGGIRRARTDPCDSPEDSARRVSSKLSEGDVSGAARLLCSTDSFASGDGVLASLATKHPPAPPHLAFPAPPGSMSQHQTSVDDVLGAVAGFPASSSAGPDGLRPRHLKDLLSPGIGPVAGRLAASLAKVMNVLRWGRLPAEVRAIVFGANLFALRKKDASIRPIACSLTLRRIAAKIACREAKELIMEQLGPHQLGFGMAGGTETVVHAARAFMQSSPPGTALLKLDFRNAFNTMRRDHLLRAVRDTVPELFTIVEHAYKEPSVLLFGAETLFSASGIQQGDPLGPALFSLGIRELVNSVQVPFNAWYLDDGTFGGLMVDLLDEVRRVLAFEAVSGLVLNTAKCEVFAPGTDPDDPSLRAMLELLPGCRVVADHEINLLGAPVLPSALPGQLDPLMDRLWAMQERLPLVGAHQGLYLLRSSFSACRIVHILRSIDCSGDLNHLLQPFDDQVVEALQTVLSLNLRPREVRQAALPTSMGGLGLPSARSLAGPAVAASMHATSDNVQRLLPPAAQAMFEAARDDIATGLQASSPGPDRLACQRAWAEKAHEASLSSLLEECRDDQDKARLLAVARPGASDWLHALPADSLGTRLDDQSTRICVGLRLGADLVEPHRCSCGEPVGRLARHGLSCAHAAGRRPRHTALNEMLARSLRRAGIPCVLEPPGLSRDDGKRPDGMTLIPFYKGRSLVWDATVTDSLTPSLVGPGASRPGTAVTLAETSKMRKYADLSRAHHFSPFAFETMGGPGPLTVTLISRVGDVLRQATMDKRAHAFFSQRLSLEIQRGNATSVLGTMRDWMDPDLRARGRAGLPHGHER

SEQ ID NO: 642 - protein, 981 aa, Dermanyssus gallinae
MMNPEPTQSPGAAPHPPRLSVSIAGNPPVRVTCPRCGRDFTRRGLPIHQARCRPTSTTPESSSTASSTPALPSQPRQSLVDRLILASQQSRVMRVVPRAVRPLVAESLCDVLDLVAANNDVPSWESLLSFAYVVLQLPPRTSSSTSLAATVRSNLRAFRDGWRFEFRVGGVRRVTSDACDSPEDSARRVSSKLSEGDVSGAARLLCSTDSFVSGDEVLASLAAKHPPAPSDSIFPDPPDSMTQRHSSVDDVLGAVASFPASSSAGPDALRPRHLKDLLAPVLGPVARRLAAALARVVDVLRWGTLPTEVREIIFGAKLFALRKKDSSIRPIACSLTIRRIAAKIACREAKDLIIEQLGPHQLGFGLAGGAEAAVHAARAFVQSSPPRTALLKLDFRNAFNTIRRDHILRAVRDAVPEIFNLVNHAYREPSVLLFGAHTLSSASGIQQGDPLGPALFSLGIRELVNSIQVPFNAWYLDDGTLGGPMEDLLEEVRRILAFETVSGLVLNTAKCEVFAPGTDPDDPTLSALLALLPGCRVVSEHEVTLLGAPLLPSALSSLLDPMMDRLWAMQERLPLVGAHQGLYLLRSSFSACRIVHIIRSMDCSGTVNQLLQPFDDQVVEALETVLGLNLRPREVRQAALPTSMGGLGLPSARSLAGPAVAASMHATSGHVQRLLPPGAWALFEATRDAIAAGLQASPPDMNRLACQRAWAEKVHESSLTELLEECGDDQDRARLLAVARPGASDWLHALPADSLGTRLDDQSTRICVGLRLGADLVEPHRCTCGEPVGRLARHGLSCAHSAGRRPRHTALNDILARSLRKAGIPCVLEPPGLSRDDGKRPDGLTLIPFYKGRSLVWDATVTDSLTPSLVGPGASRPGTAASRAETSKTRKYANLGRAYHFSPFAFETLGGPGPLTTTLISQVGDALQQATMDKRAGTFFCQRLSLEIQRGNAISVLGTMKDWMDPRLRVRGRARLPLGHE

SEQ ID NO: 643 - protein, 937 aa, Dermanyssus gallinae
MRDFTRRGLPIHQARCRSTVSSAPTLPSQPRQPLVDRLSIAMQQSRVMRVVPRAVRPLVAELLCDVLDLVAANNDLPSWESLLSFAYVVLQLPLRTLSSISLAATVRSNLRAFRDGWRFEYRVGGIRRARTDPCDSPEDSARRVSSKLSEGDVSGAARLLCSTDSFASGDGVLASLATKHPPAPPHLAFPAPPDSMSQHQTSVDDVLGAVAGFPASSSAGPDGLRPRHLKDLLSPGIGPVAGRLAASLARVMNVLRWGRLSAEVRAIVFGANLFALRKKDASIRPIACSLTLRRIAAKIACREAKELIMEQLGPHQLGFGMAGGTETVVHAARAFMQSSPPGTALLKLNFRNAFNTIRRDHLLRAVRDTVPELFTLVEHAYKEPSVLLFGAETLFSALGIQQGDPLGPALFSLGIRELVNSVQVPFNAWYLDDDTLGGPMVDLLDEVRRVLAFEAVSGLVLNTAKCEVFAPGTDPDDPSLRALLELLPGCRVVADHEINLLGAPVLPSALPGQLDPLMDRLWAMQERLPLVGAHQGLYLLRSSFSACRIVHVLRSIDCSGDLNHLLQPFDDQVVEALQTVLSLNLRPREVRQAALPTSMGGLGLPSARSLAGPAVAASMHATSDNVQRLLSPAAQAMFEAARDDIATGLQASSPGPDRLACQRAWAEKAHEASLSSLLEECRDDQDKARLLAVARPGASDWLHALPADSLGTRLDDQSTRICVGLRLGADLVEPHRCSCGEPVGRLARHGLSCAHAAGRRPRHTALNEMLARSLRRAGIPCVLEPPGLSRDDGKRPDGMTLIPFYKDRSLVWDATVTDSLTPSLVGPGASRPGTAVTRAETSKMRKYADLSRAHHFSPFAFETMGGPGPLTVTLISRVRDALRQATMDKRAHAFFSQRLSLEVQRGNATSVLGTMRDWMDPALRARGRAGLPHGHER

SEQ ID NO: 644 - protein, 981 aa, Dermanyssus gallinae
MMNPESTQSPGAAPHPPRLSVSIAGNPPVRVTCPRCGRDFTRRGLPIHQARCRPTSTAPESFSTASSTPALPSQPRQSLVDRLIVASQQPRVMRVVPRAVRPLVAESLCDVLDLVAANNDIPSWESRLSFAYVVLQLPPRTSSSTSLAATVRSNLRAFRDGWRFEFRVGGVRRVTSDACDSPEDSARRVSSKLSEGDVSGAARLLCSTDSFVLGDEVLASLAAKHPLAPSDSIFPDPPDSMTQRHSSVDDVLGAVASFPASSSAGPDALRPRHLKDLLAPVLGPVARRLAAALARVVDVLRWGTLPTEVREIIFGAKLFALRKKDSSIRPIACSLTIRRIAAKIACREAKDLIIEQLGPHQLGFGLAGGAEAAVHAAKAFVQSSPPRTALLKLDFRNAFNTIRRDHILRAVRDAVPEIFNLVNHAYREPSVLLFGAHTLSSASGIQQGDPLGPALFSLGIRELVNSIQVPFNAWYLDDGTLGGPMEDLLEEVRRILAFETVSGLVLNTAKCEVFAPGTDPDDPTLSALLALLPGCRVVSEHEVTLLGAPLLPSALSSLLDPMMDRLWAMQERLPLVGAHQGLYLLRSSFSACRIVHIIRSMDCSGTVNQLLQPFDDQVVEALETVLGLNLRPREVRQAALPTSMGDLGLPSARSLAGPAVAASMHATSGHVQRLLPPGAWALFKATRDAIAAGLQASPPDMNRLACQRAWAEKVHESSLTELLEECGDDQDRARLLAVARPGASDWLHALPADSLGTRLDDQSTRICVGLRLGADLVEPHRCTCGEPVGRLARHGLSCAHSAGRRPRHTALNDILARSLRKAGIPCVLEPPGLSRDDGKRPDGLTLIPFYKGRSLVWDATVTDFLTPSFVGPGASRPGTAASRAETSKTRKYANLGRAYHFSPFAFETLGGPGPLTTTLISQVGDALQQATMDKRAGTFFCQRLSLEIQRGNAISVLGTMKDWMDPRFRVRGRARLPLGHE

SEQ ID NO: 645 - protein, 976 aa, Dermanyssus gallinae
MTDPGSASYPPPQSSPVADNPSIRVTCPRCGRDFTRRGLPIHQARCRFTSATAAPSPTVSSAPTLPSQPRQPLVDRLSIAIQQSRVMRVVPRAVRPLVAELLCDVLDLVAANNDLPSWESLLSFAYVVLQLPLRTLSSISLAATVRSNLRAFRDGWRFEYRVGGIRRARTNPCDSPEDSARRVSSKLSEGDVSGAARLLCSTDSFASGDGVLASLATKHPPAPPHLAFPAPPDSMSQHQTSVDDVLEAVAGFPASSSAGPDGLRPRHLKDLLSPGIEPVAGRLAASLARVMNVLRWGRLPAEVRAIVFGANLFALRKKGASIRPIACSLTLRRIAAKIACREAKELIMEQLGPHQLGFGMAGGTETVVHAAKAFMQSSFPGTALLKLDFRNAFNTIRRDHLLRAVRDTVPELSTLVEHAYKEPSVLLFGAETLFSASGIQQGDPLGPAQFSLGIRELVNSVQVPFNAWYLDDGTLGGPMVDLLDEVRRVLAFEAVSGLVLNTAKCKVFAPGTDPDDPSLRALLELLPGCRVVADHEINLLGTPVLPSALPGQLDPLMDRLWAMQERLPLVGAHQGLYLLRSSFSACRIVHILRSIDCSGNLNHLLQPFDDQVVEALQTVLSLNLRPREVRQTALPTSMGGLGLPSARSLAGPAVAASMHATSDNVQRLLPPAAQAMFEAARDDIATGLQASSPGPDRLACQRAWAEKAHEASLSSLLEECRDDQDKARLLAVARPGASDWLHALPADSLGTRLDDQSTRICVGLRLGADLVEPHRCSCGEPVGRLARHGLSCAHAAGRLPRHTALNEMLARSLRRAGIPCVLEPPGLSRDDGKRPDGMTLIPFYKGRSLVWDATVTDSLTPSLVGPGASCPGTAVTRAETSKMRKYADLSRAHHFSPFAFETMGGPGPLTVTLISRVGDALRQATMDKRAHAFFSQRLSLEIQRGNATSVLGTMRDWMDPDLRARGRAGLPHGHER

SEQ ID NO: 646 - protein, 951 aa, Dermanyssus gallinae
MPFHVCDCRTVSDCRTVSDCRTVSDCRTVSDCILRANTPVAAETAAGRQAQHCDPTIKGDARGFPGGEAFGCRAPLRRPRPTTAAANNDLPSWESLLSFAHVVLQLPLRTLSSIFLAATVRSNLRAFRDGWRFEYRVGGIRRAKTDPCDSPEDSARRVSSKLSEGDVSGAARLLCSTDSFASGDGVLASLATKHPPAPPHLAFPAPPDSMSQHQTSVDDVLGALAGFPASSSAGPDGLRPRHLKDLLSPGIGPVAGRLAASLARVVNVLRWGRLPAEVRAVVFGANLFALRKKDASIRPIACSLTLRRIAAKIACREAKELIMEQLGPHQLGLGMAGETETVVHAARAFMQSSPPGTALLKLDFRNAFNTIRRDHLLRAVRDTVPELFTLVEHAYKEPSVLLFGAETLFSASGIQQGDPLGPALFSLGIRELVNSVQVPFNAWYLDDGTLGGPMVDLLDEVRRVLAFEAVSGLVLNTAKCEVFAPGTDPNDPSLRALLELLPGCRVVADHEINLLGAPVLPSALPGQLDPLMDRLWAMQEGLPLVGAHQGLYLLRSSFSACRIVHILRSIDCSGDLNHLLQPFDDQVVEALQTVLSLNLRPREVRQAALPTSMGGFGLPSARSLAGPAVAASMHATSDNVQRLLPPAAQAMFEAARDDIATVLQASLPGPDRLACQRAWAEKAHEASLSSLLEECRDDQDMARLLAVARPGASDWLHALPADSLGTRLDDQSTRICVGLRLGADLVEPHRCSCGEPVGRLARHGLSCAHAAGRRPRHTALNEMLARSLRRAGIPCVLEPPGLSRDDGKRPDGMTLIPFYKGRSLVWDATVTDSLTPSLVGPGASRPGTAVTRAETSKMRKYADLSRAHHFSPFAFETMGGPGPLTVTLISRVGDALRQATMDKRAHAFFSQRLSLEIQRGNATSVLGTMRDWMDPDLRARGRTGLPHGHER

SEQ ID NO: 647 - protein, 931 aa, Dermanyssus gallinae
MPFHVCDCRTVSDCILRANTPVAAETAAGRQAQHCDPTIKGDARGSPGGEAFGCRAPLRRPRPCGGQQRPPLVGVAPVIRLCGTSTATSHLVVNLFGSDCPIEPRAFRDGWRFEYRVGGIRRARTDPCDSPEDSARRVSSKLSEGDVSGAARLLCSTDSLASGDGVLASLATKHPPAPPHLAFPAPPDSRSQHQTSVDDVLGAVAGFPASSSAGPDGLRPRHLKDLLSSGIGPVAGRLAASLARVMNVLRWGRLPAEVRAIVFGANLFALRKKDASIRPIACSLTLRRIAAKIACREAKELIMEQLGPHQLGFGMAGGTETVVHAARAFMQSSPPGTALLKLDFRNAFNTIRRDHLLRAVRDTVPELFTLVEHAYKEPSVLLFGAETLFSASGIQQGDPLGPALFSLGIRELVNSVQVPFNAWYLDDGTLGRPMVDLLDEVRRVLAFEAVSGLVLNTAKCEVFAPGTDPDDPSLRALLELLPGCRVVADHEINLLGAPVLPSALPGQLDPLMDRLWAMQERLPLVGAHQGLYLLRSSFSACRIVHILRSIDCSGDLNHLLQPFDDQVVEALQTVLSLNLRPREVRQAALPTSMGGLGLPSARSLAGPAVAASMHATSDNVQRLLPPAAQAMFEAARDDTATGLQASSPGPDRLACQRAWAEKAHEASLSSLLEECRDDQDKARLLAVARPGASDWLHALPADSLGTRLDDQSTRICVGLRLGADLVEPHRCSCGEPVGRLARHGLSCAHAAGRRPKHTALNEMLARSLRRAGIPCVLEPPGLSRDDGKRQDGMTLIPFYKGRSLVWDATVTDSLTPSLVGPGASRPGTAVTRAETSKMRKYADLSRAHHFSPFAFETMGGPGPLTVTLISRVGDALRQATMDKRAHAFFSQRLSLEIQRGDATSVLGTMRDWMDPDLRARGRAGLPHGHER

SEQ ID NO: 648 - protein, 973 aa, Dermanyssus gallinae
MTEPGSASYPPPQSAPVADNPSIRVTCPRCGRDFTRRGLPIHQARCRSTSATAAPSPTVSSAPTLPSQPRQPLVDRLSIAIQQSRVMRVVPRAVVAELLCDVLDLVAANNDLPSWESLLSFAYVVLQLPLRTLSSISLAATVRSNLRAFRDGWRFEYRVGGIRRARTDPCDSPEDSARRVSSKLSEGDVSGAARLLCSTDSFASGDGVLASLATKHPPAPPHLAFPAPPDSMSQHQTSVDDVLGAVAGFPASSSAGPDGLRPRHLKDLLSPGIGPVAGRLATSLARVMNVLRWGRLPAEVRAIVFGANLFALRKKDASSRPIDCSLTLRRIAAKIACREAKELIMEQLGPHQLGFGMAGGTETVVHAARAFMQSSPPGTALLKLDFRNAFNTIRRDHLLRAVRDTVPELFTLVEHAYKEPSVLLFGAETLFSASGIQQGDPLGPALFSLGIRELVNSVQVPFNAWYLDDGTLGGPMVDLLDEVRRVLAFEAVSGLVLNTAKCEVFAPGTDPDDLSLRALLELLPGCRVVADHEINLLGAPVLPSALPGQLDPLMDRLWAMRERLPLVGAHQGLYLLRSSFSACRIVHILRSIDCSGDLNHLLQPFDDQVVEALQTVLSLNLRPREVRQAALPTSMGGLGLPSARSLAGPAVAASMHATSDNVQRLLPPAAQAMFEAARDDIATGLQASLPGPDRLACQRAWAEKAHEASLSSLLEECRDDQDKARLLAVARPGASDWLHALPADSLGTRLDDQSTRICVGLRLGADLVEPHRCSCGEPVGRLTRHGLSCAHAAGWRPRHTALNEMLARSLRRAGIPCVLEPPGLSRDDGKRPDGMTLIPFYKGRSLVWDATVTDSLTPSLVGPGASRPGTAVTRAETSKMRKYADLSRAHHFSPFAFETMGGPGPLTVTLISRVGDALRQATMDKRAHAFFSQRLSLEIQRGNATSVLGTMRDWMDPDLRARGRAGLPHGHER

SEQ ID NO: 649 - protein, 981 aa, Dermanyssus gallinae
MMNPEPTQSPGAAPHPPRLSVSIAGDPPVRVTCPRCGRDFTCRGLPIHQARCRPTSTTPESSSTASSTPALPSQPRQSLVDRLILASQQSRVMRVVPRAVRPLVAESLCDVLDLVSANNDVPSWESLLSFAYVVLQLPPRTSSSTSLAATVRSNLRAFRDGWRFEFRVGGVRRVTSDACDSPEDSARRVSSKLSEGDVSGAARLLCSTDSFVSGDEVLASLAAKHPPAPSDSIFPDPPDSMTQRHSSVDDALGAVASFPASSSAGPDALRPRHLKDLLAPVLGPVARRLAAALARVVDVLRWGTLPTEVREIIFGAKLFALRKKDSSIRPIACSLTIRRIAAKIACREAKDLIIEQLGPHQLGFGLAGGAEAAVHAARAFVQSSPPRTALLKLDFRNAFNTLQRDHILRAVRDAVPEIFNLVNHAYREPFVLLFGAHTLSSASGIQQGDPLGPALFSLGIRELVNSIQVPFNAWYLDDGTLGGPMEDLLEEVRRILAFETVSGLVLNTAKCEVFAPGTDPDDPTLSALLALLPGCRVVSEHEVTLLGAPLLPSALSSLLDPMMDRLWAMQERLPLVGAHQGLYLLRSSFSACRIVHIIRSMDCSGTVNQLLQPFDDQVVEALETVLGLNLRPREVRQAALPTSMGGLGLPSARSLAGPAVAASMHATSGHVQRLLPPGAWALFEATRDAIAAGLQASPPDMNRLACQRAWAEKVHESSLTELLEECGDDQGRARLLAVARPGASDWLHALPADSLGTRLDDQSTRICVGLRLGADLVEPHRCTCGEPVGRLARHGLSCAHSAGRRPRHTALNDILARSLRKAGIPCVLEPPGLSRDDGKRPDGLTLIPFYKGRSLVWDATVTDSLTPSLVGPGASRPGTAASRAETSKTRKYANLGRAYHFSPFAFETLGGPGPLTTTLISQVGDALQQATMDKRAGTFFCQRLSLEIQRGNAISVLGTMKDWMDPRLRVRGRARLPLGHE

SEQ ID NO: 650 - protein, 981 aa, Dermanyssus gallinae
MMNPEPTQSPGAAPHPPRLSVSIAGNPPVRVTCPRCGRDFTRRGLPIHQARCRPTSTTPESSSTASSTPALPSQPRQSLVDRLILASQQSRVMRVVPRAVRPLVAESLCDALDLVAANNDVPSWESLLSFAYVVLQLPPRTSSSTSLAATVRSNLRAFRDGWHFEFRVGGVRRVTSDACDSPEDSTRRVSSKLSEGDVSGAARLLCSTDSFVSGDEVLASLAAKHTPAPSDSIFSDPPDSMTQRHSSVDDVLGAVASFPASSSAGPDALRPRHLKDLLAPVLGPVARRLAAALARVVDVLRWGTLPTEVREIIFGAKLFALRKKDSSIRPIACSLTIRRIAAKIACREAKDLIIEQLGPHQLGFGLAGGAEAAVQAARAFVQSSPPRTALLKLDFRNAFNTIRRDHILRAVRDAVPEIFSLVNHAYREPSVLLFGAHTLSSASGIQQGDPLGPALFSLGIRELVNSIQVPFNAWYLDDGTLGGPMEDLLEEVRRILAFELVSGLVLNTAKCEVFAPGTDPDDPTLSALLALLPGCRVVSEHEVTLLGAPLLPSALSSLLDPMMDRLWAMQERLPLVGAHQGLYLLRSSFSACRIVHIIRSMDCSGTVNQLVQLFDDQVVEALETVLGLNLRPREVRQAALPTSMGGLGLPSARSLAGPAVAASMHATSGHVQRLLPPGAWALFEATRDAIAAGLQASPPDMNRLACQRAWAEKVHESSLTELLEECGDDQDRARLLAVARPGASDWLHALPADSLGTRLDDQSTRICVGLRLGADLVEPHRCTCGESVGRLARHGLSCAHSAGRRPRHTALNDILARSLRKAGIPCVLEPPGLSRDDGKRPDGLTLIPFYKGRSLVWNATVTDSLTPSLVGPSASRPGTAASRAETSKTRKYANLGRAYHFSPFAFETLGGPGPLTTTLISQVGDALQQASMDKRAGTFFCQRLSLEIQRGNAISVLGTMKDWMDPRLRVRGRARLPLGHE

SEQ ID NO: 651 - protein, 976 aa, Dermanyssus gallinae
MTDPGSASYPPPQSAPVADNPSIRVTCPRCGRDFTRRGLPIHQARCRSTSATAAPSPTVSSAPTLPSQPRQPLVDRLSIAIQQSRVMRVVPRAVRPLVAELLCDVFDLVAANNDLPSWESLLSFAYVVLQLPLRTLSTISLAATVRSNLRAFRDGWRFEYRVGGIRRARTDPCDSPEDSARLVSSKLSEGDVSGAARLLCSTDSFASGDGVLASLATKHPPAPPHLAFPAPPDSMSQHQTSVDDVLGAVAGFPASSSAGPDGLRPRHLKDLLSPGIGPVAGRLAASLARVMNVLRWGRQPAEVRAIVFGANLFALRKKDASIRPIACSLTLRRIAAKIACREAKELIMEQLGPHQLGFGMAGGTETVVHAARAFMQSSPPGTALLKLDFRNAFNTIRRDHLLRAVRDTVPELFTLVEHAYKEPSALLFGAETLFSASGIQQGDPLGPALFSLGIRELVNSVQVPFNAWYLDDGTLGGPMVDLLDEVRRVLAFEAVSGLVLNTAKCEVFAPGTDPDDPSLRALLELLPGCRVVADHEINLLGAPVLPSALPGQLDPLMDRLWAMQERLPLVGAHQGLYLLRSSFSACRIVHILRSIDCSGDLNHLLQPLDDQVVEALQTVLSLNLRPREVRQAALPTSMGGLGLPSARSLAGPAVAASMHATSDNVQRLLPPAAQAMFEAARDDIATGLQASSPGPDRLACQRAWAEKAHEASLSSLLEECRDDQDKARLLAVARLGASDWLHALPADSLGTRLDDQSTRICVGLRLGADLVEPHRCSCGEPVGRLARHGLSCAHAAGRRPRHTALNEMLARSLRRAGIPCVLEPPGLSRDDGKRPDGMTLIPFYKGRSLVWDATVTDSLTPSLVGPGASRPGTAVTRAETSKMRKYADLGRAHHFSPFAFETMGGPGPLTVTLISRVGDALRQATMDKGAHAFFSQRLSLEIQRGNATSVLGTMRDWMDPDLRARGRAGLSHGHER

SEQ ID NO: 652 - protein, 981 aa, Dermanyssus gallinae
MMNPEPTQSPGAAPHPPRLSVSIAGNPPVRVTCPRCGRDFTRRGLPIHQARCRPTSTAPESFSTASSTPALPSQPRQSLVDRLILASQQSRVMRVVPRAVRPLVAESLCDVLDLVAANNDVPSWESLLSFAYVVLQLPPRTSSSTSLAATVRTNLRAFRDGWRFEFRVGGVRRVTSDACDSPEDSARRVSSKLSEGDVSGAARLLCSTDSFVSGDEVLASLAAKHPPAPSDSIFPDPPDSMTQRHSSVDDVLEAVASFPASSSAGPDALRPRHLKDLLAPVLGPVARRLAAALARVVDVLRWGTLPTDVREIIFGAKLFALRKKDSLIRPIACSLTIRRIAAKIACREAKDLIIKQLGPHQLGFGLAGGAEAAVHAARAFVQSSPPRTALLKLDFRNAFNTIRRDHILRAVRDAVPEIFNLVNHAYREPSVLLFGAHTLFSASGIQQGDPLGPALFSLGIRELVNSIQVPFNAWYLDDGTLGGPMEDLLEEVRRILAFETVSGLVLNTAKCEVFAPGTDPDDPTLSALLALLPGCRVVSEHEVTLLGAPLLPSALSSLLDPMMDRLWAMQERLPLVGAHQGLYLLRSSFSACRIVHIIRSMDCSGTVNQLLQPFDDQVVEALETVLGLNLRPREVRQAALPTSMGGLGLPSARSLAGPAVAASMHATSGHVQRLLPPGAWALFEATRDAIAAGLQASPPDMNRLACQRAWAEKVHESSLTELLEECGDDQDRARLLAVARPGASDWLHALPADSLGTRLDDQSTRICVGLRLGADLVEPHRCTCGEPVGRLARHGLSCAHSAGRRPRHTALNDILARSLRKAGIPCVLEPPGLSRDDGKRPDGLTLIPFYKGRSLVWDATVTDSLTPSLVGPGASRPGTAASRAETSKTRKYANLGRAYHFSPFAFETLGGPGPLTTTLISQVGDALQQATMDTRAGTFFCQRLSLEIQRGNAISVLGTMKDWMDPRLRVRGRARLPLGHE

SEQ ID NO: 653 - protein, 976 aa, Dermanyssus gallinae
MTDPGSASYPRPQSAPVADNPSIRVTCPRCGRDFTRCGLPIHQARCRSTSATAAPSPTVSSAPTLPSQPRQPLVDRLSIAIQQSRVMRVVPRAVRPLVAELLCDVLDLVAANNDLPSWESLLSFAYVVLQLPLRTLSSISLAATVRSNLRAFRDGWRFEYRVGGIRRARTDPCDSPEDSARRVSSKLFEGDVSGAARLLCSTDSFASGDGVLASLATKHPPAPPHLAFPAPPDSMSQHQTSVDDVLGAVAGFPASSSAGPDGLRPRHLKDLLSPGIGPVAGRLAASLARVMNVLRWGRLPAEVRAIVFGTNLFALRKKDASIRPIACSLTLRRIAAKIACREAKELIMEQLGPHQLGFGMAGGTETVVHAARAFMQSSPPGTALLKLDFRNAFNTIRRDHLLRAVRDTVPELFTLVEHAYKEPSVLLFGAETLFSASGIQQGDSLGPALFSLGIRELVNSVQVPFNAWYLDDGTLGGPMVDLLDEVRRVLAFEAVSGLVLNTAKCEVFAPGTDPDDPSLRALLELLPGCRVVADHEINLLGAPVLPSALPGQLDPLMDRLWAMQERLPLVGAHQGLYLLRSSFSACRIVHILRSIDCSGDLNHLLQPFDDQVVEALQTVLSLNLRPREVRQAAFPTSMGGLGLPSARSLAGPAVAASMHATSDNVQRLLPPAAQAMFEGARDDIATGLQASSPGPDRLACQRAWAEKAHEASLSSLLEECRDDQDKARLLAVARPGASDWLHALPADSLGTRLDDQSTRICVGLRLGADLVEPHRCSCGEPVGRLARHGLSCAHAAGRRPRHTALNEMLARPLRRAGIPCVLEPPGLSRDDGKRPDGMTLIPFYKGRSLVWDATVTDSLTPSLVGPGASRPGTAVTRAETSKMRKYADLSRAHHFSPFAFETMGGPGPLTVTLISRVGDALRQATMDKRAHAFFSQRLSLEIQRGNATSVLGTMRAWMDPDLRARGRAGLPHGHER

SEQ ID NO: 654 - protein, 853 aa, Dermanyssus gallinae
MRVVPRAVRPLVAESLCDVLDLVTANNDVPSWESLLSFAYVVLQLPPRTSSSTSLAATIRSNLRAFRDGWRFEFRVGGVRRVTSDACDSPEDSARPVSSKLSEGDVSGPARLLCSTDSFVSGDEVLASLAAKHPPAPSDSVFPDPPDSMTQRHSSVDDVLGAVASFPASSSAGPDALRPRHLKDLLAPVLGPVARRLAAALARVVDVLRWGTLPTEVREIVFGAKLFALRKKDSSIRPIACSLTIRRIAAKIAYREAKDLIIEQLVPHQLGFGLAGGTEAAVHAARAFVQSSPLRTALLKLDFRNAFNTIQRDHILRAVCDAVPEILNLVNHAYREPSVLLFGAHMLSSASGIQQGDPLGPALFSLGIRELLNSIQVPFNAWYLDDGTLGGTMEGLLDEVRRILAFEAVSGLVLNTAKCEVFAPGTDPDDPTLSALLALLPGCRVVSEHEVTLLGAPLLLSALSSLLDPMMDRLWPMQERLPLVGAHQGLFPLRSSFSACRIVHIIRSMDCSGTFNQLLQPFDDQVVEALETVLALNLRPREVRQAALPTSMGGLGLPSARSLAGLAVAASMHATSGHVQRLLPPGAWALFEATRDAIAAGLQASLPDMNRLACQRAWAEKVYESLLTELLEECGDDQDRARLLAVARPGASDWLHALPADSLGTRLDDQSTRICVGLRLGADLVEPHRCTCGEPVGRLARHGLSCAHSAGRRPRHTALNDILAKSLRKAGIPCVLEPPGFSRDDGKRPDGLTLIPFYKGRSLVWDATVIDSLTSSFVGPGASRLGIAASRAETSKIRKYANLGRAYHFSPFAFETLGGPGPLTTTLIPRLATLYSRLRWTRGRALSSAKGFP

SEQ ID NO: 655 - protein, 981 aa, Dermanyssus gallinae
MMNSEPTQSPGAAPHPPRLSVSIAGNPPVRVTCPRCGRDFTRRGLPIHQARCRPTSTAPESFSTASSTPALPSQPRQSLVDRLIVASQQSRVMRVVPRAVSPVVAESLCDVLDLVAANNDVPSWESLLSFAYVVLQLPPRTSSSTSLAATVRSNLRAFRDGWRFEFRVGGVRRVTSDACDSPEDSARRVSSKLSEGDVSGAARLLCSTDSFVSGDEVLASLAAKHPPAPSDSIFPDPPDSMTQRHSSVDDVLGAVASFPASSSAGPDALRPRHLKDLLAPVLGPVARRLAAALARVVDVLRWGTLPTEVREIIFGAKLFALRKKDSSIRPIACSLTIRRIAAKIACREAKDLIIEQLGPHQLGFGLAGGAEAAVHAARAFVQSSPPRTALLKLDFRNAFNTIRRDHILRAVRDAVSEIFNLVNHAYREPSVLLFGAHTLSSASGIQQGDPLGPALFSLGIRELVNSIQVPFNAWDLDDGTLGGPMEDLLEEVRRILAFETVSGLVLNTAKCEVFAPGTDPDDPTLSALLALLPGCRVVSEHEATLLGAPLLPSALSSLLDPMMDRLWAMQERLPLVGAHQGLYLLRSSFSACRIVHIIRSMDCSGTVNQVLQPFDDQVVEALETVLGLNLRPREVRQAALPTSMGGLGLPSARSLAGPAVAASMHATSGHVQRLLPPGAWALFEATRDAIAAGLQASPPDMNRLACQRAWAEKVHESLLTELLEECGDDQDRARLLAVARPGASDWLHALPADSLGTRLDDQSTRICVGLRLGADLVEPHRCTCGEPVGRLARHALSCAHSAGRRPRHTALNDILARSLRKAGIPCVLEPPGLSRDDGKRPDGLTLIPFYKGRSLVWDATVTDSLTPSLVGPGASRPGTAASRAETSKTRKYANLGRAYHFSPFAFETLGGPGPLTTTLISQVGDALQQATMDKRAGTFFCQRLSLEIQRGNAISVLGTMKDWMDPRLRVRGRARLPLGHE

SEQ ID NO: 656 - protein, 976 aa, Dermanyssus gallinae
MTDPGSASYPPPQSAPVADNPSIRVTCPRCGRDFTRRGLPIHQARCRSTSATAAPSPTVSSAPTLPSQPRQPLVDRLSIVIQQSRVMRVVPRAVRPLVAELLCDVLDLVAANNDLPSWESLLSFAYVVLQLPLRTLSSISLAATVRSNLRAFRDGRRFEYSVGGIRRARTDPCDSPEDSARRVSSKLSEGDVSGAARLLCSTDSFASGDGVLASLATKHPPAPPHLAFPAPPDSMSQHQTSVDDVLGAVAGFPASSSAGPDGLRPRHLKDLLYPGIGPVAGRLTASLARVMNVLRWGRLPAEVRAIVFGANLFALRKKDASIRPIACSLTLRRIAAKIACREAKELIMEQLGPHQLGFGMAGGTETVVHAARAFMQSSPPGTALLKLDFRNAFNTIRRDHLLRAVRDTVPELFTLVEHAYKEPSVLLFGAETLFSASGIQQGDPLGPALFSLGIRELVNSVQVPFNAWYLDDGTLGGPMVDLLDEVRRVLAFEAVSGLVLNTAKCEVFAPGTDPDDPSLRALLELLPGCRVVADHEINLLGAPVLPSALPGQLDPLMDRLWAMQERLPLVGAHQGLYLLCSSFSACRIVHILRSIDCSGDLNHLLQPFDDQVVEALQTVLSLNLRPREVRQAALPTSMGGLGLPSARSLAGPAVAASMHATSDNVQRLLPPAAQAMFEAARDDIATGLQASSPGPDRLACQRAWAEKAHEASLSSLLEECRDDQDKARLLAVARPGASDWLHALPADSLGTRLDDQSTRICVGLRLGADLVEPHRCSCGEPVGRLARHGLSCAHAAGRRPRHTALNEMLARSLRRAGIPCVLEPPGLSRDDGKRPDGMTLIPFYKGRSLVWDATVTDSLTPSLVGPGASRPGTAVTRAETSKMRKYADLSRAHHFSPFAFETMGGPGPLTVTLISRVGDALRQATMDKRAHAFFSQRLSLEIQRGNATSVLGTMRDWMDPDLRARGRAGLPHGHER

SEQ ID NO: 657 - protein, 890 aa, Dermanyssus gallinae
MRVVPRAVRPLVAELLCDVLDLVAANNDLSSWESLLSFAYVVLQLPLRTLSSISLAATVRSNLRAFRDGWRFEYRVGGIRRARTDPCDSPEDSARRVSSKLSEGDVSGAARLLCSTDSFASGDGVLASLATKHPPAPPHLAFPAPPDSMSQHQTSVDDVLGAVAGFPASSSAGPDGLRPRHLKDLLSPGIGKVAGRLAASLARVMNVLRWGRLPAEVRAIVFGANLFALRKKDASIRPIACSLTLRRIAAKIACREAKELIMEQLGPHQLGFGMAGGTETVVHAARAFMQSSPPGTALLKLDFCNAFNTIRRDHLLRAVRDTVPELFTLVEHAYKEPSVLLFGAETLFSASGIQQGDPLGPALFSLGIRELVNSVQVPFNAWYLDDGTLGGPMVDLLDEVRRVLAFEAVSGLVLNTAKCEVFAPGTDPDDPSLRALLELLPGCRVVADHEINLLGTLVLPSALPGQLDPLMNRLWAMQERLPLVGAHQGLYLLRSSFSACRIVHILRSIDCSGDLNYLLQPFDDQVVEALQTVLSLNLRPREVRQAALPTSMGGLGLPSARSLAGPAVAASMHATSDNVQRLLPPAAQAVFEAARDDIATGLQASSPGPDRLACQRAWAEKAHEASLSSLLEECRDDQDKARLLAVARPGASDWLHALPADSLGTRLDDQFTRICVGLRLGADLVEPHRCFCGEPVERLARHGLSCAHAAGRRLRHTALNEMLARSLRRAGIPCVLEPPGLSRDDGKRPDGMTLIPFYKGRSLVWDATVTDSLTPSLVGPGASRPGTAVTRAETSKMRKYADLSRAHHFSPFAFETMGGPGPLTVTVISRVGDALRQATMDKRAHAFFSQRLSLEIQRGNATSVLGTMRDWMDPDLRARGRAGLPHGHER

SEQ ID NO: 658 - protein, 889 aa, Dermanyssus gallinae
MRVVPRAVRPLVAESLCDVLDLVAANNDVPSWESLLSFAYVVLQLPPRTSSSTSLAATVRSNLRAFRDGWRFEFRVGGVRRVTSDACDSPEDSARRVSSKLSEGDVSGAARLLCSTDSFVSGDEVLASLAAKHPPAPSDSVFPDPPDSMTQRHSSVDDVLGAVASFPASSSAGPDALRPRHLKDLLAPVLGPVTRRLAAALARVVDVLRWGTLPTEVREIIFGAKLFALRKKDSSIRPIACSLTIRRIAAKIACCEAKDLIIEQLGPHQLGFGLAGGAEAAVHAARAFVQSSPPRTALLKLDFRNAFNTIRRDHILRAVRDAVPEIFNLVNHAYREPSVLLFGAHTLSSASGIQQGDPLGPALFSLGIRELVNSIQVPFNAWYLDDGTLGGPMEDLLEEVRRILAFETVSGLVLNTAKCEVFAPGTDPDDPTLSALLALLPGCRVVSEHEVTLLGAPLLPSALSSLLDPMMDRLWAMQERLPLVGAHQGLYLLRSSFSACRIVHIIRSMDCSGTVNQLLQPFDDQVVEALETVLGLNLRPREVRQAALPTSMGGLGLPSARSLAGPAVAASMHATSGHVQRLLPPGAWALFEATRDAIAAGLQASPPDMNRLSCQRAWAEKVHESSLTKLLEECGDDQDRARLLAVARPGASDWLHALPADSLGTRLDDQSTRICVGLRLGADLVESHRCTCGEPVGRLARHGLSCAHSAGRRPRHTALNDILARSLRKAGIPCVLEPPGLSRDDGKRPDGLTLIPFYKGRSLVWDATVTDSLTPSLVGPGASRPGTAASRAETSKTRKYANLGRAYHFSPFAFETLGGPGPLTTTLISQVGDALQQATMDKRAGTFFCQRLSLEIQRGNAISVLGTMKDWMDPRLRVRGRARLPLGHE

SEQ ID NO: 659 - protein, 974 aa, Dermanyssus gallinae
MTDPGSASYPPPQSAPVADNPSIRVSCPRCGREFTRRGLPIHQARCRSTSATAAPSPTVSSAPTLPSQPRQPLVDRLSIAIQQSRVMRVVPRAVRPLVAELLCDVLDLVAANNGLPSWESLLSFAYVVLQLPLRTLSSISLAATVRSNLRAFRDGWRFEYRVGGIRRARTDPCDSPEDSARRVSSKLSEGDVSGAARLLCSTDSFASGDGVLASLATKHPPAPPHLAFSAPPDSMSQHQTSVDDVLGAVAGFPASSSAGPDGLRPRHLKDLLSPGIGPVAGRLAASLARVMNVLRWGRLPAEVRAIVFGANLFALRKKDASIRPIACSLTLRRIAAKIACREAKELIMEQLGPHQLGFGMAGGTETVVHAARAFMQSSPPGTALLKLDFRNAFNTIRRDHLLRAVRDTVPELFTLVEHAYKEPSVLLFGAETLFSASGIQQGDPLGPALFSLGIRKLVNSVQVPFNAWYLDDGTLGGPMVDLLDEVRRVLAFEAVSGLVLNTAKCEVFAPGTDPDDPSLRALLELLPGCRVVADHEINLLGAPVLPSALPGQLDPLMDRLWAMQERLPLVGAHQGLYLLRSSFSACRIVHILRSIDCSGDLNHLLQPFDDQVVEALQTVLSLNLRPREVRQAALPTSMGGLGLPSARSLAGPAVAASMHATSDNVQRLLPPAAQAMFEAARDDIATGLQASSPGPDRLACQRAWAEKAHEASLSSLLEECRDDQARLLAVARPGASDWLHALPADSLGTRLDDQSTRICVGLRLGADLVEPHRCSCGEPVGRLARHGLSCAHAAGRRPRHTALNEMLARSLRRAGIPCVLEPPGLSRDDGKRPDGMTLIPFYKGRSLVWDATVTDSLTPSLVGPGASRPGTAVTRAETLKMRKYADLSRAHHFSPFAFETMGGPGPLTVTLISRVGDALRQATMDKRAHAFFSQRLSLEIQRGNATSVLGTMRDWMDPDLRARGRAGLPHGHER

SEQ ID NO: 660 - protein, 979 aa, Dermanyssus gallinae
MMNPEPTQSPGAAPHRPRLSVSTAGNPPVRVTCPRCGRGFTRRGLPIHQARCRPTSTTPESSSTASSTPALPSQPKQSLVDRLILASQQSRVMRVVPRAVRPLVAESLCDVLDLVAANNNVPSWESLLSFAYVVLQLPPRTSSSTSLAATVRSNLRAFRDGWRFEFRVGGVRRVTSDACDSPEDSARRVSSKLSEGDVSGAARLLCSTDSFVSGDEVLPSLAAKHPPAASDSVFPDPPDSMTQRHSSVDDVLGAVASFPASSSAGPDALRPRHLKDLVAPVLGPVARRLAAALARVVDVLRWGTLPTEVREIIFGAKLFALRKKDSSIRPIACSLTIRRIAAKIACREAKDLIIEQLGPHQLGFGLAGGAEAAVHAARAFVQSSPPRTALLKLDFRNAFNTIRRDHILRAVRDTVPEIFNLVNHAYREPSVLLFGAHTLSSASGIQQGDPLGPALFSLGIRELVNSIQVPFNAWHLDDGTLGGPMEDLLEEVRRILAFETVSGLVLNTAKCEVFAPGTDPDDPTLSAVLALLPGCRVVSEHEVTLLGAPLLPSALSSLLDPMMDRLWAMQERLPLVGAHQGLYLLRSSFSACRIVHIIRSMDCSGTVNQLLQPFDDQVVEALETVLGLNLRPREVRQAALPTSGLGLPSARSLAGPAVAASMHATSGHVQRLLPPGAWALFEATRDAIAAGLQASPPDMNRLACQRAWAEKVHESSLTELLEECGDDQDKARLLAVARPGASDWLHALPADSLGTRLDDQSTRICVGLRLGADLVEPHRCTCGEPVGRLARHGLSCAHSAGRRPRHTALNDILARSLRKAEIPCVLEPPGLSRDDGKRPDGLTLIPFYKGRSLVWDATVTDSLTPSLVGPGASRPGTAASRAETSKTRKYANLGRAYHFSPFAFKTLGGPRPLTTTLISQVGDALQQATMDKRAGTFFCQRLSLEVQRGNAISVLGTMKDWMDPRLRVRGRARLPLGYE

SEQ ID NO: 661 - protein, 881 aa, Dermanyssus gallinae
MRVVPRAVRPLVAELLCDVVDLVAANNDLPSWESLLSFAYVVLQLPLRTLSSISLAATVRSNLRAFRNGWRFEYRVGGIRRARTDPCDSPEDSARRVSSKLSEGDVSGAARLLCCTDSFSSGDGVLASLATKHPPAPPHLAFPAPLDSMTQHQTSVDDVLGAVAGFQASSSAGPDGLRPRHLKDLLSPGIGPVAGGLAASLARVMNVLRWGRLPAEVRAIVFSANILALRKKDASFRPIAYSLPLRRIAAKIACREAKELIMEQLGPHQLGFGMAGGTETTVHAARAFMQSSPPGTALLKLDFRNAFNTTRKDHLLRAIRDTVPELFTLLEHAYKEPSVLLFGAETLFSASGIQQGDPLGPALFSLGIRELVNSVQVPFNAWYLDDGTLGGPMVDLLDEVRRVLAFEAVSGLVQNTAKCEVFAPGTDPADPLLRALLEFLPGCINLLGAPVLPSALPGQLDPLMDRLWAMQERLPLVGAHQGLYLLRSSFSACRIVHILRSIDCSGDLNHLLQPFDDQVVEALQTVLSLNLRPREVRQEALPTFMGSLRLPSARSLAGPAVAASMHATSENVQRLLPPAAQVMFEAARDDIATGLQASSPGPDRLACQRAWAEQAHEASLSSLLEECRDDQDKARLLAVSLYALPADSLGTRLDDQSTRMTNLPQCVGLRLGADLVEPHRCSCGEPVGRLSRHGLSCAHAAGRRPRHTALNEMLAKSLRRAGIPCVLEPPGLSRDDAKRPDGMTLIPFYKGRSLVWDATVTDSLTPSLVCPGATRPGTAVSRAETSKIRKYADLSQAHHFSPFAFETMGGPGPLTVTLISRVGDALRQATMDMRGHACFSQRLSLEIQRGNATSVLETMRDWMDPDLRARGRAGLPHGHER

SEQ ID NO: 662 - protein, 1053 aa, Morbakka virulenta
MKASILVICALLLGVCDYCKKEFSSVGRHQWRCKSRAEVDHHGNGIKTLPSVVNNHDPCNTNKLTCVCGRECKGLRGLKAHQRLCRTLMTLDDEVVNELNSHVNNNINEITDAEVSHALKETPSLKPGIKLPVNEQDWELANSYFKANLSCEEVVNQDLNISVDNFNKTVYNYFVETHGTVNDSNGINSELSNRYNNYSKQQLKTELKKLKKSDKAFPVVIRFVAKLLRLKLQPSASEMLNKDHDTEISKNFWGYCKKFIEIPSRILPEFDKEKCNVFFRKAFKAVNPRKTFQIPDWIPSFDNPTHEFDLSPPSYNKICRIIKRMKSSGCPCPLDQIPVISLKRCPHLRSYITVICSEVFKRKSIPSLWQQAATILIYKKGEKSDPGNFRPITLEPVMLKIFTSLLRDRVFEFLVKNNYIEASIQKGFTPGLTGTYEHIASMTHAINDARRKQRSITITLIDLKNAFGEVNHNLIETVLKHHHIPDDIVTIIRILYSDFHTAILTNLFISDFIKLEKGVLQGDCFSPLIFNMLINTFVQYIKKDHFKQIGYKFLKHLIPRHWLQFADDAVAMSGQESENQILLNAFSRWCRWSDMIIKVEKCHTFGMKKCGTVCKQIKPKLYLNNSVIHPIDSGEPFLYLGRYFDFGMTNTEHKNILMSKTANILRTINGLPLHPRNKVILYQRYLLSKISWHLTVADIETSWVKENLDNVVSKFIRIWLEIPISGSTRLLRRTKRKFGLGLTLISDRFIQCRVSFRNKLKSSKSRDIVEIYNATTGQNITYDQYKTTREAIKDIRNSNEKKIDTLTSQGLIIKSITAYADNAFTSHWHKALSTLPNNIYSFTIRYLNNTLANASNMLKWGQRESSACSLCNATETLGHVIGGCNTALNEKRYNWRHDSVLKNIANFISSNKKNAKVYCDIDDYNSPSIITGDTYRPDLLVIDKGKIYILELTIGFETNIEVNSKRKSEKYEFLLRFLGKNYQKVIFVNLSIGAIGAIGKSTHSVAKMLAEISYDKSEISYIIKKIICVVIRTTYYIFCQRSKTWDQPPLLYW

SEQ ID NO: 663 - protein, 1053 aa, Morbakka virulenta
MKASILVICALLLGVCDYCKKEFSSVGRHQWRCKSRAEVDHHGNGIKTLPSVVDNHDPCNTNKLTGVCGRECKGLRGLKAHQRLCRTLMTLDDEVVNELNSHVNNNINEITDAEVSHALKETPSLKPGIKLPVNEQDWELANSYFKANLSCEEVVNQDLNISVDNFNKTVYNYFVETHGTVNDSNGINSELSNRYNNYSKQQLKTELKKLKKSDKAFPVVIRFVAKLLRLKLQPSASEMLNKDHDTEISKNFWGYCKKFIEIPSRILPEFDKEKCNVFFRKAFKAVNPRKTFQIPDWIPSFDNPTHEFDLSPPSYNKICRIIKRMKSSGCPCPLDQIPVISLKRCPHLRSYITVICSEVFKRKSIPSLWQQAATILIYKKGEKSDPGNFRPITLEPVMLKIFTSLLRDRVFEFLVKNNYIEASIQKGFTPGLTGTYEHIASMTHAINDARRKQRSITITLIDLKNAFGEVNHNLIETVLKHHHIPDDIVTIIRILYSDFHTAILTNLFISDFIKLEKGVLQGDCFSPLIFNMLINTFVQYIKKDHFKQIGYKFLKHLIPRHWLQFADDAVAMSGQESENQILLNAFSRWCRWSDMIIKVEKCHTFGMKKCGTVCKQIKPKLYLNNSVIHPIDSGEPFLYLGRYFDFGMTNTEHKNILMSKTANILRTINGLPLHPRNKVILYQRYLLSKISWHLTVADIETSWVKENLDNVVSKFIRIWLEIPISGSTRLLRRTKRKFGLGLTLISDRFIQCRVSFRNKLKSSKSRDIVEIYNATTGQNITYDQYKTTREAIKDIRNSNEKKIDTLTSQGLIIKSITAYADNAFTSHWHKALSTLPNNIYSFTIRYLNNTLANASNMLKWGQRESSACSLCNATETLGHVIGGCNTALNEKRYNWRHDSVLKNIANFISSNKKNAKVYCDIDDYNSPSIITGDTYRPDLLVIDKGKIYILELTIGFETNIEVNSKRKSEKYEFLLRFLGKNYQKVIFVNLSIGAIGAIGKSTHSVAKMLAEISYDKSEISYIIKKIICVVIRTTYYIFCQRSKTWDQPPLLYW

SEQ ID NO: 664 - protein, 965 aa, Morbakka virulenta
MTLDDEVVNELNSHVNNNINEITDAEVSHALKETPSLKPGIKLPVNEQDWELANSYFKANLSCEEVVNQDLNISVDNFNKTVYNYFVETHGTVNDSNGINSELSNRYNNYSKQQLKTELKKLKKSGKAFPVVIRFVAKLLRLKLQPSASEMLNKDHDTEISKNFWGYCKKFIEIPSRILPEFDKEKCNVFFRKAFKAVNPRKAFQIPDWIPPFDNPTHEFDLSPPSYNKICRIIKRMKSSGCPCPLDQIPVISLKRCPHLRSYITVICSEVFKRKSIPSLWQQAATILIYKKGEKSDPGNFRPITLEPVMLKIFTSLLRDRVFEFLVKNNYIEASIQKGFTPGLTGTYEHIASMTHAINDARRKQRSITITLIDLKNAFGEVNHNLIETVLKHHHIPDDIVTIIRILYSDFHTAILTNLFISDFIKLEKGVLQGDCFSPLIFNMLINTFVQYIKKDHFKQIGYKFLKHLIPRHWLQFADDAVAMSGQESENQILLNAFSRWCRWSDMIIKVEKCHTFGMKKCGTVCKQIKPKLYLNNSVIHPIDSGEPFLYLGRYFDFGMTNTEHKNILMSKTANILRTINGLPLHPRNKVILYQRYLLSKISWHLTVADIETSWVKENLDNVVSKFIRIWLEIPISGSTRLLRRTKRKFGLGLTLISDRFIQCRVSFRNKLKSSKSRDIVEIYNATTGQNITYDQYKTTREAIKDIRNSNEKKIDTLTSQGLIIKSITAYADNAFTSHWHKALSTLPNNIYSFTIRYLNNTLANASNMLKWGQRESSACSLCNATETLGHVIGGCNTALNEKRYNWRHDSVLKNIANFISSNKKNAKVYCDIDDYNSPSIITGDTYRPDLLVIDKGKIYILELTIGFETNIEVNSKRKSEKYEFLLRFLGKNYQKVIFVNLSIGAIGAIGKSTHSVAKMLAEISYDKSEISYIIKKIICVVIRTTYYIFCQRSKTWDQPPLLYW

SEQ ID NO: 665 - protein, 965 aa, Morbakka virulenta
MTLDDEVVNELNSHVNNNINEITDAEVSHALKETPSLKPGIKLPVNEQDWELANSYFKANLSCEEVVNQDLNISVDNFNKTVYNYFVETHGTVNDSNGINSELSNRYNNYSKQQLKTELKKLKKSDKAFPVVIRFVAKLLRLKLQPSASEMLNKDHDTEISKNFWGYCKKFIEIPSRILPEFDKEKCNVFFRKAFKAVNPRKTFQIPDWIPSFDNPTHEFDLSPPSYNKICRIIKRMKSSGCPCPLDQIPVISLKRCPHLRSYITVICSEVFKRKSIPSLWQQAATILIYKKGEKSDPGNFRPITLEPVMLKIFTSLLRDRVFEFLVKNNYIEASIQKGFTPGLTGTYEHIASMTHAINDARRKQRSITITLIDLKNAFGEVNHNLIETVLKHHHIPDDIVTIIRILYSDFHTAILTNLFISDFIKLEKGVLQGDCFSPLIFNMLINTFVQYIKKDHFKQIGYKFLKHLIPRHWLQFADDAVAMSGQESENQILLNAFSRWCRWSDMIIKVEKCHTFGMKKCGTVCKQIKPKLYLNNSVIHPIDSGEPFLYLGRYFDFGMTNTEHKNILMSKTANILRTINGLPLHPRNKVILYQRYLLSKISWHLTVADIETSWVKENLDNVVSKFIRIWLEIPISGSTRLLRRTKRKFGLGLTLISDRFIQCRVSFRNKLKSSKSRDIVEIYNATTGQNITYDQYKTTREAIKDIRNSNEKKIDTLTSQGLIIKSITAYADNAFTSHWHKALSTLPNNIYSFTIRYLNNTLANASNMLKWGQRESSACSLCNATETLGHVIGGCNTALNEKRYNWRHDSVLKNIANFISSNKKNAKVYCDIDDYNSPSIITGDTYRPDLLVIDKGKIYILELTIGFETNIEVNSKRKSEKYEFLLRFLGKNYQKVIFVNLSIGAIGAIGKSTHSVAKMLAEISYDKSEISYIIKKIICVVIRTTYYIFCQRSKTWDQPPLLYW

SEQ ID NO: 666 - protein, 811 aa, Morbakka virulenta
MLNKDHDTEISKNFWGYCKKFIEIPSRILPEFDKEKCNVFFRKAFKAVNPRKTFQIPDWIPSFDNPTHEFDLSPPSYNKICRIIKRMKSSGCPCPLDQIPVISLKRCPHLRSYITVICSEVFKRKSIPSLWQQAATILIYKKGEKSDPGNFRPITLEPVMLKIFTSLLRDRVFEFLVKNNYIEASIQKGFTPGLTGTYEHIASMTHAINDARRKQRSITITLIDLKNAFGEVNHNLIETVLKHHHIPDDIVTIIRILYSDFHTAILTNLFISDFIKLEKGVLQGDCFSPLIFNMLINTFVQYIKKDHFKQIGYKFLKHLIPRHWLQFADDAVAMSGQESENQILLNAFSRWCRWSDMIIKVEKCHTFGMKKCGTVCKQIKPKLYLNNSVIHPIDSGEPFLYLGRYFDFGMTNTEHKNILMSKTANILRTINGLPLHPRNKVILYQRYLLSKISWHLTVADIETSWVKENLDNVVSKFIRIWLEIPISGSTRLLRRTKRKFGLGLTLISDRFIQCRVSFRNKLKSSKSRDIVEIYNATTGQNITYDQYKTTREAIKDIRNSNEKKIDTLTSQGLIIKSITAYADNAFTSHWHKALSTLPNNIYSFTIRYLNNTLANASNMLKWGQRESSACSLCNATETLGHVIGGCNTALNEKRYNWRHDSVLKNIANFISSNKKNAKVYCDIDDYNSPSIITGDTYRPDLLVIDKGKIYILELTIGFETNIEVNSKRKSEKYEFLLRFLGKNYQKVIFVNLSIGAIGAIGKSTHSVVKMLAEISYDKSEISYIICVVIRTTYYIFCQRSKTWDQPPLLYW

SEQ ID NO: 667 - protein, 815 aa, Morbakka virulenta
MLNKDHDTEISKNFWGYCKKFIEIPSRILPEFDKEKCNVFFRKAFKAVNPRKTFQIPDWIPSFDNPTHEFDLSPPSYNKICRIIKRMKSSGCPCPLDQIPVISLKRCPHLRSYITVICSEVFKRKSIPSLWQQAATILIYKKGEKSDPGNFRPITLEPVMLKIFTSLLRDRVFEFLVKNNYIEASIQKGFTPGLTGTYEHIASMTHAINDARRKQRSITITLIDLKNAFGEVNHNLIETVLKHHHIPDDIVTIIRILYSDFHTAILTNLFISDFIKLEKGVLQGDCFSPLIFNMLINTFVQYIKKDHFKQIGYKFLKHLIPRHWLQFADDAVAMSGQESENQILLNAFSRWCRWSDMIIKVEKCHTFGMKKCGTVCKQIKPKLYLNNSVIHPIDSGEPFLYLGRYFDFGMTNTEHKNILMSKTANILRTINGLPLHPRNKVILYQRYLLSKISWHLTVADIETSWVKENLDNVVSKFIRIWLEIPISGSTRLLRRTKRKFGLGLTLISDRFIQCRVSFRNKLKSSKSRDIVEIYNATTGQNITYDQYKTTREAIKDIRNSNEKKIDTLTSQGLIIKSITAYADNAFTSHWHKALSTLPNNIYSFTIRYLNNTLANASNMLKWGQRESSACSLCNATETLGHVIGGCNTALNEKRYNWRHDSVLKNIANFISSNKNNAKVYCDIDNYNSPSIITGDTYRPDLLVIDKGKIYILELTIGFETNIEVNSKRKSEKYEFLLRFLGKNYQKVIFVNLSIGAIGAIGKSTHSVAKMLAEISYDKSEISYIIKKIICVVIRTTYYIFCQRSKTWDQPSLLYW

SEQ ID NO: 668 - protein, 1053 aa, Morbakka virulenta
MKASIIVICALLLGVCDYCKKEFSSVGRHQWRYKSRAEVDHHGNGIKILPFVVNNHDPCNTNKLTCVCGRECKGLRGLKAHQRLCRMLMTLDNEVVNELNSHVNNNKNEITDADVSHALKETSSLKPGIKLPVNEQDWELANSYFKANLSCEEVVNQDLNISVDNFNKTVYNYFVETHGTVNDSNGINSELSNRYNNYSKQQLKTELKKLKKSGKAFPVVIRFVAKLLRLKLQPSASEMLNKDHDTEISKNFWGYCKKFIEIPSRILPEFDKEKCNVFFRKAFKAVNPRKTFQIPDWIPSFDNPTHEFDLSPPSYNKICRIIKRMKSSGCPCPLDQIPVISLKRCPHLRSYITVICSEVFKRKSIPSLWQQAATILIYKKGEKSDPGNFRPITLEPVMLKIFTSLLRDRVFEFLVKNNYIEASIQKGFTPGLTGTYEHIASMTHAINDARRKQRSITITLIDLKNAFGEVNHNLIETVLKHHHIPDDIVTIIRILYSDFHTAILTNLFISDFIKLEKGVLQGDCFSPLIFNMLINTFVQYIKKDHFKQIGYKFLKHLIPRHWLQFADDAVAMSGQESENQILLNAFSRWCRWSDMIIKVEKCHTFGMKKCGTVCKQIKPKLYLNNSVIHPIDSGEPFLYLGRYFDFGMTNTEHKNILMSKTANILRTINGLPLHPRNKVILYQRYLLSKISWHLTVADIETSWVKENLDNVVSKFIRIWLEIPISGSTRLLRRTKRKFGLGLTLISDRFIQCRVSFRNKLKSSKSRDIVEIYNATTGQNITYDQYKTTREAIKDIRNSNEKKIDTLTSQGLIIKSITAYADNAFTSHWHKALSTLPNNIYSFTIRYLNNTLANASNMLKWGQRESSACSLCNATETLGHVIGGCNTALNEKRYNWRHDSVLKNIANFISSNKKNAKVYCDIDDYNSPSIITGDTYRPDLLVIDKGKIYILELTIGFETNIEVNSKRKSEKYEFLLRFLGKNYQKVIFVNLSIGAIGAIGKSTHSEAKMLAEISYDKSEISYIIKKIICVVIRTTYYIFCQRSKTWDQPPLLYW

SEQ ID NO: 669 - protein, 1053 aa, Morbakka virulenta
MKASILVICALLLGVCDYCKKEFSSVGRHQWRCKSRAEVDHHGNGIKTLPSVVNNHDPCNTNKLTCVCGRECKGLRGLKAHQRLCRTLMTLDDEVVNELNSHVNNNINEITDAEVSHALKETPSLKPGIKLPVNEQDWELANSYFKANLSCEEVVNQDLNISVDNFNKTVYNYFVETHGTVNDSNGINSELSNRYNNYSKQQLKTELKKLKKSDKAFPVVIRFVAKLLRLKLQPSASEMLNKDHDTEISKNFWGYCKKFIEIPSRILPEFDKEKCNVFFRKAFKAVNPRKTFQIPDWIPSFDNPTHEFDLSPPSYNKICRIIKRMKSSGCPCPLDQIPVISLKRCPHLRSYITVICSEVFKRKSIPSLWQQAATILIYKKGEKSDPGNFRPITLEPVMLKIFTSLLRDRVFEFLVKNNYIEASIQKGFTPGLTGTYEHIASMTHAINDARRKQRSITITLIDLKNAFGEVNHNLIETVLKHHHIPDDIVTIIRILYSDFHTAILTNLFISDFIKLEKGVLQGDCFSPLIFNMLINTFVQYIKKDHFKQIGYKFLKHLIPRHWLQFADDAVAMSGQESENQILLNAFSRWCRWSDMIIKVEKCHTFGMKKCGTVCKQIKPKLYLNNSVIHPIDSGEPFLYLGRYFDFGMTNTEHKNILMSKTANILRTINGLPLHPRNKVILYQRYLLSKISWHLTVADIETSWVKENLDNVVSKFIRIWLEIPISGSTRLLRRTKRKFGLGLTLISDRFIQCRVSFRNKLKSSKSRDIVEIYNATTGQNITYDQYKTTREAIKDIRNSNEKKIDTLTSQGLIIKSITAYADNAFTSHWHKALSTLPNNIYSFTIRYLNNTLANASNMLKWGQRESSACSLCNATETLGHVIGGCNTALNEKRYNWRHDSVLKNIANFISSNKKNAKVYCDIDNYNSPSIITGDTYRPDLLVIDKGKIYILELTIGFETNIEVNSKRKSEKYEFLLRFLGKNYQKVIFVNLSIGAIGAIGKSTHSVAKMLAEISYDKSEISYIIKKIICVVIRTTYYIFCQRSKTWDQPPLLYW

SEQ ID NO: 670 - protein, 815 aa, Morbakka virulenta
MLNKDHDTEISKNFWGYCKKFIEIPSRILPEFDKEKCNVFFRKAFKAVNPRKTFQIPDWIPSFDNPTHEFDLSPPSYNKICRIIKRMKSSGCPCPLDQIPVISLKRCPHLRSYITVICSEVFKRKSIPSLWQQAATILIYKKGEKSDPGNFRPITLEPVMLKIFTSLLRDRVFEFLVKNNYIEASIQKGFTPGLTGTYEHIASMTHAINDARRKQRSITITLIDLKNAFGEVNHNLIETVLKHHHIPDDIVTIIRILYSDFHTAILTNLFISDFIKLEKGVLQGDCFSPLIFNMLINTFVQYIKKDHFKQIGYKFLKHLIPRHWLQFADDAVAMSGQESENQILLNAFSRWCRWSDMIIKVEKCHTFGMKKCGTVCKQIKPKLYLNNSVIHPIDSGEPFLYLGRYFDFGMTNTEHKNILMSKTANILRTINGLPLHPRNKVILYQRYLLSKISWHLTVADIETSWVKENLDNVVSKFIRIWLEIPISGSTRLLRRTKRKFGLGLTLISDRFIQCRVSFRNKLKSSKSRDIVEIYNATTGQNITYDQYKTTREAIKDIRNSNEKKIDTLTSQGLIIKSITAYADNAFTSHWHKALSTLPNNIYSFTIRYLNNTLANASNMLKWGQRESSACSLCNATETLGHVIGGCNTALNEKRYNWRHDSVLKNIANFISSNKKNAKVYCDIDNYNSPSIITGDTYRPDLLVIDKGKIYILELTIGFETNIEVNSKRKSEKYEFLLRFLSKNYQNVIFVNLSIGALGAIGKSTHSVAKMLAEINYDKSEISYIIKKIICVEIRTTYYIFCQSSKTWGQPPLLYW

SEQ ID NO: 671 - protein, 1053 aa, Morbakka virulenta
MKASILVICALLLGVCDYCKKEFSSVGRHQWRCKSRAEVDHHGNGIKTLPSVVNNHDPCNTNKLTCVCGRECKGLRGLKAHQRLCRTLMTLDDEVVNELNSHVNNNINEITDAEVSHALKETPSLKPGIKLPVNEQDWELANSYFKANLSCEEVVNQDLNISVDNFNKTVYNYFVETHGTVNDSNGINSELSNRYNNYSKQQLKTELKKLKKSDKAFPVVIRFVAKLLRLKLQPSASEMLNKDHDTEISKNFWGYCKKFIEIPSRILPEFDKEKCNVFFRKAFKAVNPRKTFQIPDWIPSFDNPTHEFDLSPPSYNKICRIIKRMKSSGCPCPLDQIPVISLKRCPHLRSYITVICSEVFKRKSIPSLWQQAATILIYKKGEKSDPGNFRPITLEPVMLKIFTSLLRDRVFEFLVKNNYIEASIQKGFTPGLTGTYEHIASMTHAINDARRKQRSITITLIDLKNAFGEVNHNLIETVLKHHHIPDDIVTIIRILYSDFHTAILTNLFISDFIKLEKGVLQGDCFSPLIFNMLINTFVQYIKKDHFKQIGYKFLKHLIPRHWLQFADDAVAMSGQESENQILLNAFSRWCRWSDMIIKVEKCHTFGMKKCGTVCKQIKPKLYLNNSVIHPIDSGEPFLYLGRYFDFGMTNTEHKNILMSKTANILRTINGLPLHPRNKVILYQRYLLSKISWHLTVADIETSWVKENLDNVVSKFIRIWLEIPISGSTRLLRRTKRKFGLGLTLISDRFIQCRVSFRNKLKSSKSRDIVEIYNATTGQNITYDQYKTTREAIKDIRNSNEKKIDTLTSQGLIIKSITAYADNAFTSHWHKALSTLPNNIYSFTIRYLNNTLANASNMLKWGQRESSACSLCNATETLGHVIGGCNTALNEKRYNWRHDSVLKNIANFISSNKKNAKVYCDIDDYNSPSIITGDTYRPDLLVIDKGKIYILELTIGFETNIEVNSKRKSEKYEFLLRFLGKNYQKVIFVNLSIGAIGAIGKSTHSVAKMLAEISYDKSEISYIIKKIICVVIRTTYYIFCQRSKTWDQSPLLYW

SEQ ID NO: 672 - protein, 918 aa, Morbakka virulenta
MNKTGNNRYFKANRPCEEVLNQDLNISVENINKTVYNYFVETHGTVNDSNEINSELSKRYNNYSKQQLETELKKLKKSGKAFTVVIRFVAKLLRLKVQPSASEMLSKDHHIEISKNFWGYCKNFIEIPSRKLPEFDKEKCNVLFRKAFKAVNPRKTFQIPDWIPSFDNPTHEFDLSPPSYNKICRIIKRMKSSGCPCPLDQIPVISLKRCPHLRSYITVICSEVFMRKSIPSLWQQAATILIYKKGKKSDPGNFRPITLEPVMLKIFTSLLRDRVFEFLVKNNYIEASIQKGFTPGLTGTYEHIASMTHAINDARRKQRSITITLIDLKNAFGEVNHNLIETVLKHHHIPDDIVTIIRILYSDFHTAILTNLFISDFIKLEKGVLQGDCFSPLIFNMLINTFVQYIKKDHFKQIGYKFLKHLIPRHWLQFADDAVAMSGQESENQILLNAFSRWCRWSDMIIKVEKCHTFGMKKCGTVCKQIKPKLYLNNSVIHPIDSGEPFLYLGRYFDFGMTNTEHKNILMSKTANILRTINGLPLHPRNKVILYQRYLLSKISWHLTVADIETSWVKENLDNVVSKFIRIWLEIPISGSTRLLRRTKRKFGLGLTLISDRFIQCRVSFRNKLKSSKSRDIVEIYNATTGQNITYDQYKTTREAIKDIRNSNEKKIDTLTSQGLIIKSITAYADNAFTSHWHKALSTLPNNIYSFTIRYLNNTLANASNMLKWGQRESSACSLCNATETLGHVIGGCNTALNEKRYNWRHDSVLKNIANFISSNKKNAKVYCDIDDYNSPSIITGDTYRPDLLVIDKGKIYILELTIGFETNIEVNSKRKSEKYEFLLRFLSKNYQKVIFVNLSIGAVGAIGKSTHSVGKILAEISYDKSEISYILKKIICVVIRTTYYIFCQRSKTLGQPPLLYW

SEQ ID NO: 673 - protein, 1053 aa, Morbakka virulenta
MKASIIVICSLLLGVCDYCKKEFSSVGRHQWRCKSRAEVDHHGNGIKTLPSVVNNHDPCNTNKLTCVCGRECKGLRGLKAHQRLCRTLMTLDDEVVNELNSHVNNNINEITDAEVSHALKETPSLKPGIKLPVNEQDWELANSYFKANLSCEEVVNQDLNISVDNFNKTVYNYFVETHGTVNDSNGINSELSNRYNNYSKQQLKTELKKLKKSGKAFPVVIRFVAKLLRLKLQPSASEMLNKDHDTEISKNFWGYCKKFIEIPSRILPEFDKEKCNVFFRKAFKAVNPRKTFQIPDWIPSFDNPTHEFDLSPPSYNKICRIIKRMKSSGCPCPLDQIPVISLKRCPHLRSYITVICSEVFKRKSIPSLWQQAATILIYKKGEKSDPGNFRPITLEPVMLKIFTSLLRDRVFEFLVKNNYIEASIQKGFTPGLTGTYEHIASMTHAINDARRKQRSITITLIDLKNAFGEVNHNLIETVLKHHHIPDDIVTIIRILYSDFHTAILTNLFISDFIKLEKGVLQGDCFSPLIFNMLINTFVQYIKKDHFKQIGYKFLKHLIPRHWLQFADDAVAMSGQESENQILLNAFSRWCRWSDMIIKVEKCHTFGMKKCGTVCKQIKPKLYLNNSVIHPIDSGEPFLYLGRYFDFGMTNTEHKNILMSKTANILRTINGLPLHPRNKVILYQRYLLSKISWHLTVADIETSWVKENLDNVVSKFIRIWLEIPISGSTRLLRRTKRKFGLGLTLISDRFIQCRVSFRNKLKSSKSRDIVEIYNATTGQNITYDQYKTTREAIKDIRNSNEKKIDTLTSQGLIIKSITAYADNAFTSHWHKALSTLPNNIYSFTIRYLNNTLANASNMLKWGQRESSACSLCNATETLGHVIGGCNTALNEKRYNWRHDSVLKNIANFISSNKKNAKVYCDIDDYNSPSIITGDTYRPDLLVIDKGKIYILELTIGFETNIEVNSKRKSEKYEFLLRFLGKNYQKVIFVNLSIGAIGAIGKSTHSVAKMLAEISYDKSEISYIIKKIICVVIRTTYYIFCQRSKTWDKPPLLYW

SEQ ID NO: 674 - protein, 1053 aa, Morbakka virulenta
MKASIIVICELLLGVCDYCKKEFSSVGRHQWGCKSRTEAGHRGNGIKTLLSVVNNQDPCNTNKLTCVCGRECKGLRGLKPHQRLCRTLMTLDDEVVNELNSYVNNNINEITDAEVSHALKETPSLKPGIKLPGNEQDWELANSYFKVYLPCEEVLNQDLNITVENFNKTVYNYFVETHGTVNDSNEINSELSKRYNNYSKQQLKTELKKLKKSGKAFTVVIRFVAELLRLKVQPSASEMLNKYHDIEISKNFWGYCKKFIEIPSRILSEIDKEKCNVFFRKAFKAVNPRKTFQIPDWIPSFDNPTHEFDLSPPSYNKICRIIKRMKSSGCPCPLDQIPVISLKRCPHLRSYITVICSEVFKRKSIPSLWQQAATILIYKKGEKSDPGNFRPITLEPVMLKIFTSLLRDRVFEFLVKNNYIEASIQKGFTPGLTGTYEHIASMTHAINDARRKQRSITITLIDLKNAFGEVNHNLIETVLKHHHIPDDIVTIIRILYSDFHTAILTNLFISDFIKLEKGVLQGDCFSPLIFNMLINTFVQYIKKDHFKQIGYKFLKHLIPRHWLQFADDAVAMSGQESENQILLNAFSRWCRWSDMIIKVEKCHTFGMKKCGTVCKQIKPKLYLNNSVIHPIDSGEPFLYLGRYFDFGMTNTEHKNILMSKTANILRTINGLPLHPRNKVILYQRYLLSKISWHLTVADIETSWVKENLDNVVSKFIRIWLEIPISGSTRLLRRTKRKFGLGLTLISDRFIQCRVSFRNKLKSSKSRDIVEIYNATTGQNITYDQYKTTREAIKDIRNSNEKKIDTLTSQGLIIKSITAYADNAFTSHWHKALSTLPNNIYSFTIRYLNNTLANASNMLKWGQRESSACSLCNATETLGHVIGGCNTALNEKRYNWRHDSVLKNIANFISSNKKNAKVYCDIDDYNSPSIITGDTYRPDLLVIDKGKIYILELTIGFETNIEVNSKRKSEKYEFLLRFLGKNYQKVIFVNLSIGAIGAIGKSTHSVAKMLAEISYDKSEISYIIKKIICVVIRTTYYIFCQRSKTWDQPPLLYW

SEQ ID NO: 675 - protein, 980 aa, Morbakka virulenta
MKASILVICALLLGVCDYCKKEFSSVGRHQWRCKSRAEVDHHGNGIKTLPSVVNNHDPCNTNKLACVCGRECKGLRGLKAHQRLCRTLMTLDDEVVNELNSHVNNNINEITDAEVSHALKESPSLKPGIKLPVNEQDWELANSYFKANLSCEEVVNQDLNISVDNFNKTVYNYFVETHGTVNDSNGINSELSNRYNNYSKQQLKTELKKLKKSGKAFPVVIRFVAKLLRLKLQPSASEMLNKDHDTEISKNFWGYCKKFIEIPSRILPEFDKEKCNVFFRKAFKAVNPRKTFQIPDWIPSFDNPTHEFDLSPPSYNKICRIIKRMKSSGCPCPLDQIPVISLKRCPHLRSYITVICSEVFKRKSIPSLWQQAATILIYKKGEKSDPGNFRPITLEPVMLKIFTSLLRDRVFEFLVKNNYIEASIQKGFTPGLTGTYEHIASMTHAINDARRKQRSITITLIDLKNAFGEVNHNLIETVLKHHHIPDDIVTIIRILYSDFHTAILTNLFISDFIKLEKGVLQGDCFSPLIFNMLINTFVQYIKKDHFKQIGYKFLKHLIPRHWLQFADDAVAMSGQESENQILLNAFSRWCRWSDMIIKVEKCHTFGMKKCGTVCKQIKPKLYLNNSVIHPIDSGEPFLYLGRYFDFGMTNTEHKNILMSKTANILRTINGLPLHPRNKVILYQRYLLSKISWHLTVADIETSWVKENLDNVVSKFIRIWLEIPISGSTRLLRRTKRKFGLGLTLISDRFIQCRVSFRNKLKSSKSRDIVEIYNATTGQNITYDQYKTTREAIKDIRNSNEKKIDTLTSQGLIIKSITAYADNAFTSHWHKALSTLPNNIYSFTIRYLNNTLANASNMLKWGQRESSACSLCNATETLGHVIGGCNTALNEKRYNWRHDSVLKNIANFISSNKKNAKVYCDIDDYNSPSIITGDTYRPDLLVIDKGKIYILELTIGFETNIEVNSKRVLFQGGLLAGFLGC

SEQ ID NO: 676 - protein, 1053 aa, Morbakka virulenta
MKASILVICALLLGVCDYCKKEFSSVGRHQWRCKSRAEVDHHGNGIKTLPSVVNNHDPCNTNKLTCVCGRECKGLRGLKAHQRLCRTLMTLDDEVVNELNSHVNNNINEITDAEVSHALKETPSLKPGIKLPVNEQDWELANSYFKANLSCEEVVNQDLNISVDNFNKTVYNYFVETHGTVNDSNGINSELSNRYNNYSKQQLKTELKKLKKSDKAFPVVIRFVAKLLRLKLQPSASEMLNKDHDTEISKNFWGYCKKFIEIPSRILPEFDKEKCNVFFRKAFKAVNPRKTFQIPDWIPSFDNPTHEFDLSPPSYNKICRIIKRMKSSGCPCPLDQIPVISLKRCPHLRSYITVICSEVFKRKSIPSLWQQAATILIYKKGEKSDPGNFRPITLEPVMLKIFTSLLRDRVFEFLVKNNYIEASIQKGFTPGLTGTYEHIASMTHAINDARRKQRSITITLIDLKNAFGEVNHNLIETVLKHHHIPDDIVTIIRILYSDFHTAILTNLFISDFIKLEKGVLQGDCFSPLIFNMLINTFVQYIKKDHFKQIGYKFLKHLIPRHWLQFADDAVAMSGQESENQILLNAFSRWCRWSDMIIKVEKCHTFGMKKCGTVCKQIKPKLYLNNSVIHPIDSGEPFLYLGRYFDFGMTNTEHKNILMSKTANILRTINGLPLHPRNKVILYQRYLLSKISWHLTVADIETSWVKENLDNVVSKFIRIWLEIPISGSTRLLRRTKRKFGLGLTLISDRFIQCRVSFRNKLKSSKSRDIVEIYNATTGQNITYDQYKTTREAIKDIRNSNEKKIDTLTSQGLIIKSITAYADNAFTSHWHKALSTLPNNIYSFTIRYLNNTLANASNMLKWGQRESSACSLCNATETLGHVIGGCNTALNEKRYNWRHDSVLKNIANFISSNKKNAKVYCDIDDYNSPSIITGDTYRPDLLVIDKGKIYILELTIGFETNIEVNSKRKSEKYEFLLRFLGNNYQKVIFVNLSIGAIGAIGKSTHSVAKMLAEISYDKSQISYIIKKIICVVIRTTYYIFCQRSKAWDQPPLLYW

SEQ ID NO: 677 - protein, 1053 aa, Morbakka virulenta
MKASIIVICALLLGVCDYCKKEFSSVGRHQWRCKPRAEAGHHGSGIKTLPSVVNNHDPCNTNKLTCVCGRECKGLKGLKAHQRLCRTLMTLDDEVVNELNSHVNNNNNEITDAEVSHTLKETPSLKPGIKLPGNEQEWELANSYFKANLPYEEVLNQDLNINVENFNKTVYNYFVETHGTVNDSNEINSELSKRYNNYSKQQLKTELKKLKKSGKAFTVVIRFVAKLLRLKVQPSASEMLNKDHDIEISKNFWGYCKKFIEIPSRILPEFDKEKCNVFFRKAFKAVNPRKTFQIPDWIPSFDNPTHEFDLSPPSYNKICRIIKRMKSSGCPCPLDQIPVISLKRCPHLRSYITVICSEVFKRKSIPSLWQQAATILIYKKGEKSDPGNFRPITLEPVMLKIFTSLLRDRVFEFLVKNNYIEASIQKGFTPGLTGTYEHIASMTHAINDARRKQRSITITLIDLKNAFGEVNHNLIETVLKHHHIPDDIVTIIRILYSDFHTAILTNLFISDFIKLEKGVLQGDCFSPLIFNMLINTFVQYIKKDHFKQIGYKFLKHLIPRHWLQFADDAVAMSGQESENQILLNAFSRWCRWSDMIIKVEKCHTFGMKKCGTVCKQIKPKLYLNNSVIHPIDSGEPFLYLGRYFDFGMTNTEHKNILMSKTANILRTINGLPLHPRNKVILYQRYLLSKISWHLTVADIETSWVKENLDNVVSKFIRIWLEIPISGSTRLLRRTKRKFGLGLTLISDRFIQCRVSFRNKLKSSKSRDIVEIYNATTGQNITYDQYKTTREAIKDIRNSNEKKIDTLTSQGLIIKSITAYADNAFTSHWHKALSTLPNNIYSFTIRYLNNTLANASNMLKWGQRESSACSLCNATETLGHVIGGCNTALNEKRYNWRHDSVLKNIANFISSNKKNAKVYCDIDDYNSPSIITGDTYRPDLLVIDKGKIYILELTIGFETNVEVNSKRKSEKYEFLLSFLSKNYQKVIFVNLSIGAIGAIGKSTHSVAKMLAEISYDKSEISYIIKKIIYVVIRTTYYIFYQRSKTWDQPPLLYW

SEQ ID NO: 678 - protein, 1053 aa, Morbakka virulenta
MKASILVICALLLGVCDYCKKEFSSVGRHQWRCKSRAEVDHHGNGIKTLPSVVNNHDPCNTHKLTCVCGRECKGLRGLKAHQRLCRTLMTLDDEVVNELNSHVNNNINEITDAEVSHALKETPSLKPGIKLPVNEQDWELANSYFKANLSCEEVVNQDLNISVDNFNKTVYNYFVETHGTVNDSNGINSELSNRYNNYSKQQLKTELKKLKKSDKAFPVVIRFVAKLLRLKLQPSASEMLNKDHDTEISKNFWGYCKKFIEIPSRILPEFDKEKCNVFFRKAFKAVNPRKTFQIPDWIPSFDNPTHEFDLSPPSYNKICRIIKRMKSSGCPCPLDQIPVISLKRCPHLRSYITVICSEVFKRKSIPSLWQQAATILIYKKGEKSDPGNFRPITLEPVMLKIFTSLLRDRVFEFLVKNNYIEASIQKGFTPGLTGTYEHIASMTHAINDARRKQRSITITLIDLKNAFGEVNHNLIETVLKHHHIPDDIVTIIRILYSDFHTAILTNLFISDFIKLEKGVLQGDCFSPLIFNMLINTFVQYIKKDHFKQIGYKFLKHLIPRHWLQFADDAVAMSGQESENQILLNAFSRWCRWSDMIIKVEKCHTFGMKKCGTVCKQIKPKLYLNNSVIHPIDSGEPFLYLGRYFDFGMTNTEHKNILMSKTANILRTINGLPLHPRNKVILYQRYLLSKISWHLTVADIETSWVKENLDNVVSKFIRIWLEIPISGSTRLLRRTKRKFGLGLTLISDRFIQCRVSFRNKLKSSKSRDIVEIYNATTGQNITYDQYKTTREAIKDIRNSNEKKIDTLTSQGLIIKSITAYADNAFTSHWHKALSTLPNNIYSFTIRYLNNTLANASNMLKWGQRESSACSLCNATETLGHVIGGCNTALNEKRYNWRHDSVLKNIANFISSNKKNAKVYCDIDDYNSPSIITGDTYRPDLLVIDKGKIYILELTIGFETNIEVNSKRKSEKYEFLLRFLGKNYQKVIFVNLSIGAIGAIGKSTHSVAKMLAEISYDKSEISYIIKKIICVVIRTTYYIFCQRSKTWDQPPLLYW

SEQ ID NO: 679 - protein, 1053 aa, Morbakka virulenta
MKASILVICALLLGVCDYCKKEFSSVGRHQWRCKSRAEVDHHGNGIKTLPSVVNNHDPCNTNKLTCVCGRECKGLRGLKAHQRLCRTLMTLDDEVVNELNSHVNNNINEITDAEVSHALKETPSLKPGIKLPVNEQDWELANSYFKANLSCEEVVNQDLNISVDNFNKTVYNYFVETHGTVNDSNGINSELSNRYNNYSKQQLKTELKKLKKSDKAFPVVIRFVAKLLRLKLQPSASEMLNKDHDTEISKNFWGYCKKFIEIPSRILPEFDKEKCNVFFRKAFKAVNPRKTFQIPDWIPSFDNPTHEFDLSPPSYNKICRIIKRMKSSGCPCPLDQIPVISLKRCPHLRSYITVICSEVFKRKSIPSLWQQAATILIYKKGEKSDPGNFRPITLEPVMLKIFTSLLRDRVFEFLVKNNYIEASIQKGFTPGLTGTYEHIASMTHAINDARRKQRSITITLIDLKNAFGEVNHNLIETVLKHHHIPDDIVTIIRILYSDFHTAILTNLFISDFIKLEKGVLQGDCFSPLIFNMLINTFVQYIKKDHFKQIGYKFLKHLIPRHWLQFADDAVAMSGQESENQILLNAFSRWCRWSDMIIKVEKCHTFGMKKCGTVCKQIKPKLYLNNSVIHPIDSGEPFLYLGRYFDFGMTNTEHKNILMSKTANILRTINGLPLHPRNKVILYQRYLLSKISWHLTVADIETSWVKENLDNVVSKFIRIWLEIPISGSTRLLRRTKRKFGLGLTLISDRFIQCRVSFRNKLKSSKSRDIVEIYNATTGQNITYDQYKTTREAIKDIRNSNEKKIDTLTSQGLIIKSITAYADNAFTSHWHKALSTLPNNIYSFTIRYLNNTLANASNMLKWGQRESSACSLCNATETLGHVIGGCNTALNEKRYNWRHDSVFKNIANFISSNKKNAKVYCDIDDYNSPSIITGDTYRPDLLVIDKGKIYILELTIGFETNIEVNSKRKSEKYEFLLRFLGKNYQKVIFVNLSIGAIGAIGKSTHSVAKMLAEISYDKSEISYIIKKIICVIIRTTYYIFCQRSKTWDQPPLLYW

SEQ ID NO: 680 - protein, 1053 aa, Morbakka virulenta
MKASILVICALLLGVCDYCKKEFSSVGRHQWRCKSRAEVDHHGNGIKTLPSVVNNHDPCNTNKLTCVCGRECKGLRGLKAHQRLCRTLMTLDDEVVNELNSHVNNNINEITDAEVSHALKETPSLKPGIKLPVNEQDWELANSYFKANLSCEEVVNQDLNISVDNFNKTVYNYFVETHGTVNDSNGINSELSNRYNNYSKQQLKTELKKLKKSDKAFPVVIRFVAKLLRLKLQPSASEMLNKDHDTEISKNFWGYCKKFIEIPSRILPEFDKEKCNVFFRKAFKAVNPRKTFQIPDWIPSFDNPTHEFDLSPPSYNKICRIIKRMKSSGCPCPLDQIPVISLKRCPHLRSYITVICSEVFKRKSIPSLWQQAATILIYKKGEKSDPGNFRPITLEPVMLKIFTSLLRDRVFEFLVKNNYIEASIQKGFTPGLTGTYEHIASMTHAINDARRKQRSITITLIDLKNAFGEVNHNLIETVLKHHHIPDDIVTIIRILYSDFHTAILTNLFISDFIKLEKGVLQGDCFSPLIFNMLINTFVQYIKKDHFKQIGYKFLKHLIPRHWLQFADDAVAMSGQESENQILLNAFSRWCRWSDMIIKVEKCHTFGMKKCGTVCKQIKPKLYLNNSVIHPIDSGEPFLYLGRYFDFGMTNTEHKNILMSKTANILRTINGLPLHPRNKVILYQRYLLSKISWHLTVADIETSWVKENLDNVVSKFIRIWLEIPISGSTRLLRRTKRKFGLGLTLISDRFIQCRVSFRNKLKSSKSRDIVEIYNATTGQNITYDQYKTTREAIKDIRNSNEKKIDTLTSQGLIIKSITAYADNAFTSHWHKALSTLPNNIYSFTIRYLNNTLANASNMLKWGQRESSACSLCNATETLGHVIGGCNTALNEKRYNWRHDSVLKNIANFISSNKKNAKVYCDIDNYNSPSIITGDTYRPDLLVIDKGKIYIQELTIGFETNIEVNSKRKSEKYEFLLRFLGKNYQKVIFVNLSIGAIGTIGKSTHSVAKMLAEISYDKSEISYIIKKIICVVIRTTYYIFCQRSKTWDQPPLLYW

SEQ ID NO: 681 - protein, 1127 aa, Morbakka virulenta
MSVRKDVSNNDVNGAGTFCEGPSSGRGRNEASQVVILRNPRNTKRMKWTKEVNIVVMECYYRSNPFDENGVPVKGYRQRLHREWLDRGPFADITEQRICDQARAIRKNGWLTELELEMIRRRVLTPENETTAPGDEGYNLVDITEPEIRHDLNITVEEASEEERQMVNELKEIYNAGETAEGMMFKKVEYKRLNEVVKKVDSVLGFFDTKDITETNNLIIACSVWVSRQLGLKKSKKNGKARNEPWWKRRIEASIEDINKCINQLTRYRNGVVRSTVKIEKLFTRFRIKKKGLGTVLEELKQRVLAKKAKIDRYNERVTQFRQNRLFRGDQKKLFAELNGSNTGGNEIPDAEESQEFWSGIWSEEKQHNREAEWLESLREECNYPKQEELFVTTEMVTKQTRKIPNWKAPGRDGVQGYWIKRLSKLHERIAEQFNKILNTNVQVPEWLTFGRTVLCQKDTTKGNAVDNYRPISCLPLMWKLLTGIISEHLYKFLEDEDIFPDEQKGCKRNSRGTKDQLLLDKAILRDCKRRSTNLAMAWIDYRKAYDMIPHSWIDECLELFGVAENTKQFLLNSMKKWKLELSSGGTSLGIVHIKRGIFQGDGLSPLLFVLCMIPLTLILRKVKFHYEFGDKITRLNHLLFMDDLKLFGKSHDQIDSLVNTVYMFSEDIMMEFGVKKCGVLILKKGKVDKKSSKGITLPDGKVMKTIDEDGYRYLGILEYDKVKEKEMKDQFVKEYIRRTRLIMRSKLNGNNKIRATNTWAVAVLRYGSGILTWRVDELKDLDRKSRKILTMYKGFHPKSDVDRLYMRRREGGRGLMNCEDTVRSEENSIGFYLKNSEDSLLQAVKYVGIVEHETSVDKDDFKKSIAEKRKDNWCGKQMYGQFIRDQNESTDKEKTWSWVVASDLKATTEALIFAAQEQAIRTNYIKFHIDKTADSPNCRMCGERGETIGHLVSECKKLAQKEYKRRHDNVAKVIHWKLCGKLNFDRTEKWYEHTPQAVIEDDSHKLLWDMNIQCDNIIEARRPDLVIVDKNTKTAVIVDVAIPGDKRIQEKEQEKIEKYQDLKREIQRLWSLKKVVVIPIVLGALGSVTKNFEKYIEKLGIQIDTTLTQKTTLLGTARILRKVLEY

SEQ ID NO: 682 - protein, 1029 aa, Morbakka virulenta
MYIIIIIIIIIIIIIIIIIIIIIIIITPENETTAPGDEGYNLVDISEPEIRHDLNITVEEASEEERQMVNELKEIYNAGETAEGMMFKKVEYKRLNEVVKKVDSVLGFFDTKDITETNNLIIACSVWVSRQLGLKKSKKNGKARNEPWWKRRIEASIEDINKCINQLTRYRNGVVRSTVKIEKLFTRFRIKKKGLGTVLEELKQRVLAKKAKIDRYNERVTQFRQNRLFRGDQKKLFAELNGSNTGGNEIPDAEESQEFWSGIWSEEKQHNREAEWLESLREECNYPKQEELFVTTEMVTKQTRKIPNWKAPGRDGVQGYWIKRLSKLHERIAEQFNKILNTNVQVPEWLTFGRTVLCQKDTTKGNAVDNYRPISCLPLMWKLLTGIISEHLYKFLEDEDIFPDEQKGCKRNSRGTKDQLLLDKAILRDCKRRSTNLAMAWIDYRKAYDMIPHSWIDECLELFGVAENTKQFLLNSMKKWKLELSSGGTSLGIVHIKRGIFQGDSLSPLLFVLCMIPLTLILRKVKFHYEFGDKITRLNHLLFMDDLKLFGKSHDQIDSLVNTVYMFSEDIMMEFGVKKCGVLILKKGKVDKKSSKGITLPDGKVMKTIDEDGYRYLGILEYDKVKEKEMKDQFVKEYIRRTRLIMRSKLNGNNKIRATNTWAVAVLRYGSGILTWRVDELKDLDRKSRKILTMYKGFHPKSDVDRLYMRRREGGRGLMNCEDTVRSEENSIGFYLKNSEDSLLQAVKYVGIVEHETSVDKDDFKKSIAEKRKDNWCGKQMYGQFIRDQNESTDKEKTWSWVVASDLKATTEALIFAAQEQAIRTNYIKFHIDKTADSPNCRMCGERGETIGHLVSECKKLAQKEYKRRHDNVAKVVHWKLCGKLNFDRTEKWYEHTPQAVIEDDSHKLLWDMNIQCDNIIEARRPDLVIVDKNTKTAVIVDVAIPGDKRIQEKEQEKIEKYQDLKREIQRLWSLKKVVVIPIVLGALGSVTKNFEKYIEKLGIQIDTTLTQKTTLLGTARILRKVLEY

SEQ ID NO: 683 - protein, 1127 aa, Morbakka virulenta
MSVRKDVSNNDVNGAGTFCEGPSSGRGRNEASQVVILRNPRNTKRMKWTKEVNIVVMECYYRSNPFDENGVPVKGYRQRLHREWLDRGPFADITEQRICDQARAIRKNGWLTELELEMIRRRVLTPENETTAPGDEGYNLVDITEPEIRHDLNITVEEASEEERQMVNELKEIYNAGETAEGMMFKKVEYKRLNEVVKKVDSVLGFFDTKDITETNNLIIACSVWVSRQLGLKKSKKNGKARNEPWWKRRIEASIEDINKCINQLTRYRNGVVRSTVKIEKLFTRFRIKKKGLGTVLEELKQRVLAKKAKIDRYNERVTQFRQNRLFRGDQKKLFAELNGSNTGGNEIPDAEESQEFWSGIWSEEKQHNREAEWLESLREECNYPKQEELFVTTEMVTKQTRKIPNWKAPGRDGVQGYWIKRLSKLHERIAEQFNKILNTNVQVPEWLTFGRTVLCQKDTTKGNAVDNYRPISCLPLMWKLLTGIISEHLYKFLEDEDIFPDEQKGCKRNSRGTKDQLLLDKAILRDCKRRSTNLAMAWIDYRKAYDMIPHSWIDECLELFGVAENTKQFLLNSMKKWKLELSSGGTSLGIVHIKRGIFQGDSLSPLLFVLCMIPLTLILRKVKFHYEFGDKITRLNHLLFMDDLKLFGKSHDQIDSLVNTVYMFSEDIMMEFGVKKCGVLILKKGKVDKKSSKGITLPDGKVMKTIDEDGYRYLGILEYDKVKEKEMKDQFVKEYIRRTRLIMRSKLNGNNKIRATNTWAVAVLRYGSGILTWRVDELKDLDRKSRKILTMYKGFHPKSDVDRLYMRRREGGRGLMNCEDTVRSEENSIGFYLKNSEDSLLQAVKYVGIVEHETSVDKDDFKKSIAEKRKDNWCGKQMYGQFIRDQNESTDKEKTWSWVVASDLKATTEALIFAAQEQAIRTNYIKFHIDKTADSPNCRMCGERGETIGHLVSECKKLAQKEYKRRHDNVAKVIHWKLCGKLNFDRTEKWYEHTPQAVIEDDSHKLLWDMNIQCDNIIEARRPDLVIVDKITKTAVIVDVAIPGDKRIQEKEQEKIEKYQDLKREIQRLWSLKKVVVIPIVLGALGSVTKNFEKYIEKLGIQIDTTLTQKTTLLGTARILRKVLEY

SEQ ID NO: 684 - protein, 1127 aa, Morbakka virulenta
MSVRKDVSNNDVNGAGTFCEGPSSGRGRNEASQVVILRNPRNTKRMKWTKEVNIVVMECYYRSNPFDENGVPVKGYRQRLHREWLDRGPFADITEQRICDQARAIRKNGWLTELELEMIRRRVLTPENETTAPGDEGYNLVDITEPEIRHDLNITVEEASEEERQMVNELKEIYNAGETAEGMMFKKVEYKRLNEVVKKVDSVLGFFDTKDITETNNLIIACSVWVSRQLGLKKSKKNGKARNEPWWKRRIEASIEDINKCINQLTRYRNGVVRSTVKIEKLFTRFRIKKKGLGTVLEELKQRVLAKKAKIDRYNERVTQFRQNRLFRGDQKKLFAELNGSNTGGNEIPDAEESQEFWSGIWSEEKQHNREAEWLESLREECNYPKQEELFVTTEMVTKQTRKIPNWKAPGRDGVQGYWIKRLSKLHERIAEQFNKILNTNVQVPEWLTFGRTVLCQKDTTKGNAVDNYRPISCLPLMWKLLTGIISEHLYKFLEDEDIFPDEQKGCKRNSRGTKDQLLLDKAILRDCKRRSTNLAMAWIDYRKAYDMIPHSWIDECLELFGVAENTKQFLLNSMKKWKLELSSGGTSLGIVHIKRGIFQGDSLSPLLFVLCMIPLTLILRKVKFHYEFGDKITRLNHLLFMDDLKLFGKSHDQIDSLVNTVYMFSEDIMMEFGVKKCGVLILKKGKVDKKSSKGITLPDGKVMKTIDEDGYRYLGILEYDKVKEKEMKDQFVKEYIRRTRLIMRSKLNGNNKIRATNTWAVAVLRYGSGILTWRVDELKDLDRKSRKILTMYKGFHPKSDVDRLYMRRREGGRGLMNCEDTVRSEENSIGFYLKNSEDSLLQAVKYVGIVEHETSVDKDDFKKSIAEKRKDNWCGKQMYGQFIRDQNESTDKEKTWSWVVASDLKATTEALIFAAQEQAIRTNYIKFHIDKTADSPNCRMCGERGETIGHLVSECKKLAQKEYKRRHDNVAKVIHWKLCGKLNFDRTEKWYEHTPQAVIEDDSHKLLWDMNIQCDNIIEARRPDLVIVDKNTKTAVIVDVAIPGDKRIQEKEQEKIEKYQDLKREIQRLWSLKKVVVIPIVVGALGSVTKNFEKYIEKLGIQIDTTLTQKTTLLGTARILRKVLEY

SEQ ID NO: 685 - protein, 1092 aa, Morbakka virulenta
MSVRKDVSNNDVNGAGTFCEGPSSGRGRNEASQVVILRNPRNTKRMKWTKEVNIVVMECYYRSNPFDENGVPVKGYRQRLHREWLDRGPFADITEQRICDQARAIRKKGWLTELELEMIRRRVLTPENEMTAPGDEGYNLVDITEPEIRHDLNITVEEASEEERQMVNELKEIYNAGETAEGMMFKKVEYKRLNEVVKKVDSVLGFFDTKDITETNNLIIACSVWVSRQLGLKKSKKNGKARNEPWWKRRIEASIEDINKCINQLTRYRNGVVRSTVKIEKLFTRFRIKKKGLGTVLEELKQRVLAKKAKIDRYNERVTQFRQNRLFRGDQKKLFAELNGSNTGGNEIPDAEESQEFWSGIWSEEKQHNREAEWLESLREECNYPKQEELFVTTEMVTKQTRKIPNWKAPGRDGVQGYWIKRLSKLHERIAEQFNKILNTNVQVPEWLTFGRTVLCQKDTTKGNAVDNYRPISCLPLMWKLLTGIISEHLYKFLEDEDIFPDEQKGCKRNSRGTKDQLLLDKAILRDCKRRSTNLAMAWIDYRKAYDMIPHSWIDECLELFGVAENTKQFLLNSMKKWKLELSSGGTSLGIVHIKRGIFQGDSLSPLLFVLCMIPLTLILRKVKFHYEFGDKITRLNHLLFMDDLKLFGKSHDQIDSLVNTVYMFSEDIMMEFGVKKCGVLILKKGKVDKKSSKGITLPDGKVMKTIDEDGYRYLGILEYDKVKEKEMKDQFVKEYIRRTRLIMRSKLNGNNKIRATNTWAVAVLRYGSGILTWRVDELKDLDRKSRKILTMYKGFHPKSDVDRLYMRRREGGRGLMNCEDTVRSEENSIGFYLKNSEDSLLQAVKYVGIVEHETSVDKDDFKKSIAEKRKDNWCGKQMYGQFIRDQNESTDKEKTWSWVVASDLKATTEALIFAAQEQAIRTNYIKFHIDKTADSPNCRMCGERGETIGHLVSECKKLAQKEYKRRHDNVAKVIHWKLCGKLNFDRTEKWYEHTPQAVIEDDSHKLLWDMNIQCDNIIEARRPDLVIVDKNTKTAVIVDVAIPGDKRIQEKEQEKIEKYQDLKREIQRLWSLKKVVVIPIVFESRKRNQEL

SEQ ID NO: 686 - protein, 987 aa, Morbakka virulenta
MSVRKDVSNNDVNGAGPFCEGPSSGRGRNEASQVVILRNPRNTKRMKWTKEVNIVVMECYYRSNPFDENGVPVKGYRQRLHREWLDRGPFADITEQRICDQARAIRKNGWLTELELEMIRRRVLTPENEMTAPGDEGYNLVDITEPEIRHDLNITVEEASEEERQMVNELKEIYNAGETAEGMMFKKVEYKRLNEVVKKVDSVLGFFDTKDITETNNLIIACSVWVSRQLGLKKSKKNGKARNEPWWKRRIEASIEDINKCINQLTRYRNGVVRSTVKIEKLFTRFRIKKKGLGTVLEELKQRVLAKKAKIDRYNERVTQFRQNRLFRGDQKKLFAELNGSNTGGNEIPDAEESQEFWSGIWSEEKQHNREAEWLESLREECNYPKQEELFVTTEMVTKQTRKIPNWKAPGRDGVQGYWIKRLSKLHERIAEQFNKILNTNVQVPEWLTFGRTVLCQKDTTKGNAVDNYRPISCLPLMWKLLTGIISEHLYKFLEDEDIFPDEQKGCKRNSRGTKDQLLLDKAILRDCKRRSTNLAMAWIDYRKAYDMIPHSWIDECLELFGVAENTKQFLLNSMKKWKLELSSGGTSLGIVHIKRGIFQGDSLSPLLFVLCMIPLTLILRKVKFHYEFGDKITRLNHLLFMDDLKLFGKSHDQIDSLVNTVYMFSEDIMMEFGVKKCGVLILKKGKVDKKSSKGITLPDGKVMKTIDEDGYRYLGILEYDKVKEKEMKDQFVKEYIRRTRLIMRSKLNGNNKIRATNTWAVAVLRYGSGILTWRVDELKDLDRKSRKILTMYKGFHPKSDVDRLYMRRREGGRGLMNCEDTVRSEENSIGFYLKNSEDSLLQAVKYVGIVEHETSVDKDDFKKSIAEKRKDNWCGKQMYGQFIRDQNESTDKEKTWSWVVASDLKATTEALIFAAQEQAIRTNYIKFHIDKTADSPNCRMCGERGETIGHLVSECKKLAQKEYKRRHDNVAKVIHWKLCGKLNFVY

SEQ ID NO: 687 - protein, 1127 aa, Morbakka virulenta
MSVRKDVSNNDVNGAGTFCEGPSSGRGRNEASQVVILRNPRNTKRMKWTKEVNIVVMECYYRSNPFDENGVPVKGYRQRLHREWLDRGPFADITEQRICDQARAIRKNGWLTELELEMIRRRVLTPENETTAPGDEGYNLVDITEPEIRHDLNITVEEASEEERQMVNELKEIYNAGETAEGMMFKKVEYKRLNEVVKKVDSVLGFFDTKDITETNNLIIACSVWVSRQLGLKKSKKNGKARNEPWWKRRIEASIEDINKCINQLTRYRNGVVRSTVKIEKLFTRFRIKKKGLGTVLEELKQRVLAKKAKIDRYNERVTQFRQNRLFRGDQKKLFAELNGSNTGGNEIPDAEESQEFWSGIWSEEKQHNREAEWLESLREECNYPKQEELFVTTEMVTKQTRKIPNWKAPGRDGVQGYWIKRLSKLHERIAEQFNKILNTNVQVPEWLTFGRTVLCQKDTTKGNAVDNYRPISCLPLMWKLLTGIISEHLYKFLEDEDIFPDEQKGCKRNSRGTKDQLLLDKAILRDCKRRSTNLAMAWIDYRKAYDMIPHSWIDECLELFGVAENTKQFLLNSMKKWKLELSSGGTSLGIVHIKRGIFQGDSLSPLLFVLCMIPLTLILRKVKFHYEFGDKITRLNHLLFMDDLKLFGKSHDQIDSLVNTVYMFSEDIMMEFGVKKCGVLILKKGKVDKKSSKGITLPDGKVMKTIDEDGYRYLGILEYDKVKEKEMKDQFVKEYIRRTRLIMRSKLNGNNKIRATNTWAVAVLRYGSGILTWRVDELKDLDRKSRKILTMYKGFHPKSDVDRLYMRRREGGRGLMNCEDTVRSEENSIGFYLKNSEDSLLQAVKYVGIVEHETSVDKDDFKKSIAEKRKDNWCGKQMYGQFIRDQNESTDKEKTWSWVVASDLKATTEALIFAAQEQAIRTNYIKFHIDKTADSPNCRMCGERGETIGHLVSECKKLAQKEYKRRHDNVAKVIHWKLCGKLNFDRTEKWYEHTPQAVIEDDSHKLLWDMNIQCDNIIEARRPDLVIVDKNTKTAVIVDVAIPGDKRIQEKEQEKIEKYQDLKREIQRLWSLKKVVVIPIVLGALGSVTKNFEKYIEKLGIQIDTTLTQKTTLLGTARILRKVLEY

SEQ ID NO: 688 - protein, 1082 aa, Morbakka virulenta
MKWTKEVNIVVMECYYRSNPFDENGVPVKGYRQRLHREWLDRGPFADITEQRICVQARAIRKNGWLTELELEMIRGRVLTPENETTAPGDEGYNLVDITEPEIRHDLNITVEEASEEERQMVNELKEIYNAGETAEGMMFKKVEYKRLNEVVKKVDSVLGFFDTKDITETNNLIIACSVWVSRQLGLKKSKKNGKARNEPWWKRRIEASIEDINKCINQLTRYRNGVVRSTVKIEKLFTRFRIKKKGLGTVLEELKQRVLAKKAKIDRYNERVTQFRQNRLFRGDQKKLFAELNGSNTGGNEIPDAEESQEFWSGIWSEEKQHNREAEWLESLREECNYPKQEELFVTTEMVTKQTRKIPNWKAPGRDGVQGYWIKRLSKLHERIAEQFNKILNTNVQVPEWLTFGRTVLCQKDTTKGNAVDNYRPISCLPLMWKLLTGIISEHLYKFLEDEDIFPDEQKGCKRNSRGTKDQLLLDKAILRDCKRRSTNLAMAWIDYRKAYDMIPHSWIDECLELFGVAENTKQFLLNSMKKWKLELSSGGTSLGIVHIKRGIFQGDSLSPLLFVLCMIPLTLILRKVKFHYEFGDKITRLNHLLFMDDLKLFGKSHDQIDSLVNTVYMFSEDIMMEFGVKKCGVLILKKGKVDKKSSKGITLPDGKVMKTIDEDGYRYLGILEYDKVKEKEMKDQFVKEYIRRTRLIMRSKLNGNNKIRATNTWAVAVLRYGSGILTWRVDELKDLDRKSRKILTMYKGFHPKSDVDRLYMRRREGGRGLMNCEDTVRSEENSIGFYLKNSEDSLLQAVKYVGIVEHETSVDKDDFKKSIAEKRKDNWCGKQMYGQFIRDQNESTDKEKTWSWVVASDLKATTEALIFAAQEQAIRTNYIKFHIDKTADSPNCRMCGERGETIGHLVSECKKLAQKEYKRRHDNVAKVIHWKLCGKLNFDRTEKWYEHTPQAVIEDDSHKLLWDMNIQCDNIIEARRPDLVIVDKNTKTAVIVDVAIPGDKRIQEKEQEKIEKYQDLKREIQRLWSLKKVVVIPIVLGALGSVTKNFEKYIEKLGIQIDTTLTQKTTLLGTARILRKVLEY

SEQ ID NO: 689 - protein, 1127 aa, Morbakka virulenta
MSVRKDVSNNDVNGAGTFCEGPSSGRGRNEASQVVILRNPRNTKRMKWTKEVNIVVMECYYRSNPFDENGVPVKGYRQRLHREWLDRGPFADITEQRICDQARAIRKNGWLTELELEMIRRRVLTPENETTAPGDEGYNLVDITEPEIRHDLNITVEEASEEERQMVNELKEIYNAGETAEGMMFKKVEYKRLNEVVKKVDSVLGFFDTKDITETNNLIIACSVWVSRQLGLKKSKKNGKARNEPWWKRRIEASIEDINKCINQLTRYRNGVVRSTVKIEKLFTRFRIKKKGLGTVLEELKQRVLAKKAKIDRYNERVTQFRQNRLFRGDQKKLFAELNGSNTGGNEIPDAEESQEFWSGIWSEEKQHNREAEWLESLREECNYPKQEELFVTTEMVTKQTRKIPNWKAPGRDGVQGYWIKRLSKLHERIAEQFNKILNTNVQVPEWLTFGRTVLCQKDTTKGNAVDNYRPISCLPLMWKLLTGIISEHLYKFLEDEDIFPDEQKGCKRNSRGTKDQLLLDKAILRDCKRRSTNLAMAWIDYRKAYDMIPHSWIDECLELFGVAENTKQFLLNSMKKWKLELSSGGTSLGIVHIKRGIFQGDSLSPLLFVLCMIPLTLILRKVKFHYEFGDKITRLNHLLFMDDLKLFGKSHDQIDSLVNTVYMFSEDIMMEFGVKKCGVLILKKGKVDKKSSKGITLPDGKVMKTIDEDGYRYLGILEYDKVKEKEMKDQFVKEYIRRTRLIMRSKLNGNNKIRATNTWAVAVLRYGSGILTWRVDELKDLDRKSRKILTMYKGFHPKSDVDRLYMRRREGGRGLMNCEDTVRSEENSIGFYLKNSEDSLLQAVKYVGIVEHETSVDKDDFKKSIAEKRKDNWCGKQMYGQFIRDQNESTDKEKTWSWVVASDLKATTEALIFAAQEQAIRTNYIKFHIDKTADSPNCRMCGERGETIGHLVSECKKLAQKEYKRRHDNVAKVIHWKLCGKLNFDRTEKWYEHTPQAVIEDDSHKLLWDMNIQCDNIIEARRPDLVIVDKITKTAVIVDVAIPGDKRIQEKEQEKIEKYQDLKREIQRLWSLKKVVVIPIVLGALGSVTKNFETYIEKLGIQIDTTLTKKTTLLGTTRILRKVLEY

SEQ ID NO: 690 - protein, 1127 aa, Morbakka virulenta
MSVRKDVSNNDVNGPGTFCEGPSSGRGRNEASQVVILRNPRNTKRMKWTKEVNIVVMECYYRSNPFDENGVPVKGYRQRLHREWLDRGPFADITEQRICDQARAIRKNGWLTELELEMIRRRVLTPENETTAPGDEGYNLVDITEPEIRHDLNITVEEASEEERQMVNELKEIYNAGETAEGMMFKKVEYKRLNEVVKKVDSVLGFFDTKDITETNNLIIACSVWVSRQLGLKKSKKNGKARNEPWWKRRIEASIEDINKCINQLTRYRNGVVRSTVKIEKLFTRFRIKKKGLGTVLEELKQRVLAKKAKIDRYNERVTQFRQNRLFRGDQKKLFAELNGSNTGGNEIPDAEESQEFWSGIWSEEKQHNREAEWLESLREECNYPKQEELFVTTEMVTKQTRKIPNWKAPGRDGVQGYWIKRLSKLHERIAEQFNKILNTNVQVPEWLTFGRTVLCQKDTTKGNAVDNYRPISCLPLMWKLLTGIISEHLYKFLEDEDIFPDEQKGCKRNSRGTKDQLLLDKAILRDCKRRSTNLAMAWIDYRKAYDMIPHSWIDECLELFGVAENTKQFLLNSMKKWKLELSSGGTSLGIVHIKRGIFQGDSLSPLLFVLCMIPLTLILRKVKFHYEFGDKITRLNHLLFMDDLKLFGKSHDQIDSLVNTVYMFSEDIMMEFGVKKCGVLILKKGKVDKKSSKGITLPDGKVMKTIDEDGYRYLGILEYDKVKEKEMKDQFVKEYIRRTRLIMRSKLNGNNKIRATNTWAVAVLRYGSGILTWRVDELKDLDRKSRKILTMYKGFHPKSDVDRLYMRRREGGRGLMNCEDTVRSEENSIGFYLKNSEDSLLQAVKYVGIVEHETSVDKDDFKKSIAEKRKDNWCGKQMYGQFIRDQNESTDKEKTWSWVVASDLKATTEALIFAAQEQAIRTNYIKFHIDKTADSPNCRMCGERGETIGHLVSECKKLAQKEYKRRHDNVAKVIHWKLCGKLNFDRTEKWYEHTPQAVIEDDSHKLLWDMNIQCDNIIEARRPDLVIVDKITKTAVIVDVAIPGDKRIQEKEQEKIEKYQDLKREIQRLWSLKKVVVIPIVLGALGSVTKNFEKYIEKLGIQVDTTLTQKTTLLGTARMLRKVLEY

SEQ ID NO: 691 - protein, 1127 aa, Morbakka virulenta
MSVRKDVSNNDVNGAGTFCEGPSSGRGRNEASQVVILRNPRNTKRMKWTKEVNIVVMECYYRSNPFDENGVPVKGYRQRLHREWLDRGPFADITEQRICDQARAIRKNGWLTELELEMIRRRVLTPENETTAPGDEGYNLVDITEPEIRHDLNITVEEASEEERQMVNELKEIYNAGETAEGMMFKKVEYKRLNEVVKKVDSVLGFFDTKDITETNNLIIACSVWVSRQLGLKKSKKNGKARNEPWWKRRIEASIEDINKCINQLTRYRNGVVRSTVKIEKLFTRFRIKKKGLGTVLEELKQRVLAKKAKIDRYNERVTQFRQNRLFRGDQKKLFAELNGSNTGGNEIPDAEESQEFWSGIWSEEKQHNREAEWLESLREECNYPKQEELFVTTEMVTKQTRKIPNWKAPGRDGVQGYWIKRLSKLHERIAEQFNKILNTNVQVPEWLTFGRTVLCQKDTTKGNAVDNYRPISCLPLMWKLLTGIISEHLYKFLEDEDIFPDEQKGCKRNSRGTKDQLLLDKAILRDCKRRSTNLAMAWIDYRKAYDMIPHSWIDECLELFGVAENTKQFLLNSMKKWKLELSSGGTSLGIVHIKRGIFQGDSLSPLLFVLCMIPLTLILRKVKFHYEFGDKITRLNHLLFMDDLKLFGKSHDQIDSLVNTVYMFSEDIMMEFGVKKCGVLILKKGKVDKKSSKGITLPDGKVMKTIDEDGYRYLGILEYDKVKEKEMKDQFVKEYIRRTRLIMRSKLNGNNKIRATNTWAVAVLRYGSGILTWRVDELKDLDRKSRKILTMYKGFHPKSDVDRLYMRRREGGRGLMNCEDTVRSEENSIGFYLKNSEDSLLQAVKYVGIVEHETSVDKDDFKKSIAEKRKDNWCGKQMYGQFIRDQNESTDKEKTWSWVVASDLKATTEALIFAAQEQAIRTNYIKFHIDKTADSPNCRMCGERGETIGHLVSECKKLAQKEYKRRHDNVAKVIHWKLCGKLNFDRTEKWYEHTPQAVIEDDSHKLLWDMNIQCDNIIEARRPDLVIVDKNTKTAVIVDVAIPGDKRIQEKEQEKIEKYQDLKREIQRLWSLKKVVVIPIVLGALGSVTKNFEKYIEKLGIQRDTTLTQKTTLLGTARILRKVLEY

SEQ ID NO: 692 - protein, 1127 aa, Morbakka virulenta
MSVRKDVSNNDVNGAGTFCEGPSSGRGRNEASQVVILRNPRNTKRMKWTKEVNIVVMECYYRSNPFDENGVPVKGYRQRLHREWLDRGPFADITEQRICDQARAIRKNGWLTELELEMIRRRVLTPENETTAPGDEGYNLVDITEPEIRHDLNITVEEASEEERQMVNELKEIYNAGETAEGMMFKKVEYKRLNEVVKKVDSVLGFFDTKDITETNNLIIACSVWVSRQLGLKKSKKNGKARNEPWWKRRIEASIEDINKCINQLTRYRNGVVRSTVKIEKLFTRFRIKKKGLGTVLEELKQRVLAKKAKIDRYNERVTQFRQNRLFRGDQKKLFAELNGSNTGGNEIPDAEESQEFWSGIWSEEKQHNREAEWLESLREECNYPKQEELFVTTEMVTKQTRKIPNWKAPGRDGVQGYWIKRLSKLHERIAEQFNKILNTNVQVPEWLTFGRTVLCQKDTTKGNAVDNYRPISCLPLMWKLLTGIISEHLYKFLEDEDIFPDEQKGCKRNSRGTKDQLLLDKAILRDCKRRSTNLAMAWIDYRKAYDMIPHSWIDECLELFGVAENTKQFLLNSMKKWKLELSSGGTSLGIVHIKRGIFQGDSLSPLLFVLCMIPLTLILRKVKFHYEFGDKITRLNHLLFMDDLKLFGKSHDQIDSLVNTVYMFSEDIMMEFGVKKCGVLILKKGKVDKKSSKGITLPDGKVMKTIDEDGYRYLGILEYDKVKEKEMKDQFVKEYIRRTRLIMRSKLNGNNKIRATNTWAVAVLRYGSGILTWRVDELKDLDRKSRKILTMYKGFHPKSDVDRLYMRRREGGRGLMNCEDTVRSEENSIGFYLKNSEDSLLQAVKYVGIVEHETSVDKDDFKKSIAEKRKDNWCGKQMYGQFIRDQNESTDKEKTWSWVVASDLKATTEALIFAAQEQAIRTNYIKFHIDKTADSPNCRMCGERGETIGHLVSECKKLAQKEYKRRHDNVAKVIHWKLCGKLNFDRTEKWYEHTPQAVIEDDSHKLLWDMNIQCDNIIEARRPDLVIVDKNTKTAVIVDVAIPGDKRIQEKEQEKIEKYQDLKREIQRLWSLKKVVVIPIVLGALESVTKNFEKYIEKLGIQIDTTLTQKTTLLGTTRILRKVLEY

SEQ ID NO: 693 - protein, 1114 aa, Morbakka virulenta
MSVRKDVSNNDVNGAGTFCEGPSSGRGRNEASQVVILRNPRNTKRMKWTKEVNIVVMECYYRSNPFDENGVPVKGYRQRLHREWLDRGPFADITEQRICDQARAIRKNGWLTELELEMIRRRVLTPENETTAPGDEGYNLVDITEPEIRHDLNITVEEASEEERQMVNELKEIYNAGETAEGMMFKKVEYKRLNEVVKKVDSVLGFFDTKDITETNNLIIACSVWVSRQLGLKKSKKNGKARNEPWWKRRIEASIEDINKCINQLTRYRNGVVRSTVKIEKLFTRFRIKKKGLGTVLEELKQRVLAKKAKIDRYNERVTQFRQNRLFRGDQKKLFAELNGSNTGGNEIPDAEESQEFWSGIWSEEKQHNREAEWLESLREECNYPKQEELFVTTEMVTKQTRKIPNWKAPGRDGVQGYWIKRLSKLHERIAEQFNKILNTNVQVPEWLTFGRTVLCQKDTTKGNAVDNYRPISCLPLMWKLLTGIISEHLYKFLEDEDIFPDEQKGCKRNSRGTKDQLLLDKAILRDCKRRSTNLAMAWIDYRKAYDMIPHSWIDECLELFGVAENTKQFLLNSMKKWKLELSSGGTSLGIVHIKRGIFQGDSLSPLLFVLCMIPLTLILRKVKFHYEFGDKITRLNHLLFMDDLKLFGKSHDQIDSLVNTVYMFSEDIMMEFGVKKCGVLILKKGKVDKKSSKGITLPDGKVMKTIDEDGYRYLGILEYDKVKEKEMKDQFVKEYIRRTRLIMRSKLNGNNKIRATNTWAVAVLRYGSGILTWRVDELKDLDRKSRKILTMYKGFHPKSDVDRLYMRRREGGRGLMNCEDTVRSEENSIGFYLKNSEDSLLQAVKYVGIVEHETSVDKDDFKKSIAEKRKDNWCGKQMYGQFIRDQNESTDKEKTWSWVVASDLKATTEALIFAAQEQAIRTNYIKFHIDKTADSPNCRMCGERGETIGHLVSECKKLAQKEYKRRHDNVAKVIHWKLCGKLNFDRTEKWYEHTPQAVIEDDSHKLLWDMNIQCDNIIEARRPDLVIVDKNTKTAVIVDVAIPGDKRIQEKEQEKIEKYQDLKREIQRLWSLKKVVVIPIVLGALGSVTKNFEKYIEKLGIQIDTTLTQKLHY

SEQ ID NO: 694 - protein, 1127 aa, Morbakka virulenta
MSVRKDVSNNDVNGAGTFCEGPSSGRGRNEASQVVILRNPRNTKRMKWTKEVNIVVMECYYRSNPFDENGVPVKGYRQRLHREWLDRGPFADITEQRICDQARAIRKNGWLTELELEMIRRRVLTPENEMTAPGDEGYNLVDITEPEIRHDLNITVEEASEEERQMVNELKEIYNAGETAEGMMFKKVEYKRLNEVVKKVDSVLGFFDTKDITETNNLIIACSVWVSRQLGLKKSKKNGKARNEPWWKRRIEASIEDINKCINQLTRYRNGVVRSTVKIEKLFTRFRIKKKGLGTVLEELKQRVLAKKAKIDRYNERVTQFRQNRLFRGDQKKLFAELNGSNTGGNEIPDAEESQEFWSGIWSEEKQHNREAEWLESLREECNYPKQEELFVTTEMVTKQTRKIPNWKAPGRDGVQGYWIKRLSKLHERIAEQFNKILNTNVQVPEWLTFGRTVLCQKDTTKGNAVDNYRPISCLPLMWKLLTGIISEHLYKFLEDEDIFPDEQKGCKRNSRGTKDQLLLDKAILRDCKRRSTNLAMAWIDYRKAYDMIPHSWIDECLELFGVAENTKQFLLNSMKKWKLELSSGGTSLGIVHIKRGIFQGDGLSPLLFVLCMIPLTLILRKVKFHYEFGDKITRLNHLLFMDDLKLFGKSHDQIDSLVNTVYMFSEDIMMEFGVKKCGVLILKKGKVDKKSSKGITLPDGKVMKTIDEDGYRYLGILEYDKVKEKEMKDQFVKEYIRRTRLIMRSKLNGNNKIRATNTWAVAVLRYGSGILTWRVDELKDLDRKSRKILTMYKGFHPKSDVDRLYMRRREGGRGLMNCEDTVRSEENSIGFYLKNSEDSLLQAVKYVGIVEHETSVDKDDFKKSIAEKRKDNWCGKQMYGQFIRDQNESTDKEKTWSWVVASDLKATTEALIFAAQEQAIRTNYIKFHIDKTADSPNCRMCGERGETIGHLVSECKKLAQKEYKRRHDNVAKVIHWKLCGKLNFDRTEKWYEHTPQAVIEDDSHKLLWDMNIQCDNIIEARRPDLVIVDKNTKTAVIVDVAIPGDKRIQEKEQEKIEKYQDLKREIQRLWSLKKVVVIPIVLGALGSVTKNFEKYIEKLGIQIDTTLTQKTTLLGTARILKKVLEY

SEQ ID NO: 695 - protein, 732 aa, Morbakka virulenta
MVTKQTRKIPNWKAPGRDGVQGYWIKRLSKLHERIAEQFNKILNTNVQVPEWLTFGRTVLCQKDTTKGNAVDNYRPISCLPLMWKLLTGIISEHLYKFLEDEDIFPDEQKGCKRNSRGTKDQLLLDKAILRDCKRRSTNLAMAWIDYRKAYDMIPHSWIDECLELFGVAENTKQFLLNSMKKWKLELSSGGTSLGIVHIKRGIFQGDSLSPLLFVLCMIPLTLILRKVKFHYEFGDKITRLNHLLFMDDLKLFGKSHDQIDSLVNTVYMFSEDIMMEFGVKKCGVLILKKGKVDKKSSKGITLPDGKVMKTIDEDGYRYLGILEYDKVKEKEMKDQFVKEYIRRTRLIMRSKLNGNNKIRATNTWAVAVLRYGSGILTWRVDELKDLDRKSRKILTMYKGFHPKSDVDRLYMRRREGGRGLMNCEDTVRSEENSIGFYLKNSEDSLLQAVKYVGIVEHETSVDKDDFKKSIAEKRKDNWCGKQMYGQFIRDQNESTDKEKTWSWVVASDLKATTEALIFAAQEQAIRTNYIKFHIDKTADSPNCRMCGERGETIGHLVSECKKLAQKEYKRRHDNVAKVIHWKLCGKLNFDRTEKWYEHTPQAVIEDDSHKLLWDMNIQCDNIIEARRPDLVIVDKNTKTAVIVDVAIPGDKRIQEKEQEKIEKYQDLKREIQRLWSLKKVVVIPIVLGALGSVTKNFEKYIEKLGIQIDTTLTQKTTLLGTARILRKVLEY

SEQ ID NO: 696 - protein, 1127 aa, Morbakka virulenta
MSVRKDVSNNDVNGAGTFCEGPSSGRGRNEASQVVILRNPRNTKRMKWTKEVNIVVMECYYRSNPFDENGVPVKGYRQRLHREWLDRGPFADITEQRICDQARAIRKNGWLTELELEMIRRRVLTPENETTAPGDEGYNLVDITEPEIRHDLNITVEEASEEERQMVNELKEIYNAGETAEGMMFKKVEYKRLNEVVKKVDSVLGFFDTKDITETNNLIIACSVWVSRQLGLKKSKKNGKARNEPWWKRRIEASIEDINKCINQLTRYRNGVVRSTVKIEKLFTRFRIKKKGLGTVLEELKQRVLAKKAKIDRYNERVTQFRQNRLFRGDQKKLFAELNGSNTGGNEIPDAEESQEFWSGIWSEEKQHNREAEWLESLREECNYPKQEELFVTTEMVTKQTRKIPNWKAPGRDGVQGYWIKRLSKLHERIAEQFNKILNTNVQVPEWLTFGRTVLCQKDTTKGNAVDNYRPISCLPLMWKLLTGIISEHLYKFLEDEDIFPDEQKGCKRNSRGTKDQLLLDKAILRDCKRRSTNLAMAWIDYRKAYDMIPHSWIDECLELFGVAENTKQFLLNSMKKWKLELSSGGTSLGIVHIKRGIFQGDSLSPLLFVLCMIPLTLILRKVKFHYEFGDKITRLNHLLFMDDLKLFGKSHDQIDSLVNTVYMFSEDIMMEFGVKKCGVLILKKGKVDKKSSKGITLPDGKVMKTIDEDGYRYLGILEYDKVKEKEMKDQFVKEYIRRTRLIMRSKLNGNNKIRATNTWAVAVLRYGSGILTWRVDELKDLDRKSRKMLTMYKGFHPKSDVDRLYMSRREGGRGLMNCEDTVRSEENSIGFYLKNSEDSLLQAVKYVGNVEHETSVDKDDFKKSIAEKRKDNWCGKQMYGQFIRDQNKSTDKEKTWSLVVACDLKAPTEALIFAAQEQAIRTSYIKFHIDKTADSPSCRMCGEKGETISHLVSECKKLAQKEYKRRHDNVAKVVHWKLCGKLNFDRTEKWYEHTPQNVIEDGSHKLLWDMNIQCDNIIEARRPDLVIVDKITKTAVIVDVAIPRDKRIQVKEQEKIEKYQDLKREIQRLWRLKKVVVIPIVLGALGSITKNFEKYIEKIGIQIDTTLTPKTTLLGTERILRKVLEY

SEQ ID NO: 697 - protein, 1127 aa, Morbakka virulenta
MSVRKDVSNSDVNGAGTFCEGPSSGMGRNEASQVVIPRNPRNTKRMKWTKEVNIVVMECYYRSNPFNENGVPVKGYRQRLHREWLDRGPFADITEQRICDQARAIRKNGWLAEPELEMVRRRVLTSENETTASADESYNLVDITEREIRHDLNITVEEASEEERQMVNELKEIYNAGETAEGMMFKKVEYKRLNEVVKKVDSVLGFFDTKDITETNNLIIACSVWVSRQLGLKKSKKNGKARNEPWWKRRIEASIEDINKCINQLTRYRNGVVRSTVKIEKLFTRFRIKKKGLGTVLEELKQRVLAKKAKIDRYNERVTQFRQNRLFRGDQKKLFAELNGSNTGGNEIPDAEESQEFWSGIWSEEKQHNREAEWLESLREECNYPKQEELFVTTEMVTKQTRKIPNWKAPGRDGVQGYWIKRLSKLHERIAEQFNKILNTNVQVPEWLTFGRTVLCQKDTTKGNAVDNYRPISCLPLMWKLLTGIISEHLYKFLEDEDIFPDEQKGCKRNSRGTKDQLLLDKAILRDCKRRSTNLAMAWIDYRKAYDMIPHSWIDECLELFGVAENTKQFLLNSMKKWKLELSSGGTSLGIVHIKRGIFQGDSLSPLLFVLCMIPLTLILRKVKFHYEFGDKITRLNHLLFMDDLKLFGKSHDQIDSLVNTVYMFSEDIMMEFGVKKCGVLILKKGKVDKKSSKGITLPDGKVMKTIDEDGYRYLGILEYDKVKEKEMKDQFVKEYIRRTRLIMRSKLNGNNKIRATNTWAVAVLRYGSGILTWRVDELKDLDRKSRKILTMYKGFHPKSDVDRLYMRRREGGRGLMNCEDTVRSEENSIGFYLKNSEDSLLQAVKYVGIVEHETSVDKDDFKKSIAEKRKDNWCGKQMYGQFIRDQNESTDKEKTWSWVVASDLKATTEALIFAAQEQAIRTNYIKFHIDKTADSPNCRMCGERGETIGHLVSECKKLAQKEYKRRHDNVAKVIHWKLCGKLNFDRTEKWYEHTPQAVIEDDSHKLLWDMNIQCDNIIEARRPDLVIVDKIAKTAVIVDVAIPGDKRIQEKEQEKIENYQDLKREIQRLWSLKKVVVIPIVLGALGSVTKNFEKYIEKLGIQLDTTLTQKTTLLGTARILRKVLEY

SEQ ID NO: 698 - protein, 1035 aa, Morbakka virulenta
MKRTKEVNIVVMECYYRSNPFDENGVPVKGYRQRLHREWLDRGPFADITEQRICDQARAIRKNGWLTELELEMIRRRVLTPENETTAPGDEGYNLVDITEPEIRHDLNITVEEASEEERQMVNELKEIYNAGETAEGMMFKKVEYKRLNEVVKKVDSVLGFFDTKDITETNNLIIACSVWVSRQLGLKKSKKNGKARNEPWWKRRIEASIEDINKCINQLTRYRNGVVRSTVKIEKLFTRFRIKKKGLGTVLEELKQRVLAKKAKIDRYNERVTQFRQNRLFRGDQKKLFAELNGSNTGGNEIPDAEESQEFWSGIWSEEKQHNREAEWLESLREECNYPKQEELFVTTEMVTKQTRKIPNWKAPGRDGVQGYWIKRLSKLHERIAEQFNKILNTNVQVPEWLTFGRTVLCQKDTTKGNAVDNYRPISCLPLMWKLLTGIISEHLYKFLEDEDIFPDEQKGCKRNSRGTKDQLLLDKAILRDCKRRSTNLAMAWIDYRKAYDMIPHSWIDECLELFGVAENTKQFLLNSMKKWKLELSSGGTSLGIVHIKRGIFQGDSLSPLLFVLCMIPLTLILRKVKFHYEFGDKITRLNHLLFMDDLKLFGKSHDQIDSLVNTVYMFSEDIMMEFGVKKCGVLILKKGKVDKKSSKGITLPDGKVMKTIDEDGYRYLGILEYDKVKEKEMKDQFVKEYIRRTRLIMRSKLNGNNKIRATNTWAVAVLRYGSGILTWRVDELKDLDRKSRKILTMYKGFHPKSDVDRLYMRRREGGRGLMNCEDTVRSEENSIGFYLKNSEDSLLQAVKYVGIVEHETSVDKDDFKKSIAEKRKDNWCGKQMYGQFIRDQNESTDKEKTWSWVVASDLKATTEALIFAAQEQAIRTNYIKFHIDKTADSPNCRMCGERGETIGHLVSECKKLAQKEYKRRHDNVAKVIHWKLCGKLNFDRTEKWYEHTPQAVIEDDSHKLLWDMNIQCDNIIEARRPDLVIVDKITKTAVIVDVAIPGDKRIQEKEQEKIEKYQDLKREIQRLWSLKKVVVHI

SEQ ID NO: 699 - protein, 1135 aa, Morbakka virulenta
MNQSTNNILDQGGPEQPTGSVTVPEPPGTGVIGNTSATGVSKLPKRKRWSKEVNIVVMECYYRSNPTDENGVPIKGYRQRLYSEWLERGPFQDITEQRICDQARAIRKNGWLTELELEMIKRRVKGFLNQESNADSDEGNTELLEVDTGTVNERSNRVSLNVSFEGISDEERVIVDQLLEIYNSGENADGIVFKKVDFKRINNEVRRVNNVLIFFNTNNITETNNLIVACSVWVSKQLGLKKIRKDGRSKQEPWWKRRIQSDIKDLNKCINLLTRYKNGEVKTSKKIENIYTRFRIKVKGLGTAIEELKQRVLAKVAKLKRYNERIEQFRQNRLFNSDQKKLFAELNGCNFGSSEIPDAAESQAFWSDIWSKEKDHNKDAEWLQRLKEESKYPKQNELVITTEMISKQARKIPNWKAPGKDGVQGFWIKRLSSLHERISGQLNRILNGNEELPEWLTFGRTVLCQKDASKGNAVDNYRPISCLPLMWKLLTGIISDCLYKYLDEEDIIPDEQKGCKRNCRGTKDQLLIDKAVLRDCKRRSTNLSMAWIDYRKAYDMIPHSWIRECLELFGVAENTKTFLLGSMSKWKLELTSSGTSLGAVEIKRGIFQGDSLSPLLFVLALIPLTLTLRKVKVHYEFGDKLTRLNHLLFMDDLKLFGKSLKQIDSLVNTVYMFSEDIGMEFGIKKCGLLVLNRGKVDKSKSKGLVLPDGKVLKTVDEEGYRYLGIIEYDKIKENEMKDQFVREYRRRTRLILKSKLNGKNKIHTINSWAVAVLRYGAGIVEWKCDELRELDRKTRKLLTMHKAFHPKSDVDRLYLDRNAGGRGLLNCEDTVRSEENNLGWYLKNSNDSLLQAVKHVGVIEYQSTVKKEDLKKRNREKRKQKWLGKQMYGQIIRNKSENTDEEKSWIWITQSDLKVTTEALIFAAQEQAIRTNYVKYNIDKTTDSPNCRLCGEKGETVNHILSECKKLAQKEYKRRHDNVAKIVHWKLCAKLNLERAEKWYEHKPQTVLENGSHKLLWDMNIQCDNVIEARRPDLVIIDKVDKSAIVIDVAIPGDTRISEKEQEKIDKYQEIKREIQRLWNLKKVSVVPVVLGVLGSVTKNFTKYMEKIGIEINIAEVQKTTLLGTARILRKVLEH

SEQ ID NO: 700 - protein, 1078 aa, Morbakka virulenta
MECYYRSNPTDENGVPIKGYRQRLYSEWLERGPFQDITEQRICDQARAIRKNGWLTELELEMIKRRVKGFLNQESNADSDEGNTELLEVDTGTVNERSNRVSLNVSFEGISDEERVIVDQLLEIYNSGENADGIVFKKVDFKRINNEVRRVNNVLIFFNTNNITETNNLIVACSVWVSKQLGLKKIRKDGRSKQEPWWKRRIQSDIKDLNKCINLLTRYKNGEVKTSKKIENIYTRFRIKVKGLGTAIEELKQRVLAKVAKLKRYNERIEQFRQNRLFNSDQKKLFAELNGCNFGSSEIPDAAESQAFWSDIWSKEKDHNKDAEWLQRLKEESKYPKQNELVITTEMISKQARKIPNWKAPGKDGVQGFWIKRLSSLHERISGQLNRILNGNEELPEWLTFGRTVLCQKDASKGNAVDNYRPISCLPLMWKLLTGIISDCLYKYLDEEDIIPDEQKGCKRNCRGTKDQLLIDKAVLRDCKRRSTNLSMAWIDYRKAYDMIPHSWIRECLELFGVAENTKTFLLGSMSKWKLELTSSGTSLGAVEIKRGIFQGDSLSPLLFVLALIPLTLTLRKVKVHYEFGDKLTRLNHLLFMDDLKLFGKSLKQIDSLVNTVYMFSEDIGMEFGIKKCGLLVLNRGKVDKSKSKGLVLPDGKVLKTVDEEGYRYLGIIEYDKIKENEMKDQFVREYRRRTRLILKSKLNGKNKIHTINSWAVAVLRYGAGIVEWKCNELRELDRKTRKLLTMHKAFHPKSDVDRLYLDRNAGGRGLLNCEDTVRSEENNLGWYLKNSNDSLLQAVKHVGVIEYQSTVKKEDLKKRNREKRKQKWLGKQMYGQIIRNKSENTDEEKSWIWITQSDLKVTTEALIFAAQEQAIRTNYVKYNIDKTTDSPNCRLCGEKGETVSHILSECKKLAQKEYKRRHDNVAKIVHWKLCGKLNLERAEKWYEHKPQTVLENGSHKLLWDMNIQCDNVIEARRPDLVIIDKVDKSAIVIDVAIPGDTRISEKEQEKIDKYQEIKREIQRLWNLKKVSVVPVVLGVLGSVTKNFTKYMEKIGIEINIAEVQKTTLLGTARILRKVLEH

SEQ ID NO: 701 - protein, 1135 aa, Morbakka virulenta
MNQSTNNILDQGGPEQPTGSVTVPEPPGTGVIGNTSATGVSKLPKRKRWSKEVNIVVMECYYRSNPTDENGVPIKGYRQRLYSEWLERGPFQDITEQRICDQARAIRKNGWLTELELEMIKRRVKGFLNQESNADSDEGNTELLEVDTGTVNERSNRVSLNVSFEGISDEERVIVDQLLEINYSGENADGIVFKKVDFKRINNEVRRVNNVLIFFNTNNITETNNLIVACSVWVSKQLGLKKIRKDGRSKQEPWWKRRIQSDIKDLNKCINLLTRYKNGEVKTSKKIENIYTRFRIKVKGLGTAIEELKQRVLAKVAKLKRYNERIEQFRQNRLFNSDQKKLFAELNGCNFGSSEIPDAAESQAFWSDIWSKEKDHNKDAEWLQRLKEESKYPKQNELVITTEMISKQARKIPNWKAPGKDGVQGFWIKRLSSLHERISGQLNRILNGNEELPEWLTFGRTVLCQKDASKGNAVDNYRPISCLPLMWKLLTGIISDCLYKYLDEEDIIPDEQKGCKRNCRGTKDQLLIDKAVLRDCKRRSTNLSMAWIDYRKAYDMIPHSWIRECLELFGVAENTKTFLLGSMSKWKLELTSSGTSLGAVEIKRGIFQGDSLSPLLFVLALIPLTLTLRKVKVHYEFGDKLTRLNHLLFMDDLKLFGKSLKQIDSLVNTVYMFSEDIGMEFGIKKCGLLVLNRGKVDKSKSKGLVLPDGKVLKTVDEEGYRYLGIIEYDKIKENEMKDQFVREYRRRTRLILKSKLNGKNKIHTINSWAVAVLRYGAGIVEWKCDELRELDRKTRKLLTMHKAFHPKSDVDRLYLDRNAGGRGLLNCEDTVRSEENNLGWYLKNSNDSLLQAVKHVGVIEYQSTVKKEDLKKRNREKRKQKWLGKQMYGQIIRNKSENTDEEKSWIWITQSDLKVTTEALIFAAQEQAIRTNYVKYNIDKTTDSPNCRLCGEKGETVNHILSECKKLAQKEYKRRHDNVAKIVHWKLCGKLNLERAEKWYEHKPQTVLENGSHKLLWDMNIQCDNVIEARRPDLVIIDKVDKSAIVIHVAIPGDTRISEKEQEKIDKYQEIKREIQRLWNLKKVSVVPVVLGVLGSVTKNFTKYMEKIGIEINIAEVQKTTLLGTARILRKVLEH

SEQ ID NO: 702 - protein, 1065 aa, Morbakka virulenta
MNQSTNNILDQGGPEQPTGSVTVPEPPGTGVIGNTSATGVSKLPKRKRWSKEVNIVVMECYYRSNPTDENGVPIKGYRQRLYSEWLERGPFQDITEQRICDQARAIRKNGWLTELELEMIKRRVKGFLNQESNADSDEGNTELLEVDTGTVNERSNRVSLNVSFEGISDEERVIVDQLLEIYNSGENADGIVFKKVDFKRINNEVRRVNNVLIFFNTNNITETNNLIVACSVWVSKQLGLKKIRKDGRSKQEPWWKRRIQSDIKDLNKCINLLTRYKNGEVKTSKKIENIYTRFRIKVKGLGTAIEELKQRVLAKVAKLKRYNERIEQFRQNRLFNSDQKKLFAELNGCNFGSSEIPDAAESQAFWSDIWSKEKDHNKDAEWLQRLKEESKYPKQNELVITTEMISKQARKIPNWKAPGKDGVQGFWIKRLSSLHERISGQLNRILNGNEELPEWLTFGRTVLCQKDASKGNAVDNYRPISCLPLMWKLLTGIISDCLYKYLDEEDIIPDEQKGCKRNCRGTKDQLLIDKAVLRDCKRRSTNLSMAWIDYRKAYDMIPHSWIRECLELFGVAENTKTFLLGSMSKWKLELTSSGTSLGAVEIKRGIFQGDSLSPLLFVLALIPLTLTLRKVKVHYEFGDKLTRLNHLLFMDDLKLFGKSLKQIDSLVNTVYMFSEDIGMEFGIKKCGLLVLNRGKVDKSKSKGLVLPDGKVLKTVDEEGYRYLGIIEYDKIKENEMKDQFVREYRRRTRLILKSKLNGKNKIHTINSWAVAVLRYGAGIVEWKCNELRELDRKTRKLLTMHKAFHPKSDVDRLYLDRNAGGRGLLNCEDTVRSEENNLGWYLKNSNDSLLQAVKHVGVIEYQSTVKKEDLKKRNREKRKQKWLGKQMYGQIIRNKSENTDEEKSWIWITQSDLKVTTEALIFAAQEQAIRTNYVKYNIDKTTDSPNCRLCGEKGETVNHILSECKKLAQKEYKRRHDNVAKIVHWKLCGKLNLERAEKWYEHKPQTVLENGSHKQLWDMDIQCDNIIEVRRPDLVIIDKVDKSAIVIDVAIPGDTRISGKKTGKD

SEQ ID NO: 703 - protein, 1135 aa, Morbakka virulenta
MNQSTNNILDQGGPEQPRGSVTVHEPPGTGVIGNTSATGVSKLPKRKRWSKEVNIVVMECYYRSNPTDENGVPIKGYPQRLYSRWLERGPFQDITEQRILDQARAIRKNGWLTELELEMIKRRVKGFLNQESNADSDEGNTELLEVDTGTVNERSNRVSLNVSFEGISDEERVIVDQLLEIYNSGENADGIVFKKVDFKRINNEVRRVNNVLIFFNTNNITETNNLIVACSVWVSKQLGLKKIRKDGRSKQEPWWKRRIQSDIKDLNKCINLLTRYKNGEVKTSKKIENIYTRFRIKVKGLGTAIEELKQRVLAKVAKLKRYNERIEQFRQNRLFNSDQKKLFAELNGCNFGSSEIPDAAESQAFWSDIWSKEKDHNKDAEWLQRLKEESKYPKQNELVITTEMISKQARKIPNWKAPGKDGVQGFWIKRLSSLHERISGQLNRILNGNEELPEWLTFGRTVLCQKDASKGNAVDNYRPISCLPLMWKLLTGIISDCLYKYLDEEDIIPDEQKGCKRNCRGTKDQLLIDKAVLRDCKRRSTNLSMAWIDYRKAYDMIPHSWIRECLELFGVAENTKTFLLGSMSKWKLELTSSGTSLGAVEIKRGIFQGDSLSPLLFVLALIPLTLTLRKVKVHYEFGDKLTRLNHLLFMDDLKLFGKSLKQIDSLVNTVYMFSEDIGMEFGIKKCGLLVLNRGKVDKSKSKGLVLPDGKVLKTVDEEGYRYLGIIEYDKIKENEMKDQFVREYRRRTRLILKSKLNGKNKIHTINSWAVAVLRYGAGIVEWKCNELRELDRKTRKLLTMHKAFHPKSDVDRLYLDRNAGGRGLLNCEDTVRSEENNLGWYLKNSNDSLLQAVKHVGVIEYQSTVKKEDLKKRNREKRKQKWLGKQMYGQIIRNKSENTDEEKSWIWITQSDLKVTTEALIFAAQEQAIRTNYVKYNIDKTTDSPNCRLCGEKGETVNHILSECKKLAQKEYKRRHDNVAKIVHWKLCGKLNLERAEKWYEHKPQTVLENGSHKLLWDMNIQCDNVIEARRPDLVIIDKVDKSAIVIDVAIPGDTRISEKEQEKIDKYQEIKREIQRLWNLKKVSVVPVVLGVLGSVTKNFTKYMEKIGIEINIAEVQKTTLLGTARILRKVLEH

SEQ ID NO: 704 - protein, 1128 aa, Morbakka virulenta
MNQSTNNILDQGGPEQPTGSVTVPEPPGTGVIGNTSATGVSKLPKRKRWSKEVNIVVMECYYRSNPTDENGVPIKGYRQRLYSEWLERGPFQDITEQRICDQARAIRKNGWLTELELEMIKRRVKGFLNQESNADSDEGNTELLEVDTGTVNERSNRVSLNVSFEGISDEERVIVDQLLEIYYSGENADGIVFKKVDFKRINNEVRRVNNVLIFFNTNNITETNNLIVACSVWVSKQLGLKKIRKDGRSKQEPWWKRRIQSDIKDLNKCINLLTRYKNGEVKTSKKIENIYTRFRIKVKGLGTAIEELKQRVLAKVAKLKRYNERIEQFRQNRLFNSDQKKLFAELNGCNFGSSEIPDAAESQAFWSDIWSKEKDHNKDAEWLQRLKEESKYPKQNELVITTEMISKQARKIPNWKAPGKDGVQGFWIKRLSSLHERISGQLNRILNGNEELPEWLTFGRTVLCQKDASKGNAVDNYRPISCLPLMWKLLTGIISDCLYKYLDEEDIIPDEQKGCKRNCRGTKDQLLIDKAVLRDCKRRSTNLSMAWIDYRKAYDMIPHSWIRECLELFGVAENTKTFLLGSMSKWKLELTSSGTSLGAVEIKRGIFQGDSLSPLLFVLALIPLTLTLRKVKVHYEFGDKLTRLNHLLFMDDLKLFGKSLKQIDSLVNTVYMFSEDIGMEFGIKKCGLLVLNRGKVDKSKSKGLVLPDGKVLKTVDEEGYRYLGIIEYDKIKENEMKDQFVREYRRRTRLILKSKLNGKNKIHTINSWAVAVLRYGAGIVEWKCNELRELDRKTRKLLTMHKAFHPKSDVDRLYLDRNAGGRGLLNCEDTVRSEENNLGWYLKNSNDSLLQAVKHVGVIEYQSTVKKEDLKKRNREKRKQKWLGKQMYGQIIRNKSENTDEEKSWIWITQSDLKVTTEALIFAAQEQAIRTNYVKYNIDKTTDSPNCRLCGEKGETVNHILSECKKLAQKEYKRRHDNVAKIVHWKLCGKLNLERAEKWYEHKPQTVLENGSHKLLWDMNIQCDNVIEARRPDLVIIDRVDKSAIVIDVAIPGDTRISEKEQEKIDKYQEIKREIQRLWNLKKVSVVPVVLGVLGSVTKNFTKYMEKIGIKINIAVSSRRRGHHRIEI

SEQ ID NO: 705 - protein, 1006 aa, Morbakka virulenta
MFFNFSSFSENNNFNNNNNNNNNNNNNNNNNNTSATWVSKLPKRKRWSKEVNIVVMECYYRSNPTDENGVPIKGYRQRLYSEWLERGPFQDITEQRICDQARAIRKNGWLTELELEMIKRRVKGFSNQESNADSDEGNTELLEVDTGTVNERSNRVSLNVSFEGISDEERVIVDQLLEIYNSGENADGIVFKKVDFKRINNEVRRVNNVLIFFNTNNITETNNLIVACSVWVSKQLGLKKIRKDGRSKQEPWWKRRIQSDIKDLNKCINLLTRYKNGEVKTSKKIENIYTRFRIKVKGLGTAIEELKQRVLAKVAKLKRYNERIEQFRQNRLFNSDQKKLFAELNGCNFGSSEIPDAAESQAFWSDIWSKEKDHNKDAEWLQRLKEESKYPKQNELVITTEMISKQARKIPNWKAPGKDGVQGFWIKRLSSLHERISGQLNRILNGNEELPEWLTFGRTVLCQKDASKGNAVDNYRPISCLPLMWKLLTGIISDCLYKYLDEEDIIPDEQKGCKRNCRGTKDQLLIDKAVLRDCKRRSTNLSMAWIDYRKAYDMIPHSWIRECLELFGVAENTKTFLLGSMSKWKLELTSSGTSLGAVEIKRGIFQGDSLSPLLFVLALIPLTLTLRKVKVHYEFGDKLTRLNHLLFMDDLKLFGKSLKQIDSLVNTVYMFSEDIGMEFGIKKCGLLVLNRGKVDKSKSKGLVLPDGKVLKTVDEEGYRYLGIIEYDKIKENEMKDQFVREYRRRTRLILKSKLNGKNKIHTINSWAVAVLRYGAGIVEWKCNELRELDRKTRKLLTMHKAFHPKSDVDRLYLDRNAGGRGLLNCEDTVRSEENNLGWYLKNSNDSLLQAVKHVGVIEYQSTVKKEDLKKRNREKRKQKWLGKQMYGQIIRNKSENTDEEKSWIWITQSDLKVTTEALIFAAQEQAIRTNYVKYNIDKTTDSPNCRLCGEKGETVNHILSECKKLAQKEYKRRHDNVAKIVHWKLCGKLNLERAEKWYEHKPQTVL

SEQ ID NO: 706 - protein, 1017 aa, Morbakka virulenta
MIKRRVKGFLNQESNADSDEGNTELLEVDTGTVNERSNRVSLNVSFEGISDEERVIVDQLLEIYNSGENADGIVFKKVDFKRINNEVRRVNNVLIFFNTNNITETNNLIVACSVWVSKQLGLKKIRKDGRSKQEPWWKRRIQSDIKDLNKCINLLTRYKNGEVKTSKKIENIYTRFRIKVKGLGTAIEELKQRVLAKVAKLKRYNERIEQFRQNRLFNSDQKKLFAELNGCNFGSSEIPDAAESQAFWSDIWSKEKDHNKDAEWLQRLKEESKYPKQNELVITTEMISKQARKIPNWKAPGKDGVQGFWIKRLSSLHERISGQLNRILNGNEELPEWLTFGRTVLCQKDASKGNAVDNYRPISCLPLMWKLLTGIISDCLYKYLDEEDIIPDEQKGCKRNCRGTKDQLLIDKAVLRDCKRRSTNLSMAWIDYRKAYDMIPHSWIRECLELFGVAENTKTFLLGSMSKWKLELTSSGTSLGAVEIKRGIFQGDSLSPLLFVLALIPLTLTLRKVKVHYEFGDKLTRLNHLLFMDDLKLFGKSLKQIDSLVNTVYMFSEDIGMEFGIKKCGLLVLNRGKVDKSKSKGLVLPDGKVLKTVDEEGYRYLGIIEYDKIKENEMKDQFVREYRRRTRLILKSKLNGKNKIHTINSWAVAVLRYGAGIVEWKCNELRELDRKTRKLLTMHKAFHPKSDVDRLYLDRNAGGRGLLNCEDTVRSEENNLGWYLKNSNDSLLQAVKHVGVIEYQSTVKKEDLKKRNREKRKQKWLGKQMYGQIIRNKSENTDEEKSWIWITQSDLKVTTEALIFAAQEQAIRTNYVKYNIDKTTDSPNCRLCGEKGETVNHILSECKKLAQKEYKRRHDNVAKIVHWKLCGKLNLERAEKWYEHKPQTVLENGSHKLLWDMNIQCDNVIEARRPDLVIIDKVDKSAIVIDVAIPGDTRISEKEQEKIDKYQEIKREIQRLWNLKKVSVVPVVLGVLGSVTKNFTNYMEKIGIEINIAEVQKTTLLGTARILRKVLEH

SEQ ID NO: 707 - protein, 1135 aa, Morbakka virulenta
MNQSTNNILNQGGPEQPTGNVTVPEPTGTGVIGNTSATGVSKLPKRKRWSKEVNIVVMECYYRSNPTDENGVPIKGYRQRLYSEWLERGPFQDITEQRICDQARAIRKNGWLTELELEMIKRRVKGFLNQESNADSDEGNTELLEVDTGTVNERSNRVSLNVSFEGISDEERVIVDQLLEIYNSGENADGIVFKKVDFKRINNEVRRVNNVLIFFNTNNITETNNLIVACSVWVSKQLGLKKIRKDGRSKQEPWWKRRIQSDIKDLNKCINLLTRYKNGEVKTSKKIENIYTRFRIKVKGLGTAIEELKQRVLAKVAKLKRYNERIEQFRQNRLFNSDQKKLFAELNGCNFGSSEIPDAAESQAFWSDIWSKEKDHNKDAEWLQRLKEESKYPKQNELVITTEMISKQARKIPNWKAPGKDGVQGFWIKRLSSLHERISGQLNRILNGNEELPEWLTFGRTVLCQKDASKGNAVDNYRPISCLPLMWKLLTGIISDCLYKYLDEEDIIPDEQKGCKRNCRGTKDQLLIDKAVLRDCKRRSTNLSMAWIDYRKAYDMIPHSWIRECLELFGVAENTKTFLLGSMSKWKLELTSSGTSLGAVEIKRGIFQGDSLSPLLFVLALIPLTLTLRKVKVHYEFGDKLTRLNHLLFMDDLKLFGKSLKQIDSLVNTVYMFSEDIGMEFGIKKCGLLVLNRGKVDKSKSKGLVLPDGKVLKTVDEEGYRYLGIIEYDKIKENEMKDQFVREYRRRTRLILKSKLNGKNKIHTINSWAVAVLRYGAGIVEWKCNELRELDRKTRKLLTMHKAFHPKSDVDRLYLDRNAGGRGLLNCEDTVRSEENNLGWYLKNSNDSLLQAVKHVGVIEYQSTVKKEDLKKRNREKRKQKWLGKQMYGQIIRNKSENTDEEKSWIWITQSDLKVTTEALIFAAQEQAIRTNYVKYNIDKTTDSPNCRLCGEKGETVNHILSECKKLAQKEYKRRHDNVAKIVHWKLCGKLNLERAEKWYEHKPQTVLENGSHKLLWDMNIQCDNVIEARRPDLVIIDKVDKSAIVIDVAIPGDTRISEKEQEKIDKYQEIKREIQRLWNLKKVSVVPVVLGVLGSVTKNFTKYMEKIGIEINIAEVQKTTLLGTARILRKVLEH

SEQ ID NO: 708 - protein, 1135 aa, Morbakka virulenta
MNQSTNNILDQGGPEQPTGSVTVPEPPGTGVIGNTSATGVSKLPKRKRWSKEVNIVVMECYYRSNPTDENGVPIKGYRQRLYSEWLERGPFQDITEQRICDQARAIRKNGWLTELELEMIKRRVKGFLNQESNADSDEGNTELLEVDTGTVNERSNRVSLNVSFEGISDEERVIVDQLLEIYNSGENADGIVFKKVDFKRINNEVRRVNNVLIFFNTNNITETNNLIVACSVWVSKQLGLKKIRKDGRSKQEPWWKRRIQSDIKDLNKCINLLTRYKNGEVKTSKKIENIYTRFRIKVKGLGTAIEELKQRVLAKVAKLKRYNERIEQFRQNRLFNSDQKKLFAELNGCNFGSSEIPDAAESQAFWSDIWSKEKDHNKDAEWLQRLKEESKYPKQNELVITTEMISKQARKIPNWKAPGKDGVQGFWIKRLSSLHERISGQLNRILNGNEELPEWLTFGRTVLCQKDASKGNAVDNYRPISCLPLMWKLLTGIISDCLYKYLDEEDIIPDEQKGCKRNCRGTKDQLLIDKAVLRDCKRRSTNLSMAWIDYRKAYDMIPHSWIRECLELFGVAENTKTFLLGSMSKWKLELTSSGTSLGAVEIKRGIFQGDSLSPLLFVLALIPLTLTLRKVKVHYEFGDKLTRLNHLLFMDDLKLFGKSLKQIDSLVNTVYMFSEDIGMEFGIKKCGLLVLNRGKVDKSKSKGLVLPDGKVLKTVDEEGYRYLGIIEYDKIKENEMKDQFVREYRRRTRLILKSKLNGKNKIHTINSWAVAVLRYGAGIVEWKCNELRELDRKTRKLLTMHKAFHPKSDVDRLYLDRNAGGRGLLNCEDTVRSEENNLGWYLKNSNDSLLQAVKHVGVIEYQSTVKKEDLKKRNREKRKQKWLGKQMYGQIIRNKSENTDEEKSWIWITQSDLKVTTEALIFAAQEQAIRTNYVKYNIDKTTDSPNCRLCGEKGETVNHILSECKKLAQKEYKRRHDNVAKIVHWKLCGKLNLERAEKWYEHKPQTVLENGSHKLLWDMNIQCDNVIEARRPDLVIIDKVDKSAIVIDVAIPGDTRISEKEQEKIDKYQEIKREIQRLWNLKKVSVVPVVLGVLGSVTKNFTKYMEKIGIEINIAEVQKTTLLGTARILRKVLEH

SEQ ID NO: 709 - protein, 1078 aa, Morbakka virulenta
MECYYRSNPTDENGVPIKGYRQRLYSEWLERGPFQDITEQRICDQARAIRKNGWLTELELEMIKRRVKGFLNQESNADSDEGNTELLEVDTGTVNERSNRVSLNVSFEGISDEERVIVDQLLEIYNSGENADGIVFKKVDFKRINNEVRRVNNVLIFFNTNNITETNNLIVACSVWVSKQLGLKKIRKDGRSKQEPWWKRRIQSDIKDLNKCINLLTRYKNGEVKTSKKIENIYTRFRIKVKGLGTAIEELKQRVLAKVAKLKRYNERIEQFRQNRLFNSDQKKLFAELNGCNFGSSEIPDAAESQAFWSDIWSKEKDHNKDAEWLQRLKEESKYPKQNELVITTEMISKQARKIPNWKAPGKDGVQGFWIKRLSSLHERISGQLNRILNGNEELPEWLTFGRTVLCQKDASKGNAVDNYRPISCLPLMWKLLTGIISDCLYKYLDEEDIIPDEQKGCKRNCRGTKDQLLIDKAVLRDCKRRSTNLSMAWIDYRKAYDMIPHSWIRECLELFGVAENTKTFLLGSMSKWKLELTSSGTSLGAVEIKRGIFQGDSLSPLLFVLALIPLTLTLRKVKVHYEFGDKLTRLNHLLFMDDLKLFGKSLKQIDSLVNTVYMFSEDIGMEFGIKKCGLLVLNRGKVDKSKSKGLVLPDGKVLKTVDEEGYRYLGIIEYDKIKENEMKDQFVREYRRRTRLILKSKLNGKNKIHTINSWAVAVLRYGAGIVEWKCDELRELDRKTRKLLTMHKAFHPKSDVDRLYLDRNAGGRGLLNCEDTVRSEENNLGWYLKNSNDSLLQAVKHVGVIEYQSTVKKEDLKKRNREKRKQKWLGKQMYGQIIRNKSENTDEEKSWIWITQSDLKVTTEALIFAAQEQAIRTNYVKYNIDKTTDSPNCRLCGEKGETVNHILSECKKLAQKEYKRRHDNVAKIVHWKLCGKLNLERAEKWYEHKPQTVLENGSHKLLWDMNIQCDNVIEARRPDLVIIDKVDKSAIVIDVAIPGDTRISEKEQEKIDKYQEIKREIQRLWNLKKVSVVPVVLGVLGSVTKNFTKYMEKIGIEINIAEVQKTTLLGTARILRKVLEH

SEQ ID NO: 710 - protein, 1131 aa, Morbakka virulenta
MNQSTNNISDQGGPEQPTGSMTVPELPGTRVIGNTSATGVSKLPKRKRWSKEVNIVVMECYYRSNPTDENGVPIKGYRQRLYSEWLERGPFQDITEQRICDQARAIRKNGWLTELELEMIKRRVKGFLNQESNADSDEGNTELLEVDTGTVNERSNRVSLNVSFEGISDEERVIVDQLLEIYNSGENADGIVFKKVDFKRINNEVRRVNNVLIFFNTNNITETNNLIVACSVWVSKQLGLKKIRKDGRSKQEPWWKRRIQSDIKDLNKCINLLTRYKNGEVKTSKKIENIYTRFRIKVKGLGTAIEELKQRVLAKVAKLKRYNERIEQFRQNRLFNSDQKKLFAELNGCNFGSSEIPDAAESQAFWSDIWSKEKDHNKDAEWLQRLKEESKYPKQNELVITTEMISKQARKIPNWKAPGKDGVQGFWIKRLSSLHERISGQLNRILNGNEELPEWLTFGRTVLCQKDASKGNAVDNYRPISCLPLMWKLLTGIISDCLYKYLDEEDIIPDEQKGCKRNCRGTKDQLLIDKAVLRDCKRRSTNLSMAWIDYRKAYDMIPHSWIRECLELFGVAENTKTFLLGSMSKWKLELTSSGTSLGAVEIKRGIFQGDSLSPLLFVLALIPLTLTLRKVKVHYEFGDKLTRLNHLLFMDDLKLFGKSLKQIDSLVNTVYMFSEDIGMEFGIKKCGLLVLNRGKVDKSKSKGLVLPDGKVLKTVDEEGYRYLGIIEYDKIKENEMKDQFVREYRRRTRLILKSKLNGKNKIHTINSWAVAVLRYGAGIVEWKCNELRELDRKTRKLLTMHKAFHPKSDVDRLYLDRNAGGRGLLNCEDTVRSEENNLGWYLKNSNDSLLQAVKHVGVIEYQSTVKKEDLKKRNREKRKQKWLGKQMYGQIIRNKSENTDEEKSWIWITQSDLKVTTEALIFAAQEQAIWTNYVKYNIDKSTDSPNCRLCRDRGETVNHILSECKKLAQKEYKRRHDNVAKIVHWKLCGKLNLERAEKWYEHKPQTVLENGSQKLLWNMNIQCDNVIEARRPDLVIIDKVDKSAIVIDIATPGDTRISEKEQEKIDKYQEIQRLWNLNKVSVVPVVLGVLGSVTKHFSKYMEKVGIEINIAEVQKTTQLRTARILRKVLEH

SEQ ID NO: 711 - protein, 1078 aa, Morbakka virulenta
MNQSTNNILDQGGPEQPTGSVTVPEPPGTGVIGNTSATGVSKLPKRKRWSKEVNIVVMECYYRSNPTDENGVPIKGYRQRLYSEWLERGPFQDITEQRICDQARAIRKNGWLTELELEMIKRRVKGFLNQESNADSDEGNTELLEVDTGTVNERSNRVSLNVSFEGISDEERVIVDQLLEIYNSGENADGIVFKKVDFKRINNEVRRVNNVLIFFNTNNITETNNLIVACSVWVSKQLGLKKIRKDGRSKQEPWWKRRIQSDIKDLNKCINLLTRYKNGEVKTSKKIENIYTRFRIKVKGLGTAIEELKQRVLAKVAKLKRYNERIEQFRQNRLFNSDQKKLFAELNGCNFGSSEIPDAAESQAFWSDIWSKEKDHNKDAEWLQRLKEESKYPKQNELVITTEMISKQARKIPNWKAPGKDGVQGFWIKRLSSLHERISGQLNRILNGNEELPEWLTFGRTVLCQKDASKGNAVDNYRPISCLPLMWKLLTGIISDCLYKYLDEEDIIPDEQKGCKRNCRGTKDQLLIDKAVLRDCKRRSTNLSMAWIDYRKAYDMIPHSWIRECLELFGVAENTKTFLLGSMSKWKLELTSSGTSLGAVEIKRGIFQGDSLSPLLFVLALIPLTLTLRKVKVHYEFGDKLTRLNHLLFMDDLKLFGKSLKQIDSLVNTVYMFSEDIGMEFGIKKCGLLVLNRGKVDKSKSKGLVLPDGKVLKTVDEEGYRYLGIIEYDKIKENEMKDQFVREYRRRTRLILKSKLNGKNKIHTINSWAVAVLRYGAGIVEWKCNELRELDRKTRKLLTMHKAFHPKSDVDRLYLDRNAGGRGLLNCEDTVRSEENNLGWYLKNSNDSLLQAVKHVGVIEYQSTVKKEDLKKRNREKRKQKWLGKQMYGQIIRNKSENTDEEKSWIWITQSDLKVTTEALIFAAQEQAIRTNYVKYNIDKTTDSPNCRLCGEKGETVNHILSECKKLAQKEYKRRHDNVAKIVHWKLCGKLNLERAEKWYEHKPQTVLENGSHKLLWDMNIQCDNVIEARRPDLVIIDKVDKSAIVIDVAIPGDTRISEKEQEKIDKYQEIKREIQRL

SEQ ID NO: 712 - protein, 1017 aa, Morbakka virulenta
MIKRRVKGFLNQESNADSDEGNTELLEVDTGTVNERSNRVSLNVSFEGISDEERVIVDQLLEIYNSGENADGIVFKKVDFKRINNEVRRVNNVLIFFNTNNITETNNLIVACSVWVSKQLGLKKIRKDGRSKQEPWWKRRIQSDIKDLNKCINLLTRYKNGEVKTSKKIENIYTRFRIKVKGLGTAIEELKQRVLAKVAKLKRYNERIEQFRQNRLFNSDQKKLFAELNGCNFGSSEIPDAAESQAFWSDIWSKEKDHNKDAEWLQRLKEESKYPKQNELVITTEMISKQARKIPNWKAPGKDGVQGFWIKRLSSLHERISGQLNRILNGNEELPEWLTFGRTVLCQKDASKGNAVDNYRPISCLPLMWKLLTGIISDCLYKYLDEEDIIPDEQKGCKRNCRGTKDQLLIDKAVLRDCKRRSTNLSMAWIDYRKAYDMIPHSWIRECLELFGVAENTKTFLLGSMSKWKLELTSSGTSLGAVEIKRGIFQGDSLSPLLFVLALIPLTLTLRKVKVHYEFGDKLTRLNHLLFMDDLKLFGKSLKQIDSLVNTVYMFSEDIGMEFGIKKCGLLVLNRGKVDKSKSKGLVLPDGKVLKTVDEEGYRYLGIIEYDKIKENEMKDQFVREYRRRTRLILKSKLNGKNKIHTINSWAVAVLRYGAGIVEWKCNELRELDRKTRKLLTMHKAFHPKSDVDRLYLDRNAGGRGLLNCEDTVRSEENNLGWYLKNSNDSLLQAVKHVGVIEYQSTVKKEDLKKRNREKRKQKWLGKQMYGQIIRNKSENIDEEKSWIWLTQSDLKVTTEALIFAAQEQAIRTNYVKYNIDKTTDSPNCRLCGEKGETVNHILSECKKLAQKEYKRRHDNVAKIVHWKLCGKLNLERAEKWYEHKPQTVLENGSHKLLWDMNIQCDNVIEARRPDLVIIDKVDKSAIVIDVAIPGDTRISEKEQEKIDKYQEIKREIQRLWNLKKVSVVPVVLGVLGSVTKNFTKYMEKIGIEINIAEVQQTTLLGTARILRKILQH

SEQ ID NO: 713 - protein, 1017 aa, Morbakka virulenta
MIKRRVKGFSNEESNADSDEGNTELLEADTGTVNERSNRVSLNVSFEGISDEERVIVDQLLEIYNSGENADGIVFKKVDFKRINNEVRRVNNVLIFFNTNNITETNNLIVACSVWVSKQLGLKKIRKDGRSKQEPWWKRRIQSDIKDLNKCINLLTRYKNGEVKTSKKIENIYTRFRIKVKGLGTAIEELKQRVLAKVAKLKRYNERIEQFRQNRLFNSDQKKLFAELNGCNFGSSEIPDAAESQAFWSDIWSKEKDHNKDAEWLQRLKEESKYPKQNELVITTEMISKQARKIPNWKAPGKDGVQGFWIKRLSSLHERISGQLNRILNGNEELPEWLTFGRTVLCQKDASKGNAVDNYRPISCLPLMWKLLTGIISDCLYKYLDEEDIIPDEQKGCKRNCRGTKDQLLIDKAVLRDCKRRSTNLSMAWIDYRKAYDMIPHSWIRECLELFGVAENTKTFLLGSMSKWKLELTSSGTSLGAVEIKRGIFQGDSLSPLLFVLALIPLTLTLRKVKVHYEFGDKLTRLNHLLFMDDLKLFGKSLKQIDSLVNTVYMFSEDIGMEFGIKKCGLLVLNRGKVDKSKSKGLVLPDGKVLKTVDEEGYRYLGIIEYDKIKENEMKDQFVREYRRRTRLILKSKLNGKNKIHTINSWAVAVLRYGAGIVEWKCNELRELDRKTRKLLTMHKAFHPKSDVDRLYLDRNAGGRGLLNCEDTVRSEENNLGWYLKNSNDSLLQAVKHVGVIEYQSTVKKEDLKKRNREKRKQKWLGKQMYGQIIRNKSENTDEEKSWIWITQSDLKVTTEALIFAAQEQAIRTNYVKYNIDKTTDSPNCRLCGEKGETVNHILSECKKLAQKEYKRRHDNVAKIVHWKLCGKLNLERAEKWHEHKPQTVLENGSHKLLWDINIQCDNVIEARRPDLVIIDKVDKSAIIIDVAIPGDTRTSEKEQEKIEKCQEIKREIQRLWNLKKVSVVPVVLGVLGSVTKNFTKYMEKIGIEINIDEVRETTILRTGRILRKVLED

SEQ ID NO: 714 - protein, 1135 aa, Morbakka virulenta
MNQSTYNISDQGGPEQPTGSVTVPEPPGAGVIGNTSATGVSKLPKRKRWSKEVNIVVMECYYRSNPTDENGVPIKGYRQRLYSEWLERGPFQDITEQRICDQARAIRKNGWLTELELEMIKRRVKGFLNQESNADSDEGNTELLEVDTGTVNERSNRVSLNVSFEGISDEERVIVDQLLEIYNSGENADGIVFKKVDFKRINNEVRRVNNVLIFFNTNNITETNNLIVACSVWVSKQLGLKKIRKDGRSKQEPWWKRRIQSDIKDLNKCINLLTRYKNGEVKTSKKIENIYTRFRIKVKGLGTAIEELKQRVLAKVAKLKRYNERIEQFRQNRLFNSDQKKLFAELNGCNFGSSEIPDAAESQAFWSDIWSKEKDHNKDAEWLQRLKEESKYPKQNELVITTEMISKQARKIPNWKAPGKDGVQGFWIKRLSSLHERISGQLNRILNGNEELPEWLTFGRTVLCQKDASKGNAVDNYRPISCLPLMWKLLTGIISDCLYKYLDEEDIIPDEQKGCKRNCRGTKDQLLIDKAVLRDCKRRSTNLSMAWIDYRKAYDMIPHSWIRECLELFGVAENTKTFLLGSMSKWKLELTSSGTSLGAVEIKRGIFQGDSLSPLLFVLALIPLTLTLRKVKVHYEFGDKLTRLNHLLFMDDLKLFGKSLKQIDSLVNTVYMFSEDIGMEFGIKKCGLLVLNRGKVDKSKSKGLVLPDGKVLKTVDEEGYRYLGIIEYDKIKENEMKDQFVREYRRRTRLILKSKLNGKNKIHTINSWAVAVLRYGAGIVEWKCNELRELDRKTRKLLTMHKAFHPKSDVDRLYLDRNAGGRGLLNCEDTVRSEENNLGWYLKNSNDSLLQAVKHVGVIEYQSTVKKEDLKKRNREKRKQKWLGKQMYGQIIRNKSENTDEEKSWIWITQSDLKVTTEALIFAAQEQAIRTNYVKYNIDKTTDSPNCRLCGEKGETVNHILSECKKLAQKEYKRRHDNVAKIVHWKLCGKLNLERAEKWYEHKPQTVLENGSHKLLWDMNIQCDNVIEARRPDLVIIDKVDKSAIVIDVAIPGDTRISEKEQEKIDKHREIKREIQRLWNLKKVSVVPVVLGVLGSVTKNFTIFMEKIGIEINIAEVQKTTLLRTARILRKVLEH

SEQ ID NO: 715 - protein, 915 aa, Morbakka virulenta
MHPAYPYRAGNWMGLLGLLPLNVCGLVLLCHSVIIIIIIIIIIIIIIIIINLLTRYKNGEVKTSKKIENIYTRFRIKVKGLGTAIEELKQRVLAKVAKLKRYNERIEQFQQNRLFNSDQKKLFAELNGCNFGSSEIPDAAESQAFWSDIWSKEKDHNKDAEWLQRLKEESKYPKQNELVITTEMISKQARKIPNWKAPGKDGVQGFWIKRLSSLHERISGQLNRILNGNEELPEWLTFGRTVLCQKDASKGNAVDNYRPISCLPLMWKLLTGIISDCLYKYLDEEDIIPDEQKGCKRNCRGTKDQLLIDKAVLRDCKRRSTNLSMAWIDYRKAYDMIPHSWIRECLELFGVAENTKTFLLGSMSKWKLELTSSGTSLGAVEIKRGIFQGDSLSPLLFVLALIPLTLTLRKVKVHYEFGDKLTRLNHLLFMDDLKLFGKSLKQIDSLVNTVYMFSEDIGMEFGIKKCGLLVLNRGKVDKSKSKGLVLPDGKVLKTVDEEGYRYLGIIEYDKIKENEMKDQFVREYRRRTRLILKSKLNGKNKIHTINSWAVAVLRYGAGIVEWKCDELRELDRKTRKLLTMHKAFHPKSDVDRLYLDRNAGGRGLLNCEDTVRSEENNLGWYLKNSNDSLLQAVKHVGVIEYQSTVKKEDLKKRNREKRKQKWLGKQMYGQIIRNKSENTDEEKSWIWITQSDLKVTTEALIFAAQEQAIRTNYVKYNIDKTTDSPNCRLCGEKGETVNHILSECKKLAQKEYKRRHDNVAKIVHWKLCGKLNLERAEKWYEHKPQTVLENGSHKLLWDMNIQCDNVIEARRPDLVIIDKVDKSAIVIDVAIPGDTRISEKEQEKIDKYQEIKREIQRLWNLKKVSVVPVVLGVLGSVTKNFTKYMEKIGIEINIAEVQKTTLLGTARILRKVLEH

SEQ ID NO: 716 - protein, 732 aa, Morbakka virulenta
MISKQARKIPNWKAPGKDGVQGFWIKRLSSLHERISGQLNRILNGNEELLEWLTFGRTVLCQKDASKGNAVDNYRPISCLPLMWKLLTGIISDCLYKYLDEEDIIPDEQKGCKRNCRGTKDQLLIDKAVLRDCKRRSTNLSMAWIDYRKAYDMIPHSWIRECLELFGVAENTKTFLLGSMSKWKLELTSSGTSLGAVEIKRGIFQGDSLSPLLFVLALIPLTLTLRKVKVHYEFGDKLTRLNHLLFMDDLKLFGKSLKQIDSLVNTVYMFSEDIGMEFGIKKCGLLVLNRGKVDKSKSKGLVLPDGKVLKTVDEEGYRYLGIIEYDKIKENEMKDQFVREYRRRTRLILKSKLNGKNKIHTINSWAVAVLRYGAGIVEWKCNELRELDRKTRKLLTMHKAFHPKSDVDRLYLDRNAGGRGLLNCEDTVRSEENNLGWYLKNSNDSLLQAVKHVGVIEYQSTVKKEDLKKRNREKRKQKWLGKQMYGQIIRNKSENTDEEKSWIWITQSDLKVTTEALIFAAQEQAIRTNYVKYNIDKTTDSPNCRLCGEKGETVNHILSECKKLAQKEYKRRHDNVAKIVHWKLCGKLNLERAEKWYEHKPQTVLENGSHKLLWDMNIQCDNVIEARRPDLVIIDKVDKSAIVIDVAIPGDTRISEKEQEKIEKYQEIKKEIQRLLNLKKVSVVPVVLGVLGSVTKNFTKYMEKIGIEINIAEVQKTTLLGTARILRKVLEH

SEQ ID NO: 717 - protein, 1135 aa, Morbakka virulenta
MNQSTNNILDQGGPEQPTGSVTVPEPPGTGVIGNTSATGVSKLPKRKRWSKEVNIVVMECYYRSNPTDENGVPIKGYRQRLYSEWLERGPFQDITEQRICDQARAIRKNGWLTELELEMIKRRVKGFLNQESNADSDEGNTELLEVDTGTVNERSNRVSLNVSFEGISDEERVIVDQLLEIYYSGENADGIVFKKVDFKRINNEVRRVNNVLIFFNTNNITETNNLIVACSVWVSKQLGLKKIRKDGRSKQEPWWKRRIQSDIKDLNKCINLLTRYKNGEVKTSKKIENIYTRFRIKVKGLGTAIEELKQRVLAKVAKLKRYNERIEQFRQNRLFNSDQKKLFAELNGCNFGSSEIPDAAESQAFWSDIWSKEKDHNKDAEWLQRLKEESKYPKQNELVITTEMISKQARKIPNWKAPGKDGVQGFWIKRLSSLHERISGQLNRILNGNEELPEWLTFGRTVLCQKDASKGNAVDNYRPISCLPLMWKLLTGIISDCLYKYLDEEDIIPDEQKGCKRNCRGTKDQLLIDKAVLRDCKRRSTNLSMAWIDYRKAYDMIPHSWIRECLELFGVAENTKTFLLGSMSKWKLELTSSGTSLGAVEIKRGIFQGDSLSPLLFVLALIPLTLTLRKVKVHYEFGDKLTRLNHLLFMDDLKLFGKSLKQIDSLVNTVYMFSEDIGMEFGIKKCGLLVLNRGKVDKSKSKGLVLPDGKVLKTVDEEGYRYLGIIEYDKIKENEMKDQFVREYRRRTRLILKSKLNGKNKIHTINSWAVAVLRYGAGIVEWKCDELRELDRKTRKLLTMHKAFHPKSDVDRLYLDRNAGGRGLLNCEDTVRSEENNLGWYLKNSNDSLLQAVKHVGVIEYQSTVKKEDLKKRNREKRKQKWLGKQMYGQIIRNKSENTDEEKSWIWITQSDLKVTTEALIFAAQEQAIRTNYVKYNIDKTTDSPNCRLCGEKGETVNHILSECKKLAQKEYKRRHDNVAKIVHWKLCGKLNLERAEKWYEHKPQTVLENGSHKLLWDMNIQCDNVIEARRPDLVIIDKVDKSAIVIDVAIPGDTRISEKEQEKIDKYQEIKREIQRLWNLKKVSVVPVVLGVLGSVTKNFTKYMEKIGIEINIAEVQKTTLLGTARILRKVLEH

SEQ ID NO: 718 - protein, 1196 aa, Morbakka virulenta
MNVQHKRISHRIARRAGHQGARPSVSDQTEVEKLATDLPSQETEDGNSSGRYFQQSPSATATSPIYGQQSKAKRHKWTREEYKEVMLCYYKAQAEPMKDNTTKEMYRLWRQRNPNVRPNMDANKIASQRRYIEKNKKLTSIEIDQIKVQIEQESNYTHDHNEAEISAQSEQTEGETPLEGIDNLAAEANETIELSRDILNKYADLEGINVKDRSPLPKLSLTKKMKALIKESNSALEKNIQGKSLNQINQLLYAAAFVISDKVGKTPKQRKRSKSQGKPKWQTRIEKQVEKMRGELSLLTEMLKEDDHQKKSKKRSSIKKRYNIKMKEDIETIRESLKMKIQAKAQRLRRYDKRSKQYNQNRLFNKDRKKFYRSLGKEERKVENPPSKEEIEKFWRDILAEEKHHDNNAHWITREEEKYAHVESQKWDPITKEELRAAITKSANWKSPGIDAIPNFWLKQLTATHNALTTAFNKAIESPEDLPEWFTTARTFLLPKNDETDKPKNYRPIACLPTLYKVLTSIISERSYKHILANDILPEEQKGCARNSYGCKDQLLLNKAIIEDCKRKKKNLSVAWIDYRKAYDSVPHSWILKTLSIYKFNNKLINFMKKSMKSWNTTMCLNHVQGIITTEKIGIKRGIFQGDSLSPLLFCLALVPLTSEINASGYGYKMNRNSVPISNLFYMDDLKLYASNDDQQQGELRIVKQFSDDIKMSFGLDKCAKASFKKGKLIGTGNIELDKETSINELDQDKGYRYLGVDESEGIQHTKMKEKIRKEYYRRVRLIVRSELNGRNKIEAINSLAIPTVQYSFGIIDWKYSELKKLDSKTRKILTMHGMLHPKSDVDRIYIPRKEGGRGLIEIETAFKVTIVGLNHYLENKRTLSSNMISVHEKTKPKYSISKIAKNIEREMTDLNFAPKPDKPTAENAKVLKQEIKKELVKKKNDRWLSKLLHGKYPSLIGEPHVDLPNTNNWLRSDIKGETEGLLIAAQDQALYTRNFQKHIIGKEIDSRCRMCYKQSETIDHITSGCEVLAKSDYIERHNKAATYVHWNICNDLGIKTSDKWYEHQPDTVSNTETHTVLWDMAVHTDRHIGANRPDIIIKDKVNSTCKLIDMSVPCDKNISIKEMEKKSKYQDLEIEIQRMWKMKTEVIPVVIGALGTIRKGMEDNIRSVSENMNLQIVQKTCLLGTARILRKVFSI

SEQ ID NO: 719 - protein, 1182 aa, Morbakka virulenta
MNAQHKRISHRIARRAGHQGARPSVSDQTEVEKLATDLPSQETEDGNSSGRYFQQSPSATGTSPIYGQQSKAKRHKWTREEYKEVMLCYYKAQAEPMKDNTTKEMYRLWRQRNPNVRPNMDANKIASQRRYIEKNKKLTSIEIDQIKVQIEQESNYTHDHNEAEISAQSEQTEGETPLEGIDNLAAEANETIELSRDILNKYADLEGINVKDRSPLPKLSLTKKMKALIKESNSALEKNIQGKSLNQINQLLYAAAFVISDKVGKTPKQRKRSKSQGKPKWQTRIEKQVEKMRGELSLLTEMLKEDDHQKKSKKRSSIKKRYNIKMKEDIETIRESLKMKIQAKAQRLRRYDKRSKQYNQNRLFNKDRKKFYRSLGKEERKVENPPSKEEIEKFWRDILAEEKHHDNNAHWITREEEKYAHVESQKWDPITKEELRAAITKSANWKSPGIDAIPNFWLKQLTATHNALTTAFNKAIESPEDLPEWFTTARTFLLPKNDETDKPKNYRPIACLPTLYKVLTSIISERSYKHILANDILPEEQKGCARNSYGCKDQLLLNKAIIEDCKRKKKNLSVAWIDYRKAYDSVPHSWILKTLSIYKFNNKLINFMKKSMKSWNTTMCLNHVQGIITTEKIGIKRGIFQGDSLSPLLFCLALVPLTSEINASGYGYKMNRNSVPISNLFYMDDLKLYASNDDQQQGELRIVKQFSDDIKMSFGLDKCAKASFKKGKLIGTGNIELDKETSINELDQDKGYRYLGVDESEGIQHTKMKEKIRKEYYRRVRLIVRSELNGRNKIEAINSLAIPTVQYSFGIIDWKYSELKKLDSKTRKILTMHGMLHPKSDVDRIYIPRKEGGRGLIEIETAFKVTIVGLNHYLENKRTLSSNMISVHEKTKPKYSISKIAKNIEREMTDLNFAPKPDKPTAENAKVLKQEIKKELVKKKNDRWLSKLLHGKYPSLIGEPHVDLPNTNNWLRSDIKGETEGLLIAAQDQALYTRNFQKHIIGKEIDSRCRMCYKQSETIDHITSGCEVLAKSDYIERHNKAATYVHWNICNDLGIKTSDKWYEHQPDTVSNTETHTVLWDMAVHTDRHIGANRPDIIIKDKVNSTCKLIDMSVPCDKHISIKEMEKKSKYQDLEIEIQRMWKMKTEVIPVVIGALGTIRKRMKDNIRSVSEKMNLQIVQKSC

SEQ ID NO: 720 - protein, 1196 aa, Morbakka virulenta
MNVQHKRISHRIARRAGHQGARPSVSDQTEVEKLATDLPSQETEDGNSSGRYFQQSPSATATSPIYGQQSKAKRHKWTREEYKEVMLCYYKAQAEPMKDNTTKEMYRLWRQRNPNVRPNMDANKIASQRRYIEKNKKLTSIEIDQIKVQIEQESNYTHDHNEAEISAQSEQTEGETPLEGIDNLAAEANETIELSRDILNKYADLEGINVKDRSPLPKLSLTKKMKALIKESNSALEKNIQGKSLNQINQLLYAAAFVISDKVGKTPKQRKRSKSQGKPKWQTRIEKQVEKMRGELSLLTEMLKEDDHQKKSKKRSSIKKRYNIKMKEDIETIRESLKMKIQAKAQRLRRYDKRSKQYNQNRLFNKDRKKFYRSLGKEERKVENPPSKEEIEKFWRDILAEEKHHDNNAHWITREEEKYAHVESQKWDPITKEELRAAITKSANWKSPGIDAIPNFWLKQLTATHNALTTAFNKAIESPEDLPEWFTTARTFLLPKNDETDKPKNYRPIACLPTLYKVLTSIISERSYKHILANDILPEEQKGCARNSYGCKDQLLLNKAIIEDCKRKKKNLSVAWIDYRKAYDSVPHSWILKTLSIYKFNNKLINFMKKSMKSWNTTMCLNHVQGIITTEKIGIKRGIFQGDSLSPLLFCLALVPLTSEINASGYGYKMNRNSVPISNLFYMDDLKLYASNDDQQQGELRIVKQFSDDIKMSFGLDKCAKASFKKGKLIGTGNIELDKETSINELDQDKGYRYLGVDESEGIQHTKMKEKIRKEYYRRVRLIVRSELNGRNKIEAINSLAIPTVQYSFGIIDWKYSELKKLDSKTRKILTMHGMLHPKSDVDRIYIPRKEGGRGLIEIETAFKVTIVGLNHYLENKRTLSSNMISVHEKTKPKYSISKIAKNIEREMTDLNFAPKPDKPTAENAKVLKQEIKKEFVKKKNDRWLSKLLHGKYPSLIGEPHVDLPNTNNWLRSDIKGETEGLLIAAQDQALYTRNFQKHIIGKEIDNRCRMCYKQSETIDHITSGCEVLAKSDYIERHNKAATYVHWNICNDLGIKTSDKWYEHQPDTVSNTETHTVLWDMAVHTDRHIGANRPDIIIKDKVNSTCKLIDMSVPCDKNISIKEMEKKSKYQDLEIEIQRMWKMKTEVIPVVIGALGTIRKGMEDNIRSVSENMNLQIVQKTCLLGTARILCKVFSI

SEQ ID NO: 721 - protein, 1111 aa, Morbakka virulenta
MLCYYKAQAEPMKDNTTKEMYRLWRQRNPNVRPNMDANKIASQRRYIEKNKKLTSIEIDQIKVQIEQESNYTHDHNEAEISAQSEQTEGETPLEGIDNLAAEANETIELSRDILNKYADLEGINVKDRSPLPKLSLTKKMKALIKESNSALEKNIQGKSLNQINQLLYAAAFVISDKVGKTPKQRKRSKSQGKPKWQTRIEKQVEKMRGELSLLTEMLKEDDHQKKSKKRSSIKKRYNIKMKEDIETIRESLKMKIQAKAQRLRRYDKRSKQYNQNRLFNKDRKKFYRSLGKEERKVENPPSKEEIEKFWRDILAEEKHHDNNAHWITREEEKYAHVESQKWDPITKEELRAAITKSANWKSPGIDAIPNFWLKQLTATHNALTTAFNKAIESPEDLPEWFTTARTFLLPKNDETDKPKNYRPIACLPTLYKVLTSIISERSYKHILANDILPEEQKGCARNSYGCKDQLLLNKAIIEDCKRKKKNLSVAWIDYRKAYDSVPHSWILKTLSIYKFNNKLINFMKKSMKSWNTTMCLNHVQGIITTEKIGIKRGIFQGDSLSPLLFCLALVPLTSEINASGYGYKMNRNSVPISNLFYMDDLKLYASNDDQQQGELRIVKQFSDDIKMSFGLDKCAKASFKKGKLIGTGNIELDKETSINELDQDKGYRYLGVDESEGIQHTKMKEKIRKEYYRRVRLIVRSELNGRNKIEAINSLAIPTVQYSFGIIDWKYSELKKLDSKTRKILTMHGMLHPKSDVDRIYIPRKEGGRGLIEIETAFKVTIVGLNHYLENKRTLSSNMISVHEKTKPKYSISKIAKNIEREMTDLNFAPKPDKPTAENAKVLKQEIKKEFVKKKNDRWLSKLLHGKYPSLIGEPHVDLPNTNNWLRSDIKGETEGLLIAAQDQALYTRNFQKHIIGKEIDSRCRMCYKQSETIDHITSGCEVLAKSDYIERHNKAATYVHWNICNDLGIKTSDKWYEHQPDTVSNTETHTVLWDMAVHTDRHIGANRPDIIIKDKVNSTCKLIDMSVPCDKNISIKEMEKKSKYQDLEIEIQRMWKMKTEVIPVVIGALGTIRKGMEDNIRSVSENMNLQIVQKTCLLGTARILRKVFSI

SEQ ID NO: 722 - protein, 1196 aa, Morbakka virulenta
MNVQHKRISHRIARRAGHQGARPSVSDQTEVEKLATDLPSQETEDGNSSGRYFQQSPSATATSPIYGQQSKAKRHKWTREEYKEVMLCYYKAQAEPMKDNTTKEMYRLWRQRNPNVRPNMDANKIASQRRYIEKNKKLTSIEIDQIKVQIEQESNYTHDHNEAEISAQSEQTEGETPLEGIDNLAAEANETIELSRDILNKYADLEGINVKDRSPLPKLSLTKKMKALIKESNSALEKNIQGKSLNQINQLLYAAAFVISDKVGKTPKQRKRSKSQGKPKWQTRIEKQVEKMRGELSLLTEMLKEDDHQKKSKKRSSIKKRYNIKMKEDIETIRESLKMKIQAKAQRLRRYDKRSKQYNQNRLFNKDRKKFYRSLGKEETKVENPPSKEEIEKFWRDILAEEKHHDNNAHWITREEEKYAHVESQKWDPITKEELRAAITKSANWKSPGIDAIPNFWLKQLTATHNALTTAFNKAIESPEDLPEWFTTARTFLLPKNDETDKPKNYRPIACLPTLYKVLTSIISERSYKHILANDILPEEQKGCARNSYGCKDQLLLNKAIIEDCKRKKKNLSVAWIDYRKAYDSVPHSWILKTLSIYKFNNKLINFMKKSMKSWNTTMYLNHVQGIITTEKIGIKRGIFQGDSLSPLLFCLALVPLTSEINASGYGYKMNRNSVPISNLFYMDDLKLYASNDDQQQGELRIVKQFSDDIKMSFGLDKCAKASFKKGKLIGTGNIELDKETSINELDQDKGYRYLGVDESEGIQHTKMKEKIRKEYYRRVRLIVRSELNGRNKIEAINSLAIPTVQYSFGIIDWKYSELKKLDSKTRKILTMHGMLHPKSDVDRIYIPRKEGGRGLIEIETAFKVTIVGLNHYLENKRTLSSNMISVHEKTKPKYSISKIAKNIEREMTDLNFAPKPDKPTAENAKVLKQEIKKELVKKKNDRWLSKLLHGKYPSLIGEPHVDLPNTNNWLRSDIKGETEGLLIAAQDQALYTRNFQKHIIGKEIDSRCRMCYKQSETIDHITSGCEVLAKSDYIERHNKAATYVHWNICNDLGIKTSDKWYEHQPDTVSNTETHTVLWDMAVHTDRHIGANRPDIIIKDKVNSTCKLIDMSVPCDKNISIKEMEKKSKYQDLEIEIQRKWKMKTEVIPVVIGALGTIRKGMEDNIRSVSENMNLQIVQKTCLLGTARILRKVFSI

SEQ ID NO: 723 - protein, 1196 aa, Morbakka virulenta
MNVQHKRISHRIARRAGHQGARPSVSDQTEVEKLATDLPSQETEDGNSSGRYFQQSPSATATSPIYGQQSKAKRHKWTREEYKEVMLCYYKAQAEPMKDNTTKEMYRLWRQRNPNVRPNMDANKIASQRRYIEKNKKLTSIEIDQIKVQIEQESNYTHDHNEAEISAQSEQTEGETPLEGIDNLAAEANETIELSRDILNKYADLEGINVKDRSPLPKLSLTKKMKALIKESNSALEKNIQGKSLNQINQLLYAAAFVISDKVGKTPKQRKRSKSQGKPKWQTRIEKQVEKMRGELSLLTEMLKEDDHQKKSKKRSSIKKRYNIKMKEDIETIRESLKMKIQAKAQRLRRYDKRSKQYNQNRLFNKDRKKFYRSLGKEETKVENPPSKEEIEKFWRDILAEEKHHDNNAHWITREEEKYAHVESQKWDPITKEELRAAITKSANWKSPGIDAIPNFWLKQLTATHNALTTAFNKAIESPEDLPEWFTTARTFLLPKNDETDKPKNYRPIACLPTLYKVLTSIISERSYKHILANDILPEEQKGCARNSYGCKDQLLLNKAIIEDCKRKKKNLSVAWIDYRKAYDSVPHSWILKTLSIYKFNNKLINFMKKSMKSWNTTMCLNHVQGIITTEKIGIKRGIFQGDSLSPLLFCLALVPLTSEINASGYGYKMNRNSVPISNLFYMDDLKLYASNDDQQQGELRIVKQFSDDIKMSFGLDKCAKASFKKGKLIGTGNIELDKETSINELDQDKGYRYLGVDESEGIQHTKMKEKIRKEYYRRVRLIVRSELNGRNKIEAINSLAIPTVQYSFGIIDWKYSELKKLDSKTRKILTMHGMLHPKSDVDRIYITRKEGGRGLIEIETAFKVTIVGLNHYLENKRTLSSNMISVHEKTKPKYSISKIAKNIEREMTDLNFAPKPDKPTAENAKVLKQEIKKELVKKKNDRWLSKLLHGKYPSLIGEPHVDLPNTNNWLRSDIKGETEGLLIAAQDQALYTRNFQKHIIGKEIDSRCRMCYKQSETIDHITSGCEVLAKSDYIERHNKAATYVHWNICNDLGIKTSDKWYEHQPDTVSNTETHTVLWDMAVHTDRHIGANRPDIIIKDKVNSTCKLIDMSVPCDKNISIKEMEKKSKYQDLEIEIQRMWKMKTEVIPVVIGTLGTIRKGMEDNIRSVSENINLQIVQKTCLLGTARILRKVFSI

SEQ ID NO: 724 - protein, 938 aa, Morbakka virulenta
MQTLILQHTRTKNKTNNKTNNNNNNNNKIIKKKMRGELSLLTEMLKEDDHQKKSKKRSSIKKRYNIKMKEDIETIRESLKMKIQAKAQRLRRYDKRSKQYNQNRLFNKDRKKFYRSLGKEETKVENPPSKEEIEKFWRDILAEEKHHDNNAHWITREEEKYAHVESQKWDPITKEELRAAITKSANWKSPGIDAIPNFWLKQLTATHNALTTAFNKAIESPEDLPEWFTTARTFLLPKNDETDKPKNYRPIACLPTLYKVLTSIISERSYKHILANDILPEEQKGCARNSYGCKDQLLLNKAIIEDCKRKKKNLSVAWIDYRKAYDSVPHSWILKTLSIYKFNNKLINFMKKSMKSWNTTMCLNHVQGIITTEKIGIKRGIFQGDSLSPLLFCLALVPLTSEINASGYGYKMNRNSVPISNLFYMDDLKLYASNDDQQQGELRIVKQFSDDIKMSFGLDKCAKASFKKGKLIGTGNIELDKETSINELDQDKGYRYLGVDESEGIQHTKMKEKIRKEYYRRVRLIVRSELNGRNKIEAINSLAIPTVQYSFGIIDWKYSELKKLDSKTRKILTMHGMLHPKSDVDRIYIPRKEGGRGLIEIETAFKVTIVGLNHYLENKRTLSSNMISVHEKTKPKYSISKIAKNIEREMTDLNFAPKPDKPTAENAKVLKQEIKKELVKKKNDRWLSKLLHGKYPSLIGEPHVDLPNTNNWLRSDIKGETEGLLIAAQDQALYTRNFQKHIIGKEIDSRCRMCYKQSETIDHITSGCKVLAKSDYIERHNKAATYVHWNICNDLGIKTSDKWYEHQPDTVSNTETHTVLWDMAVHTDRHIGANRPDIIIKDKVNSTCKLIDMTVPCDKNISIKEMEKKSKYQDLEIEIQRMWKMKTEVIPVVIGALGTIRKGMEDNIRSVSENMNLQIVQKTCLLGTARILRKVFSI

SEQ ID NO: 725 - protein, 1196 aa, Morbakka virulenta
MNVQHKRISHRIARRAGHQGARPSVSDQTEVEKLATDLPSQETEDGNSSGRYFQQSPSATATSPIYGQQSKAKRHKWTREEYKEVMLCYYKAQAEPMKDNTTKEMYRLWRQRNPNVRPNMDANKIASQRRYIEKNKKLTSIEIDQIKVQIEQESNYTHDHNEAEISAQSEQTEGETPLEGIDNLAAEANETIELSRDILNKYADLEGINVKDRSPLPKLSLTKKMKALIKESNSALEKNIQGKSLNQINQLLYAAAFVISDKVGKTPKQRKRSKSQGKPKWQTRIEKQVEKMRGELSLLTEMLKEDDHQKKSKKRSSIKKRYNIKMKEDIETIRESLKMKIQAKAQRLRRYDKRSKQYNQNRLFNKDRKKFYRSLGKEETKVENPPSKEEIEKFWRDILAEEKHHDNNAHWITREEEKYAHVESQKWDPITKEELRAAITKSANWKSPGIDAIPNFWLKQLTATHNALTTAFNKAIESPEDLPEWFTTARTFLLPKNDETDKPKNYRPIACLPTLYKVLTSIISERSYKHILANDILPEEQKGCARNSYGCKDQLLLNKAIIEDCKRKKKNLSVAWIDYRKAYDSVPHSWILKTLSIYKFNNKLINFMKKSMKSWNTTMCLNHVQGIITTEKIGIKRGIFQGDSLSPLLFCLALVPLTSEINASGYGYKMNRNSVPISNLFYMDDLKLYASNDDQQQGELRIVKQFSDDIKMSFGLDKCAKASFKKGKLIGTGNIELDKETSINELDQDKGYRYLGVDESEGIQHTKMKEKIRKEYYRRVRLIVRSELNGRNKIEAINSLAIPTVQYSFGIIDWKYSELKKLDSKTRKILTMHGMLHPKSDVDRIYIPRKEGGRGLIEIETAFKVTIVGLNHYLENKRTLSSNMISVHEKTKPKYSISKIAKNIEREMTDLNFAPKPDKPTAENAKVLKQEIKKELVKKKNDRWLSKLLHGKYPSLIGEPHVDLPNTNNWLRSDIKGETEGLLIAAQDQALYTRNFQKHIIGKEIDSRCRMCYKQSETIDHITSGCEVLAKSDYIERHNKAATYVHWNICNDLGIKTSDKWYEHQPDTVSNTETHTVLWDMAVHTDRHIGANRPDIIIKDKVNSTCKLIDMSVPCDKNISIKEMEKKSKYQDLEIEIQRMWKMKTEVIPVVIGALGTIRKGMEDNIRSVSENMNLQIVQKTCLLGTARILRKVFSK

SEQ ID NO: 726 - protein, 1111 aa, Morbakka virulenta
MLCYYKAQAEPMKDNTTKEMYRLWRQRNPNVRPNMDANKIASQRRYIEKNKKLTSIEIDQIKVQIEQESNYTHDHNEAEISAQSEQTEGETPLKGIDNLAAEANETIELSRDILNKYADLEGINVKDRSPLPKLSLTKKMKALIKESNSALEKNIQGKSLNQINQLLYAAAFVISDKVGKTPKQRKRSKSQGKPKWQTRIEKQVEKMRGELSLLTEMLKEDDHQKKSKKRSSIKKRYNIKMKEDIETIRESLKMKIQAKAQRLRRYDKRSKQYNQNRLFNKDRKKFYRSLGKEETKVENPPSKEEIEKFWRDILAEEKHHDNNAHWITREEEKYAHVESQKWDPITKEELRAAITKSANWKSPGIDAIPNFWLKQLTATHNALTTAFNKAIESPEDLPEWFTTARTFLLPKNDETDKPKNYRPIACLPTLYKVLTSIISERSYKHILANDILPEEQKGCARNSYGCKDQLLLNKAIIEDCKRKKKNLSVAWIDYRKAYDSVPHSWILKTLSIYKFNNKLINFMKKSMKSWNTTMCLNHVQGIITTEKIGIKRGIFQGDSLSPLLFCLALVPLTSEINASGYGYKMNRNSVPISNLFYMDDLKLYASNDDQQQGELRIVKQFSDDIKMSFGLDKCAKASFKKGKLIGTGNIELDKETSINELDQDKGYRYLGVDESEGIQHTKMKEKIRKEYYRRVRLIVRSELNGRNKIEAINSLAIPTVQYSFGIIDWKYSELKKLDSKTRKILTMHGMLHPKSDVDRIYIPRKEGGRGLIEIETAFKVTIVGLNHYLENKRTLSSNMISVHEKTKPKYSISKIAKNIEREMTDLNFAPKPDKPTAENAKVLKQEIKKELVKKKNDRWLSKLLHGKYPSLIGEPHVDLPNTNNWLRSDIKGETEGLLIAAQDQALYTRNFQKHIIGKEIDSRCRMCYKQSETIDHITSGCEVLAKSDYIERHNKAATYVHWNICNDLGIKTSDKWYEHQPDTVSNTETHTVLWDMAVHTDRHIGANRPDIIIKDKVNSTCKLIDMSVPCDKNISIKEMEKKSKYQDLEIEIQRMWKMKTEVIPVVIGALGTIRKGMEDNIRSVSENMNLQIVQKTCLLGTARILRKVFSI

SEQ ID NO: 727 - protein, 1111 aa, Morbakka virulenta
MLCYCKAQAEPMKDNTKKEMYRLWRQRNPNVRPNMDANKIASQRRYIEKNKKLTSIEIDQIKVQIEQESNYTHDHNEAEISAQSEQTEGETPLEGIDNLAAEANETIELSRDILNKYADLEGINVKDRSPLPKLSLTKKMKALIKESNSALEKNIQGKSLNQINQLLYAAAFVISDKVGKTPKQRKRSKSQGKPKWQTRIEKQVEKMRGELSLLTEMLKEDDHQKKSKKRSSIKKRYNIKMKEDIETIRESLKMKIQAKAQRLRRYDKRSKQYNQNRLFNKDRKKFYRSLGKEERKVENPPSKEEIEKFWRDILAEEKHHDNNAHWITREEEKYAHVESQKWDPITKEELRAAITKSANWKSPGIDAIPNFWLKQLTATHNALTTAFNKAIESPEDLPEWFTTARTFLLPKNDETDKPKNYRPIACLPTLYKVLTSIISERSYKHILANDILPEEQKGCARNSYGCKDQLLLNKAIIEDCKRKKKNLSVAWIDYRKAYDSVPHSWILKTLSIYKFNNKLINFMKKSMKSWNTTMCLNHVQGIITTEKIGIKRGIFQGDSLSPLLFCLALVPLTSEINASGYGYKMNRNSVPISNLFYMDDLKLYASNDDQQQGELRIVKQFSDDIKMSFGLDKCAKASFKKGKLIGTGNIELDKETSINELDQDKGYRYLGVDESEGIQHTKMKEKIRKEYYRRVRLIVRSELNGRNKIEAINSLAIPTVQYSFGIIDWKYSELKKLDSKTRKILTMHGMLHPKSDVDRIYIPRKEGGRGLIEIETAFKVTIVGLNHYLENKRTLSSNMISVHEKTKPKYSISKIAKNIEREMTDLNFAPKPDKPTAENAKVLKQEIKKELVKKKNDRWLSKLLHGKYPSLIGEPHVDLPNTNNWLRSDIKGETEGLLIAAQDQALYTRNFQKHIIGKEIDSRCRMCYKQSETIDHITSGCEVLAKSDYIERHNKAATYVHWNICNDLGIKTSDKWYEHQPDTVSNTETHTVLWDMAVHTDRHIGANRPDIIIKDKVNSTCKLIDMSVPCDKNISIKEMEKKSKYQDLEIEIQRMWKIKTEVIPVVIGALGTIRKGMEDNIRSVSENMNLQIVQKTCLLGTARILRKVFSI

SEQ ID NO: 728 - protein, 1111 aa, Morbakka virulenta
MLCYYKAQAEPMKDNTTKEMYRLWRQRNPNVRPNMDANKIASQRRYIEKNKKLTSIEIDQIKVQIEQESNYTHDHNEAEISAQSEQTEGETPLEGIDNLAAEANETIELSRDILNKYADLEGINVKDRSPLPKLSLTKKMKALIKESNSALEKNIQGKSLNQINQLLYAAAFVISDKVGKTPKQRKRSKSQGKPKWQTRIEKQVEKMRGELSLLTEMLKEDDHQKKSKKRSSIKKRYNIKMKEDIETIRESLKMKIQAKAQRLRRYDKRSKQYNQNRLFNKDRKKFYRSLGKEETKVENPPSKEEIEKFWRDILAEEKHHDNNAHWITREEEKYAHVESQKWDPITKEELRAAITKSANWKSPGIDAIPNFWLKQLTATHNALTTAFNKAIESPEDLPEWFTTARTFLLPKNDETDKPKNYRPIACLPTLYKVLTSIISERSYKHILANDILPEEQKGCARNSYGCKDQLLLNKAIIEDCKRKKKNLSVAWIDYRKAYDSVPHSWILKTLSIYKFNNKLINFMKKSMKSWNTTMCLNHVQGIITTEKIGIKRGIFQGDSLSPLLFCLALVPLTSEINASGYGYKMNRNSVPISNLFYMDDLKLYASNDDQQQGELRIVKQFSDDIKMSFGLDKCAKASFKKGKLIGTGNIELDKETSINELDQDKGYRYLGVDESEGIQHTKMKEKIRKEYYRRVRLIVRSELNGRNKIEAINSLAIPTVQYSFGIIDWKYSELKKLDSKTRKILTMHGMLHPKSDVDRIYIPRKEGGRGLIEIETAFKVTIVGLNHYLENKRTLSSNMISVHEKTKPKYSISKIAKNIEREMTDLNFAPKPDKPTAENAKVLKQEIKKELVKKKNDRWLSKLLHGKYPSLIGEPHVDLPNTNNWLRSDIKGETEGLLIAAQDQALYTRNFQKHIIGKEIDSRCRMCYKQSETIDHITSGCEVLAKSDYIERHNKAATYVHWNICNDLGIKTSDKWYEHQPDTVSNTETHTVLWDMAVHTDRHIGANRPDIIIKDKVNSTCKLIDMTVPCDKNISIKEMEKKSKYQDLEIEIQRMWKMKTEVIPVVIGALGTIRKGMEDNIRSVSENMNLQIVQKTCLLGTARILRRVFSI

SEQ ID NO: 729 - protein, 1196 aa, Morbakka virulenta
MNVQHKRISHRIARRAGHQGARPSVSDQTEVEKLATDLPSQETEDGNSSGRYFQQSPSATATSPIYGQQSKAKRHKWTREEYKEVMLCYYKAQAEPMKDNTTKEMYRLWRQRNPNVRPNMDANKIASQRRYIEKNKKLTSIEIDQIKVQIEQESNYTHDHNEAEISAQSEQTEGETPLEGIDNLAAEANETIELSRDILNKYADLEGINVKDRSPLPKLSLTKKMKALIKESNSALEKNIQGKSLNQINQLLYAAAFVISDKVGKTPKQRKRSKSQGKPKWQTRIEKQVEKMRGELSLLTEMLKEDDHQKKSKKRSSIKKRYNIKMKEDIETIRESLKMKIQAKAQRLRRYDKRSKQYNQNRLFNKDRKKFYRSLGKEERKVENPPSKEEIEKFWRDILAEEKHHDNNAHWITREEEKYAHVESQKWDPITKEELRAAITKSANWKSPGIDAIPNFWLKQLTATHNALTTAFNKAIESPEDLPEWFTTARTFLLPKNDETDKPKNYRPIACLPTLYKVLTSIISERSYKHILANDILPEEQKGCARNSYGCKDQLLLNKAIIEDCKRKKKNLSVAWIDYRKAYDSVPHSWILKTLSIYKFNNKLINFMKKSMKSWNTTMCLNHVQGIITTEKIGIKRGIFQGDSLSPLLFCLALVPLTSEINASGYGYKMNRNSVPISNLFYMDDLKLYASNDDQQQGELRIVKQFSDDIKMSFGLDKCAKASFKKGKLIGTGNIELDKETSINELDQDKGYRYLGVDESEGIQHTKMKEKIRKEYYRRVRLIVRSELNGRNKIEAINSLAIPTVQYSFGIIDWKYSELKKLDSKTRKILTMHGMLHPKSDVDRIYIPRKEGGRGLIEIETAFKVTIVGLNHYLENKRTLSSNMISVHEKTKPKYSISKIAKNIEREMTDLNFAPKPDKPTAENAKVLKQEIKKEFVKKKNDRWLSKLLHGKYPSLIGEPHVDLPNTNNWLRSDIKGETEGLLIAAQDQALYTRNFQKHIIGKEIDSRCRMCYKQSETIDHITSGCEVLAKSDYIERHNKAATYVHWNICNDLGIKTSDKWYEHQPDTVSNTETHTVLWDMAVHTDRHIGANRPDIIIKDKVNSTCKLIDMSVPCDKNISIKEMEKKSKYQDLEIEIQRMWKMKTEVIPVVIGALGTIRKGTEDNIRSVSENMNLQIVQKTCLLGTARILRKVFSI

SEQ ID NO: 730 - protein, 1196 aa, Morbakka virulenta
MNVQPKRISHRIARRAGHQGARPSVSDQTEVEKLATDLPSQETEDGNSSGRYFQQSPSATATSPIYGQQSKAKRHKWTREEYKEVMLCYYKAQAEPMKDNTTKEMYRLWRQRNPNVRPNMDANKIASQRRYIEKNKKLTSIEIDQIKVQIEQESNYTHDHNEAEISAQSEQTEGETPLEGIDNLAAEANETIELSRDILNKYADLEGINVKDRSPLPKLSLTKKMKALIKESNSALEKNIQGKSLNQINQLLYAAAFVISDKVGKTPKQRKRSKSQGKPKWQTRIEKQVEKMRGELSLLTEMLKEDDHQKKSKKRSSIKKRYNIKMKEDIETIRESLKMKIQAKAQRLRRYDKRSKQYNQNRLFNKDRKKFYRSLGKEERKVENPPSKEEIEKFWRDILAEEKHHDNNAHWITREEEKYAHVESQKWDPITKEELRAAITKSANWKSPGIDAIPNFWLKQLTATHNALTTAFNKAIESPEDLPEWFTTARTFLLPKNDETDKPKNYRPIACLPTLYKVLTSIISERSYKHILANDILPEEQKGCARNSYGCKDQLLLNKAIIEDCKRKKKNLSVAWIDYRKAYDSVPHSWILKTLSIYKFNNKLINFMKKSMKSWNTTMCLNHVQGIITTEKIGIKRGIFQGDSLSPLLFCLALVPLTSEINASGYGYKMNRNSVPISNLFYMDDLKLYASNDDQQQGELRIVKQFSDDIKMSFGLDKCAKASFKKGKLIGTGNIELDKETSINELDQDKGYRYLGVDESEGIQHTKMKEKIRKEYYRRVRLIVRSELNGRNKIEAINSLAIPTVQYSFGIIDWKYSELKKLDSKTRKILTMHGMLHPKSDVDRIYIPRKEGGRGLIEIETAFKVTIVGLNHYLENKRTLSSNMISVHEKTKPKYSISKIAKNIEREMTDLNFAPKPDKPTAENAKVLKQEIKKELVKKKNDRWLSKLLHGKYPSLIGEPHVDLPNTNNWLRSDIKGETEGLLIAAQDQALYTRNFQKHIIGKEIDSRCRMCYKQSETIDHITSGCEVLAKSDYIERHNKAATYVHWNICNDLGIKTSDKWYEHQPDTVSNTETHTVLWDMAVHTDRHIGANRPDIIIKDKVNSTCKLIDMSVPCDKNISIKEMEKKSKYQDLEIEIQRMWKMKTEVIPVVIGALGTIRKGMEDNIRSVSENMNLQIVQKTCLLGTARILRKVFSI

SEQ ID NO: 731 - protein, 905 aa, Morbakka virulenta
MRGELSLLTEMLKEDDHQKKSKKRISIKKRYNIKMKEDIETIRESLKMKIQAKAQRLRRYDKRSKQYNQNRLFNKDRKKLYRSLGKEETKVENPPSKEEIEKFWRDILAEEKHHDNNAHWITREEEKYAHVESQKWDPITKEELRAAITKSANWKSPGIDAIPNFWLKQLTATHNALTTAFNKAIESPEDLPEWFTTARTFLLPKNDETDKPKNYRPIACLPTLYKVLTSIISERSYKHILANDILPEEQKGCARNSYGCKDQLLLNKAIIEDCKRKKKNLSVAWIDYRKAYDSVPHSWILKTLSIYKFNNKLINFMKKSMKSWNTTMCLNHVQGIITTEKIGIKRGIFQGDSLSPLLFCLALVPLTSEINASGYGYKMNRNSVPISNLFYMDDLKLYASNDDQQQGELRIVKQFSDDIKMSFGLDKCAKASFKKGKLIGTGNIELDKETSINELDQDKGYRYLGVDESEGIQHTKMKEKIRKEYYRRVRLIVRSELNGRNKIEAINSLAIPTVQYSFGIIDWKYSELKKLDSKTRKILTMHGMLHPKSDVDRIYIPRKEGGRGLIEIETAFKVTIVGLNHYLENKRTLSSNMISVHEKTKPKYSISKIAKNIEREMTDLNFAPKPDKPTAENAKVLKQEIKKELVKKKNDRWLSKLLHGKYPSLIGEPHVDLPNTNNWLRSDIKGETEGLLIAAQDQALYTRNFQKHIIGKEIDSRCRMCYKQSETIDHITSGCEVLAKSDYIERHNKAATYVHWNICNDLGIKTSDKWYEHQPDTVSNTETHTVLWDMAVHTDRHIGANRPDIIIKDKVNSTCKLIDMTVPCDKNISIKEMEKKSKYQDLEIEIQRMWKMKTEVIPVVIGALGTIRKGMEDNIRSVSENMNLQIVQKTCLLGTARILRKVFSI

SEQ ID NO: 732 - protein, 1196 aa, Morbakka virulenta
MNVQHKRISHRIARRAGHQGARPSVSDQTEVEKLATDLPSQETEDGNSSGRYFQQSPSATATSPIYGQQSKAKRHKWTREEYKEVMLCYYKAQAEPMKDNTTKEMYRLWRQRNPNVRPNMDANKIASQRRYIEKNKKLTSIEIDQIKVQIEQESNYTHDHNEAEISAQSEQTEGETPLKGIDNLAAEANETIELSRDILNKYADLEGINVKDRSPLPKLSLTKKMKALIKESNSALEKNIQGKSLNQINQLLYAAAFVISDKVGKTPKQRKRSKSQGKPKWQTRIEKQVEKMRGELSLLTEMLKEDDHQKKSKKRSSIKKRYNIKMKEDIETIRESLKMKIQAKAQRLRRYDKRSKQYNQNRLFNKDRKKFYRSLGKEERKVENPPSKEEIEKFWRDILAEEKHHDNNAHWITREEEKYAHVESQKWDPITKEELRAAITKSANWKSPGIDAIPNFWLKQLTATHNALTTAFNKAIESPEDLPEWFTTARTFLLPKNDETDKPKNYRPIACLPTLYKVLTSIISERSYKHILANDILPEEQKGCARNSYGCKDQLLLNKAIIEDCKRKKKNLSVAWIDYRKAYDSVPHSWILKTLSIYKFNNKLINFMKKSMKSWNTTMCLNHVQGIITTEKIGIKRGIFQGDSLSPLLFCLALVPLTSEINASGYGYKMNRNSVPISNLFYMDDLKLYASNDDQQQGELRIVKQFSDDIKMSFGLDKCAKASFKKGKLIGTGNIELDKETSINELDQDKGYRYLGVDESEGIQHTKMKEKIRKEYYRRVRLIVRSELNGRNKIEAINSLAIPTVQYSFGIIDWKYSELKKLDSKTRKILTMHGMLHPKSDVDRIYIPRKEGGRGLIEIETAFKVTIVGLNHYLENKRTLSSNMISVHEKTKPKYSISKIAKNIEREMTDLNFAPKPDKPTAENAKVLKQEIKKELVKKKNDRWLSKLLHGKYPSLIGEPHVDLPNTNNWLRSDIKGETEGLLIAAQDQALYTRNFQKHIIGKEIDSRCRMCYKQSETIDHITSGCEVLAKSDYIERHNKAATYVHWNICNDLGIKTSDKWYEHQPDTVSNTETHTVLWDMAVHTDRHIGANRPDIIIKDKVNSTCKLIDMSVPCDKNISIKEMEKKSKYQDLEIEIQRMWKMKTEVIPVVIGALGTKRKGMEDKIRSVSEKMKLKIVQKNCLLGTARILRKVFSI

SEQ ID NO: 733 - protein, 1196 aa, Morbakka virulenta
MNVQHKRISHRIARRAGHQGARPSVSDQTEVEKLATDLPSQETEDGNSSGRYFQQSPSATATSPIYGQQSKAKRHKWTREEYKEVMLCYYKAQAEPMKDNTTKEMYRLWRQRNPNVRPNMDANKIASQRRYIEKNKKLTSIEIDQIKVQIEQESNYTHDHNEAEISAQSEQTEGETPLEGIDNLAAEANETIELSRDILNKYADLEGINVKDRSPLPKLSLTKKMKALIKESNSALEKNIQGKSLNQINQLLYAAAFVISDKVGKTPKQRKRSKSQGKPKWQTRIEKQVEKMRGELSLLTEMLKEDDHQKKSKKRSSIKKRYNIKMKEDIETIRESLKMKIQAKAQRLRRYDKRSKQYNQNRLFNKDRKKFYRSLGKEETKVENPPSKEEIEKFWRDILAEEKHHDNNAHWITREEEKYAHVESQKWDPITKEELRAAITKSANWKSPGIDAIPNFWLKQLTATHNALTTAFNKAIESPEDLPEWFTTARTFLLPKNDETDKPKNYRPIACLPTLYKVLTSIISERSYKHILANDILPEEQKGCARNSYGCKDQLLLNKAIIEDCKRKKKNLSVAWIDYRKAYDSVPHSWILKTLSIYKFNNKLINFMKKSMKSWNTTMCLNHVQGIITTEKIGIKRGIFQGDSLSPLLFCLALVPLTSEINASGYGYKMNRNSVPISNLFYMDDLKLYASNDDQQQGELRIVKQFSDDIKMSFGLDKCAKASFKKGKLIGTGNIELDKETSINELDQDKGYRYLGVDESEGIQHTKMKEKIRKEYYRRVRLIVRSELNGRNKIEAINSLAIPTVQYSFGIIDWKYSELKKLDSKTRKILTMHGMLHPKSDVDRIYIPRKEGGRGLIEIETAFKVTIVGLNHYLENKRTLSSNMISVHEKTKPKYSISKIAKNIEREMTDLNFAPKPDKPTAENAKVLKQEIKKELVKKKNDRWLSKLLHGKYPSLIGEPHVDLPNTNNWLRSDIKGETEGLLIAAQDQALYTRNFQKHIIGKEIDSRCRMCYKQSETIDHITSGCEVLAKSDYIERHNKAATYVHWNICNDLGIKTSDKWYEHQPDTVSNTETHTVLWDMAVHTDRHIGANRPDIIIKDKVNSTCKLIDMSVPCDKNISIKEMEKKSKYQDLEIEIQRMWKMKTEVIPVVIGALGTIRKGMEDNIRSVSENMNLQIVQKTCLLGTARILRKVFSI

SEQ ID NO: 734 - protein, 853 aa, Morbakka virulenta
MFQEDQGMFYRKTQERKQTKGKVPEMEKFEEFWAGIWEDETPTPYRKWMKTIANKIREKVTDVQALVIDEKKLFEAVRKRKNWSAPGIDGIQNFWWKKLKGAWQSMVRCFNQWIEQPDDIPTWITQGRTVLLPKSEDLSNERNYRPITCLITCYKVFTGMVGNYMKEHADRNNIWDRSQLGTCSGVLGTVDQLIIDNAIMDEVRGYQRNVAVAFYDYQKAYDMVRHDWIIRVYRWMKVPENIISVISKLMEGWKTKLEVTENGKTITSRMINFKKGFLQGDSFSPIGFCLTEVPVAMLIEETDGYKMGNKDGERVKRTHSLFIDDLKIYQESHQKLEIVNEMIVKASMDTGACYGVNKCAEIVFKKGKMVKGDGLTVLEEKMDAFDPDKNEIYKFLGCEQADKIDVKRVMERVKKEIRKRMDHLVGLNLNDQNLMKAINCRVIPVARYVMNVVHLGKGELDELDKIVKSILRREGFHGRQTSDERLYAKRCDGGRGLKSFKDVYDETKTRVACYMATSTNKWIRVAWKHEMNKEHSLLKRDAEAAVKRVAVDVTFDEGHVTICKERFDDWKEAWKKLKKQLHSGQKGNREIRLAEKPLQSEITLRYEKEDYVWLKCNTDPRKTASIFTLQEQMVESRAWKKLRGLIDTDECRLCGEQRETIQHLLSGCKKLAGSEYVKRHNNALKVLAVKWATEKGLLPEGTKWYTQRWEKGKVLENEGKKLYWDWEHRMRTNCTARRPDLTLEDGEKKTILLVDMACPNEMNRRLKREEKINKKYEQLCFEIRERREEYNVKMIPIVVGCLGGGMKELKTDIQKIFVFDNEKELQTLLREIQTIVLWESESIIRKVLSGLLT

SEQ ID NO: 735 - protein, 1288 aa, Morbakka virulenta
MGDIDQNQFQPNDINNTEEGALQGENVAGNRAVPNGEAQTRHHLSTYTDDEKKWLVRVADEERTRGTGFLMRLKRKWDETFPDKSHVSKQNLRDNATRFKKEMPNDGASDGSGRRLVQLNVPNVSRKWTNEMKVNLLKIEECERKKGRGFMKRMKEAWDEIYGDNQMSAQTLRDNAGRFRKDKSLLNLIEVRDGENMEPQDIDQRNVEQDRNEEKDNMIKNAEPEENDNEFGQNGESSENESENENNEEEETMILRMRFEDVLATLTTTTKESIANRERLVKLKKGLPKKEIDTANKVLEKHLTNNVDICKVVDAVYAMARTLEERCGIKRNGKRKKETSYPNQKNRRIRKSEEKIKSLRQILAWTSNEIHRRKTKRKSTRKEKKILQKLRERSELQLGKQEELIVLKESTLDELRYRRTKLKHVKNRDAKIRNNRMFQEDQGMLYRKTQERKQTKGKVPEMEKFEEFWAGIWEDETPTPYRKWMKTIANKIREKVTDVQALVIDEKKLFEAVRKRKNWSAPGIDGIQNFWWKKLKGAWQSMVGCFNQWIEQPDDIPIWITQGRSVLLPKSEDLSNERNYRPITCLITCYKVFNCMVRNYMKEHADRNSIWDRNQLGTCSGALGTVDQLIIDNAIMDEVRGYQRNVAVAFYDYQKAYDMVRHDWIIRVYRWMKVPENIISVISKLMEGWKTKLEVTENGKTITSRMINFKKGFLQGDSFSPIGFCLTEVPVAMLIEETDGYKMGNKDGERVKRTHSLFIDDLKIYQESHQKLEIVNEMIVKASMDTGACYGVNKCAEIVFKKGKMVKGDGLTVLEEKMDAFDPDKNEIYKFLGCEQADKIDVKRVMERVKKEIRKRMDHLVGLNLNDQNLMKAINCRVIPVARYVMNVVHLGKGEIDELDKIVKSILRREGFHGRQTSDERLYAKRCDGGRGLKSFKDVYDETKTRVACYMATSTNKWIRVAWKHEMNKEHSLLKRDAEAAVKRVAVDVTFDEGHVTICKERFDDWKEAWKKLKKQLHSGQKGNREIRLAEKPLQSEITLRYEKEDYVWLKCNTDPRKTASIFTLQEQMVESRAWKKLRGLIDTDECRLCGEQRETIQHLLSGCKKLAGSEYVKRHNNALKVLAVKWAAEKGLLPEGTKWYTQRWEKGKVLENKGKKLYWDWEHRMRTNCTARRPDLTLEDEEKKTILLVDMACPNEMNRHLKREEKIKKYEQLCFEIRERREDYNVKMIPIVVGCLGGGMKELKTDIQKIFEFDNEKELQTLLREIQKTVLWESESIIRKVLSGLLT

SEQ ID NO: 736 - protein, 1248 aa, Morbakka virulenta
MGDIDQNQFQPNDINNTEEGALQGENVAGNRAVPNGEAQTRHHLSTYTDDEKKWLVRVADEERTRGTGFLMRLKRKWDETFPDKSHVSKQNLRDNATRFKKEMPNDGASDGSGRRLVQLNVPNVSRKWTNEMKVNLLKIEECERKKGRGFMKRMKEAWDEIYGDNQMSAQTLRDNAGRFRKDKSLLNLIEVRDGENMEPQDIDQRNVEQDRNEEKDNMIKNAEPEENDNEFGQNGESSENESENENNEEEETMILRMRFEDVLATLTTTTKESIANRERLVKLKKGLPKKEIDTANKVLEKHLTNNVDICKVVDAVYAMARTLEERCGIKRNGKRKKETSHPNQKNRRIRKSEEKIKSLRQILAWTSNEIHRRKTKRKSTRKEKKILQKLRERSELQLGKQEELIVLKESTLDELRYRRTKLKHVKNRDAKIRNNRMFQEDQGMFYRKTQERKQTKGKVPEMEKFEEFWAGIWEDETPTPYRKWMKTIANKIREKVTDVQALIIDEKKLFEAVRKRKNWSAPGIDGIQNFWWKKLKGAWQSMVRCFNQWIEQPDDIPTWITQGRTVLLPKSEDLSNERNYRPITCLITCYKVFTGMVGNYMKEHADRNNIWDRSQLGTCSGVLGTVDQLIIDNAIMDEVRGYQRNVAVAFYDYQKAYDMVRHDWIIRVYRWMKVPENIISVISKLMEGWKTKLEVTENGKTITSRMINFKKGFLQGDSFSPIGFCLTEVPVAMLIEETDGYKMGNKDGERVKRTHSLFIDDLKIYQESHQKLEIVNEMIVKASMDTGACYGVNKCAEIVFKKGKMVKGDGLTVLEEKMDAFDPDKNEIYKFLGCEQADKIDVKRVMERVKKEIRKRMDHLVGLNLNDQNLMKAINCRVIPVARYVMNVVHLGKGELDELDKIVKSILRREGFHGRQTSDERLYAKRCDGGRGLKSFKDVYDETKTRVACYMATSTNKWIRVAWKHEMNKEHSLLKRDAEAAVKRVAVDVTFDEGHVTICKERFDDWKEAWKKLKKQLHSGQKGNREIRLAEKPLQSEITLRYEKEDYVWLKCNTDPRKTASIFTLQEQMVESRAWKKLRGLIDTDECRLCGEQRETIQHLLSGCKKLAGSEYVKRHNNALKVLAVKWAAEKGLLPEGTKWYTQRWEKGKVLENKGKKLYWDWEHRMRTNCTARRPDLTLEDEEKKTILLVDMACPNEMNRHLKREEKIKKYEQLCFEIRERREDYNVKMIPIVVGCLGGGMKELKTDI

SEQ ID NO: 737 - protein, 852 aa, Morbakka virulenta
MFQEDQGMFYRKTQERKQTKGKVPEMEKFEEFWAGIWEDETPTPYRKWMKTIANKIREKVTDVQALVIDEKKLFEAVRKRKNWSAPGIDGIQNFWWKKLKGAWQSMVRCFNQWIEQPDDIPTWITQGRTVLLPKSEDLSNERNYRPITCLITCYKVFTGMVGNYMKEHADRNNIWDRSQLGTCSGVLGTVDQLIIDNAIMDEVRGYQRNVAVAFYDYQKAYDMVRHDWIIRVYRWMKVPENIISVISKLMEGWKTKLEVTENGKTITSRMINFKKGFLQGDSFSPIGFCLTEVPVAMLIEETDGYKMGNKDGERVKRTHSLFIDDLKIYQESHQKLEIVNEMIVKASMDTGACYGVNKCAEIVFKKGKMVKGDGLTVLEEKMDAFDPDKNEIYKFLGCEQADKIDVKRVMERVKKEIRKRMDHLVGLNLNDQNLMKAINCRVIPVARYVMNVVHLGKGELDELDKIVKSILRREGFHGRQTSDERLYAKRCDGGRGLKSFKDVYDETKTRVACYMATSTNKWIRVAWKHEMNKEHSLLKRDAEAAVKRVAVDVTFDEGHVTICKERFDDWKEAWKKLKKQLHSGQKGNREIRLAEKPLQSEITLRYEKEDYVWLKCNTDPRKTASIFTLQEQMVESRAWKKLRGLIDTDECRLCGEQRETIQHLLSGCKKLAGSEYVKRHNNALKVLAVKWAAEKGLLPEGTKWYTQRWEKGKVLENKGKKLYWDWEHRMRTNCTARRPDLTLEDGEKKTILLVDMACPNEMDRHLKREEKIKKYEKLCFEIRERREDYNVKMIPIVVGCLGGGMKELKTDIQKIFEFDNEKELQTLLREIQKTVLWESESIIRKVLSGLLT

SEQ ID NO: 738 - protein, 1032 aa, Morbakka virulenta
MRFEDVLATLTTTTKESIANRERLVKLKKGLPKKEIDTANKVLEKHLTNNVDICKVVDAVYAMARTLEERCGIKRNGKRKKETSHPNQKNRRIRKSEEKIKSLRQILAWTSNEIHRRKTKRKSTRKEKKILQKLRERSELQLGKQEELIVLKESTLDELRYRRTKLKHVKNRDAKIRNNRMFQEDQGMFYRKTQERKQTKGKVPEMEKFEEFWAGIWEDETPTPYRKWMKTIANKIREKVTDVQALVIDEKKLFEAVRKRKNWSAPGIDGIQNFWWKKLKGAWQSMVRCFNQWIEQPDDIPTWITQGRTVLLPKSEDLSNERNYRPITCLITCYKVFTGMVGNYMKEHADRNNIWDRSQLGTCSGVLGTVDQLIIDNAIMDEVRGYQRNVAVAFYDYQKAYDMVRHDWIIRVYRWVKVPENIISVISKLMEGWKTKLEVTENGKTITSRMINFKKGFLQGDSFSPIGFCLTEVPVAMLIEETDGYKMGNKDGERVKRTHSLFIDDLKIYQESHQKLEIVNEMIVKASMDTGACYGVNKCAEIVFKKGKMVKGDRLTVLEEKMDAFDPDKNEIYKFLGCEQADKIDVKRVMERVKKEIRKRMDHLVGLNLNDQNLMKAINCRVIPVARYVMNVVHLGKGELDELDKIVKSILRREGFHGRQTSDERLYAKRCDGGRGLKSFKDVYDETKTRVACYMATSTNKWIRVAWKHEMNKEHSLLKRDAEAAVKRVAVDVTFDEGHVTICKERFDDWKEAWKKLKKQLHSGQKGNREIRLAEKPLQSEITLRYEKEDYVWLKCNTDPRKTASIFTLQEQMVESRAWKKLRGLIDTDECRLCGEQRETIQHLLSGCKKLAGSEYVKRHNNALKVLAVKWAAEKGLLPEGTKWYTQRWEKGKVLENKGKKLYWDWEHRMRTNCTARRPDLTLEDEEKKAILLVDMACPNEMNRHLKREEKIKKYEQLCFEIRERREDYNVKMILIVVGCLGGGMKELKMDIQKIFEFDNEKELQTLLREIQKAVLWESESIIRKVLSGLLT

SEQ ID NO: 739 - protein, 1288 aa, Morbakka virulenta
MGDIDQNQFQPNDINNTEEGALQGENVAGNRAVPNGEAQTRHHLSTYTDDEKKWLVRVADEERTRGTGFLMRLKRKWDETFPDKSHVSKQNLRDNATRFKKEMPNDGASDGSGRRLVQLNVPNVSRKWTNEMKVNLLKIEECERKKGRGFMKRMKEAWDEIYGDNQMSAQTLRDNAGRFRKDKSLLNLIEVRDGENMGPQDIDQRNVEQDRNEEKDNMIKNAEPEENDNEFGQNGESSENESENENNEEEETMILRMRFEDVLATLTTTTKESIANRERLVKLKKGLPKKEIDTANKVLEKHLTNNVDICKVVDAVYAMARTLEERCGIKRNGKRKKETSYPNQKNRRIRKSEEKIKSLRQILAWTSNEIHRRKTKRKSTRKEKKILQKLRERSELQLGKQEELIVLKESTLDELRYRRTKLKHVKNRDAKIRNNRMFQEDQGMFYRKTQERKQTKGKVPEMEKFEEFWAGIWEDETPTPYRKWMKTIANKIREKVTDVQALIIDEKKLFEAVRKRKNWSAPGIDGIQNFWWKKLKGAWQSMVRCFNQWIEQPDDIPTWITQGRTVLLPKSEDLSNERNYRPITCLITCYKVFTGMVGNYMKEHADRNNIWDRSQLGTCSGVLGTVDQLIIDNAIMDEVRGYQRNVAVAFYDYQKAYDMVRHDWIIRVYRWMKVPENIISVISKLMEGWKTKLEVTENGKTITSRMINFKKGFLQGDSFSPIGFCLTEVPVAMLIEETDGYKMGNKDGERVKRTHSLFIDDLKIYQESHQKLEIVNEMIVKASMDTGACYGVNKCAEIVFKKGKMVKGDGLTVLEEKMDAFDPDKNEIYKFLGCEQADKIDVKRVMERVKKEIRKRMDHLVGLNLNDQNLMKAINCRVIPVARYVMNVVHLGKGELDELDKIVKSILRREGFHGRQTSDERLYAKRCDGGRGLKSFKDVYDETKTRVACYMATSTNKWIRVAWKHEMNKEHSLLKRDAEAAVKRVAVDVTFDEGHVTICKERFDDWKEAWKKLKKQLHSGQKGNREIRLAEKPLQSEITLRYEKEDYVWLKCNTDPRKTASIFTLQEQMVESRAWKKLRGLIDTDECRLCGEQRETIQHLLSGCKKLAGSEYVKRHNNALKVLAVKWAAEKGLLPEGTKWYTQRWEKGKVLENKGKKLYWDWEHRMRTNCTARRPDLTLEDEEKKTILLVDMACPNEMNRHLKREEKIKKYEQLCFEIRERREDYNVKMIPIVVGCLGGGIKELKMDIQKIFEFDNEKELQTLLREIQKTVLWESESIIRKVLSGLLT

SEQ ID NO: 740 - protein, 844 aa, Morbakka virulenta
MARTLEERCGIKRNGKRKKETSYPNQKNRRIRKSEEKIKSLRQILAWTSNEIHRRKTKRKSTRKEKKILQKLRERSELQLGKQEELIVLKESTLDELRYRRTKLKHVKNRDAKIRNNRMFQEDQGMFYRKTQERKQTKGKVPEMEKFEEFWAGIWEDETPTPYRKWMKTIANKIREKVTDVQALVIDEKKLFEAVRKRKNWSAPGIDGIQNFWWKKLKGAWQSMVRCFNQWIEQPDDIPTWITQGRTVLLPKSEDLSNERNYRPITCLITCYKVFTGMVGNYMKEHADRNNIWDRSQLGTCSGVLGTVDQLIIDNAIMDEVRGYQRNVAVAFYDYQKAYDMVRHDWIIRVYRWMKVPENIISVISKLMEGWKTKLEVTENGKTITSRMINFKKGFLQGDSFSPIGFCLTEVPVAMLIEETDGYKMGNKDGERVKRTHSLFIDDLKIYQESHQKLEIVNEMIVKASMDTGACYGVNKCAEIVFKKGKMVKGDGLTVLEEKMDAFDPDKNEIYKFLGCEQADKIDVKRVMERVKKEIRKRMDHLVGLNLNDQNLMKAINCRVIPVARYVMNVVHLGKGELDELDKIVKSILRREGFHGRQTSDERLYAKRCDGGRGLKSFKDVYDETKTRVACYMATSTNKWIRVAWKHEMNKEHSLLKRDAEAAVKRVAVDVTFDEGHVTICKERFDDWKEAWKKLKKQLHSGQKGNREIRLAEKPLQSEITLRYEKEDYVWLKCNTDPRKTASIFTLQEQMVESRAWKKIRGLIDTDECRLCGEQRETIQHLLSGCKKLAGSEYVKRHNNALKVLAVKWATEKGLRPEGTKWYTQRWEKGKVLENEGRQEAVLG

SEQ ID NO: 741 - protein, 1066 aa, Morbakka virulenta
MIHNTEPEEKDNGFSQNGDSSENESENENNEEEETMILRMRFEDVLATLTTTTKESIANRERLVKLKKGLPKKEIDTANKVLEKHLTNNVDICKVVDAVYAMARTLEERCGIKRNGKRKKETSYPNQKNRRIRKSEEKIKSLRQILAWTSNEIHRRKTKRKSTRKEKKILQKLRERSELQLGKQEELIVLKESTLDELRYRRTKLKHVKNRDAKIRNNRMFQEDQGMFYRKTQERKQTKGKVPEMEKFEEFWAGIWEDETPTPYRKWMKTIANKIREKVTDVQALVIDEKKLFEAVRKRKNWSAPGIDGIQNFWWKKLKGAWQSMVRCFNQWIEQPDDIPTWITQGRTVLLPKSEDLSNERNYRPITCLITCYKVFTGMVGNYMKEHADRNNIWDRSQLGTCSGVLGTVDQLIIDNAIMDEVRGYQRNVAVAFYDYQKAYDMVRHDWIIRVYRWMKVPENIISVISKLMEGWKTKLEVTENGKTITSRMINFKKGFLQGDSFSPIGFCLTEVPVAMLIEETDGYKMGNKDGERVKRTHSLFIDDLKIYQESHQKLEIVNEMIVKASMDTGACYGVNKCAEIVFKKGKMVKGDGLTVLEEKMDAFDPDKNEIYKFLGCEQADKIDVKRVMERVKKEIRKRMDHLVGLNLNDQNLMKAINCRVIPVARYVMNVVHLGKGELDELDKIVKSILRREGFHGRQTSDERLYAKRCDGGRGLKSFKDVYDETKTRVACYMATSTNKWIRVAWKHEMNKEHSLLKRDAEAAVKRVAVDVTFDEGHVTICKERFDDWKEAWKKLKKQLHSGQKGNREIRLAEKPLQSEITLRYEKEDYVWLKCNTDPRKTASIFTLQEQMVESRAWKKLRGLIDTDECRLCGEQRETIQHLLSGCKKLAGSEYVKRHNNALKVLAVKWAAEKGLLPEGTKWYTQRWEKGKVLENKGKKLYWDWEHRMRTNCTARRPDLTLEDEEKKTILLVDMACPNEMNRHLKREEKIKKYEQLCFEIRERREDYNVKMIPIVVGCLGGGMKELKMDIQKIFEFDNEKKLQTLLREIQKTVLWESESIIRKVL

SEQ ID NO: 742 - protein, 1252 aa, Morbakka virulenta
MGDIDQNQFQPNDINNTEEGALQGENVAGNRAVPNGEAQTRHHLSTYTDDEKKWLVRVADEERTRGTGFLMRLKRKWDETFPDKSHVSKQNLRDNATRFKKEMPNDGASDGSGRRLVQLNVPNVSRKWTNEMKVNLLRIEECERKKGRGFMKRMKEAWDEIYGDNQMSAQTLRDNAGRFRKDKSLLNLIEVRDGENMEPQDIDQRNVEQDRNEEKDNMIKNAEPEENDNEFGQNGESSENESENENNEEEETMILRMRFEDVLATLTTTTKESIANRERLVKLKKGLPKKEIDTANKVLEKHLTNNVDICKVVDAVYAMARTLEERCGIKRNGKRKKETSHPNQKNRRIRKSEEKIKSLRQILAWTSNEIHRRKTKRKSTRKEKKILQKLRERSELQLGKQEELIVLKESTLDELRYRRTKLKHVKNRDAKIRNNRMFQEDQGMFYRKTQERKQTKGKVPEMEKFEEFWAGIWEDETPTPYRKWMKTIANKIREKVTDVQALVIDEKKLFEAVRKRKNWSAPGIDGIQNFWWKKLKGAWQSMVRCFNQWIEQPDDIPTWITQGRTVLLPKSEDLSNERNYRPITCLITCYKVFTGMVGNYMKEHADRNNIWDRSQLGTCSGVLGTVDQLIIDNAIMDEVRGYQRNVAVAFYDYQKAYDMVRHDWIIRVYRWMKVPENIISVISKLMEGWKTKLEVTENGKTITSRMINFKKGFLQGDSFSPIGFCLTEVPVAMLIEETDGYKMGNKDGERVKRTHSLFIDDLKIYQESHQKLEIVNEMIVKASMDTGACYGVNKCAEIVFKKGKMVKGDGLTVLEEKMDAFDPDKNEIYKFLGCEQADKIDVKRVMERVKKEIRKRMDHLVGLNLNDQNLMKAINCRVIPVARYVMNVVHLGKGELDELDKIVKSILRREGFHGRQTSDERLYAKRCDGGRGLKSFKDVYDETKTRVACYMATSTNKWIRVAWKHEMNKEHSLLKRDAEAAVKRVAVDVTFDEGHVTICKERFDDWKEAWKKLKKQLHSGQKGNREIRLAEKPLQSEITLRYEKEDYVWLKCNTDPRKTASIFTLQEQMVESRAWKKLRGLIDTDECRLCGEQRETIQHLLSGCKKLAGSEYVKRHNNALKVLAVKWAAEKGLLPEGTKWYTQRWEKGKVLENKGKKLYWDWEHRMRTNCTARRPDLTLEDEEKKTILLVDMACPNEMNRHLKREEKIKKYEQLCFEIRERREDYNVKMIPIVVGCLGGGMKELKMDIQKNL

SEQ ID NO: 743 - protein, 1324 aa, Trachythela sp.
MAIPSGYVPPLTRDYPSGCRLSCGMCNKTFNSLRMQYNHISRKRHMLPGPQDVHVLFYLNLRQQTIKCPVCPFRSKNVKTARGFTQHFKKDHSGYTLDLAYHCSVCEESYTEDEVQPHLDQHRERRMPLTPVLPVPVPSSPTLPSTPQLPSTPIVRTPSPAASELSYRSSRNSTLPDDPPSSPPSMTIDLSQPIPDSANPMSPNAPSQELLSPTAVDHFLMRSFLDACVEDPPSTSQPTTQTSPQTPPSIPHLNPNMLPLLGDVSFTAINNSPAVNNLLPSSIHPPTRPISTPSPAIPPLMSNIISTPNRTLPSTRQPSPPTLPRPRASDFFEDNPQLPSQQPILEDIFEPLQTHTSPPRPNSLNTSPPIPGTSCASPLGEDPSTQSFPTTQTSTTLEEFRQRWSCEFGEEMDFNEFSNLTTQFASDGLNLAREIASQQRPRPAARRPDRPSARPPIDRRRPTASDPSSARRLQHLYRVSKKRAARKVFGDDSPGFDGTLDEATRYFTQSFGPRDCDTDQLLEELISFVPSVDTDDTLFDPPTPEELSQKLRSFANSAPGKDRLEYRHLRLLDPKCHILAKMYRHCFAQRDVPPEWKTATTILIHKKDSTSDASNFRPIALMSCLYKLLMSILAKRMTNFSIAKDLLSAEQKSARPSEGCYEHAFLLESILNDARRQPRPIFLAWLDIRNAFGSVPHSALITTLTHMGFPQSLISMTGNVYSGASTEVLTPIGKTPSIPIHSGVKQGCPLSAILFNLALELILRKCKATAETFTSGSLKHHGISISVLAYADDLVIMARSADALQKLLDSVSTAANVLGLEFRPDKSASLSLHKKNPRVELIDYLVQGQTIPPLEREEHYRYLGVPIGLVHNIQQIGTLVDELAEKLTRIEQSLLAPWQKLDAIRTFVQPCLTYAFRSTDPTTKSLEAYRAQLIRTVRSVCSLPTRATTHYIFGAKQAGGLGFTDPCQENHLQTVVQAVKMLASSDPTVASIAKLELRQTVRFAAQSDPTPNLVSSFLSNSSDRRLETIRSRTGSLWTRTRRATKHMNITINVPDIGPPTVTTPEYVDPVQAKDVCRFLHNITRDAEAKKLCELRDQGKVARALNTDRFANGSSWHFTGLNIRFKDWRFIHKARLNCLPTNSVKSRWSDSDPTCRHCEQPETLPHVLCHCPPNMPAITERHNKVVERLVKAVRHGDISTDRTVQDSHSPVRPDIVIETEDRVTIIDVCCPFENGAEALEEAAARKELEYEHLKSHFESQGKQCDVFGFAIGALGAWFPDNERVLNALGMSPRYKNLFRKLCCTDVIQGSNDIYRQHLGCDDVLP

SEQ ID NO: 744 - protein, 1198 aa, Trachythela sp.
MPLTPVLPVPVPPSPTLPSTPQLPSTPIVRTPSPAASELSYRSSRNSTLPDDPPSSPPSMTIDLSQPIPDSANPMSPNAPSQELLSPTAVDHFLMRSFLDACVEDPPSTSQPTTQTSPQPPPSIPHLNPNTLPLLGDVSFTAINNSPAVNNLLPSSIHPPTRPISTPSPAIPPLMSNIISTPNRTLPSTRQPSPPTLPRPRASDFFEDNPQPPSQQPILEDMFEPLQTHTSPPRPNSLNTSPPIPGTSCASPLGEDPSTQSFPTTQTSTTLEEFRQRWSCEFGEEMDFHEFSNLTTQFASDGLNLAREIASQQRPRPAARRPDRPSARPPIDRRRPTASDPSSARRLQHLYRVSKKRAARKVFGDDSPGFDGTLDEATRYFTQSFGPRDCDTDQLLEELISFVPSVDTDDTLFDPPTPEELSQKLRSFANSAAGKDSLEYRHLRLLDPKCHILAKMYRHCFAQRDVPPEWKTATTILIHKKDSTSDASNFRPIALMSCLYKLLMSILAKRMTNFSIAKDLLSAEQKSARPSEGCYEHAFLLESIVNDARRQPRPIFLAWLDIRNAFGSVPHSALITTLTHMGFPQSLINMIGNVYTGASTEVLTPIGKTTSIPIHSGVKQGCPLSAILFNLALELILRKCKATAETLTCGSLKHHGISISVLAYADDLVIMARSADALQKLLDSVSTAANVLGLEFRPDKSASLSVNKKNPRVELIDYLVQGQIIPPLDREEHYRYLGVPIGLVHDITQIGTLVDELVEKLDRIEKSLLAPWQKLDAVRTFVQPCLTYALRSTDPTTKSLEAYRAQLLRTVRSVCSLPTRATTHYIFGAKQAGGLGFTDPCQENHLQTVVQAVKMLASSDTTVASIAKLELRQTVRFAAQSDPTPNLVSCFLSNSSDRRLETIRSRTGSLWTRTRRATKHMNITINVPDIGPPTITTPEYADPVQAKDVCCFLHNVTRDAEAKKLCELRDQGKVARSLNTDRFANGSSWHFTGLNIRFKDWRFIHKARLNCLPTNSVKSRWSDSDATCRHCEQPETLPHVLCHCPPNMPAITERHNKVVERLVKAVRHGDISTDRTVQDSHSPVRPDIVIETEDRVTIIDVCCPFENGAEALEEAAARKELKYEHLKSHFESQGKQCDVFGFAIGALGSWFPDNERVLTALGMSPRYKNLFRKLCCTDVIQGSNDIYRQHLGCDDVLP

SEQ ID NO: 745 - protein, 1320 aa, Dendronephthya gigantea
MASMDPKDNPSASKPTKKCKLGCGTCANTFASLRNQRIHIESFNHIVPLDQDPVTVSFELHLRHQNLKCPLCKHHSKHVMTERGFLTHFKRQHPEYALEMVYHCAVCDLSLSAAEKQGHLDKHRHDQQPLTPVQSPPVNRPRSPASPPSSTRSSPSDANTSSSVESTPSQPSLTIDLSQPSPDSDHPMTQIDSTPNLLSPSQEDSQSIISRFLEACKPSPEPSSEPTAADQLSLLEDTSLLNSPQLCDLPTNRPIATPSPAIPALMANIITTPDAGLPTTRQPCQPQQRPRAVDFFTGSKPNPQPPRKSTPAPNTPPPSLQDLPPDEEPQTAPPRPQHLPTVHNPRAPIQHDAIGSPTEMCPPPHPTETHCPSPLGEDPSSENFPSPHTSTSLHDFRQHWSNEFSQEMDFTAFSHLTEKFASDGLNLAREISSQHRPRPAPRRPDRPSARPPIDRRRPSSSDPSAARRLQHLYRVSKKRAARTIFGNTSPGFDGTLEEAINYFTTCFGPKDCNLDQLAEQLNAFVPSADIDDSLFSPPSPDELSQRLKSMANSAPGKDRIEYRHLRLLDPKCEVLAKIYGHCFSHRDVPPDWKTATTILIHKKDTTKDPSNFRPIALMSCLYKLLMAILARRMTNFSIRNNLLSAEQKSARPSEGCYEHAFLLDSIVNDARRQPRPLYLAWLDIRNAFGSIPHSALLTTLTHMGFPKPLVDMIGNVYTNATTEILTPLGKTPPIPIHSGVKQGCPLSAILFNLALELILRKCSSKALSTRRGPLKHHGIALSVLAYADDIVIMARSPETLQELLHAVSSAANVLGLQFRPDKCASLSLAKRNPRIEDHAFLVQNNTIPSLKREEHYRYLGVPIGLLHDITQIETLVDELTDKLLRIEQSHLAPWQKLDAIRTFVEPCLTYALRSTDPTTKSLEGYRAQLLRTVRSICSLPTRATTHYIFGAKQAGGLGFTDPCHENHLQTIVQAVKMLASADPTVAAIAKSELRQTVRFSTQANPTPALVSAFLSNTQDRRLDTLRYRTGSLWTRARRATKHVNVSIDVPDQGPPTVSNPDYAEPVEAKDACRFLHNVARSNSAKKLCELRDQGKVARALSTDSHANGSSWQFTGLNMRFKDWRFIHKARLNCLPTNAVKSGWSDTNPTCRHCEQPETLPHIICHCPLNMPAITTRHDKIVERLTKAIRSGEVTTDRTVEHSNSPVRPDIVIQHPERVTIIDVCCPFENGEEALDEAAARKELKYDHLKSHFESLGKQCDVYGFVVGALGAWFPGNERVLNALNMSRRYKNLFRKLCCTDVIQGSTDIYRQHLGCDDVPT

SEQ ID NO: 746 - protein, 1023 aa, Dendronephthya gigantea
MANISTSQSPHYPSTRQPSPLNHRPRGMDYFEPTQPTIEDLPITDEPQTPPPRPSSLPTTQPPVIPPPVNPPPDPSPLIEDPTTASFPSTNTTTSLHDFRNRFSLEFDQELAFDDFEQLTRQFTSEAVDLARNISSQQRRRPTQRRPDRPSARPPIDRRRPLPGDPTAAKRLQHLYRISKKRAARQVFGDESPGFDGTLDEATAFFTQTFGPRNCNIAKLREELAAFVPTADTDESLFTPPSPEELATKLRSMANSAPGKDRLEYRHLRLLDPKCEILAKMFRHCFLAKDVPQAWKTATTILIHKKESTSDPSNFRPIALMSCLYKLLMAILAKRMTSFAISNNLLSPQQKSARPSEGCYEHAFLLESIVNDARRQPRPLCLAWLDIRNAFGSIPHSALLTTLTHMGFPSDLVSMIQNAYTGATTEVVTPLGKTAPIHIHSGVKQGCPLSAILFNLAVELILRKCVAKASSLPRGPLKHNGCPISILAYADDIVILARNKETLQILLDTVTSAADSLSLEFRPDKCASLSLAKTTPRVQSNTFRVHGTQIPALQREDHYRYLGVPIGLIPNIADLHTLVDKLTSKLEKIELSLLSPWQKLDAIRTFIQPCLTYVLRSTDPPTKALQAYRSQLTKTVKAICSLPNRASPHYIFASKQAGGLALVDPIRENHIQTIVQATRMLASDDPTVAAVAKRELRQTVRFASQSDPTPALISCFLSNTPDRRLETIRSRTGSLWTRTRQATKSIPITIHVPDVGPPTITAPDYPDHIQAKDVCRFLHNLDRDHAAHNLQDLRDQGKVSRTLTTDKFANGSNWLYTGLNIRFKDWRFIHRARLNCLPTNSIKSRWSDCSKTCRHCDADETLPHVLCHCPTNMVAITTRHNRIVDRLTNAVRSGSISTDKTVQDSGSSVRPDIVIDSNNHVTIIDVCCPFENGQEALEEAVSRKELKYDHLKTFFESQGKTCDVFGFAVGALGAWHPGNERVLSALKMTPRYKNLFRKLCCSDVIQGSTDIYRQHLGCDDVLP

SEQ ID NO: 747 - protein, 1324 aa, Trachythela sp.
MAIPSGYVPPLTRDYPSGCRLSCGMCDKTFNSLRMQYNHISRKRHMLPGPQDVHVLFYLNLRQQTIKCPVCPFRSKNVKTARGFTQHFKKDHSGYTLDLAYHCSVCEESYSEDEVQPHLDQHRERRMPLTPVLPVPVPSSPTLPSTPQLPSTPIVRTPSPAASELSYRSSRNSTLPDDPPSSPPSMTIDLSQPIPDSANPMSPNAPSQELLSPTAVDHFLMRSFLDACVEDPPSTSQPTTQTSPQTPPSIPHLNPNTLPLLGDVSFTAINNSPAVNNLLPSSIHPPTQPISTPSPAIPPLMSNIISTPNRTLPSTRQPSPPTLPRPRASDFFEDNPQLPSQQPILEDIFEPLQTHTSPPRPNSLNTSPPIPGTSCASPLGEDPSTQSFPTTQTSTTLEEFRQRWSCEFGEEMDFNEFSNLTTQFASDGLNLAREIASQQRPRPAARRPDRPSARPPIDRRRPTASDPSSARRLQHLYRVSKKRAARKVFGDDSPGFDGTLDEATRYFTQSFGPRDCDTDQLLEELISFVPSVDTDDTLFDPPTPEELSQKLRSFANSAPGKDRLEYRHLRLLDPKCHILAKMYRHCFAQRDVPPEWKTATTILIHKKDSTSDASNFRPIALMSCLYKLLMSILAKRMTNFAIAKDLLSAEQKSARPSEGCYEHAFLLESILNDARRQPRPIFLAWLDIRNAFGSVPHSALITTLTHMGFPQSLISMIGNVYSGASTEVLTPIGKTPSIPIHSGVKQGCPLSAILFNLALELILRKCKATAETLTRGSLKHHGISISVLAYADDLVIMARSADALQKLLDSVSTAANVLGLDFRPDKSASLSLNKKNPRVELINYLVQGQTIPPLEREEHYRYLGVPIGLVHNIQQIGTLVDELAEKLTRIEQSLLAPWQKLDAIRTFVQPCLTYAFRSTDPTTKSLEAYRAQLIRTVRSVCSLPTRATTHYIFGAKQAGGLGFTDPCQENHLQTVVQAVKMLASSDPTVASIAKLELRQTVRFAAQSDPTPNLVSSFLSNSSDRRLETIRSRTGSLWTRTRRATKQMNITINVPDIGPPTVTTPEYVDPVQAKDVCRFLHNITRDAEAKKLCELRDQGKVARALNTDRFANGSSWHFTGLNIRFKDWRFIHKARLNCLPTNSVKSRWSDSDPTCRHCEQPETLPHVLCHCPPNMPAITERHNKVVERLVKAVRHGDISTDRTVQDSHSPVRPDIVIETEDRVTIIDVCCPFENGAEALEEAAARKELKYEHLKSHFESQGKQCDVFGFAIGALGAWFPDNERVLNALGMSPRYKNLFRKLCCTDVIQGSNDIYRQHLGCDDVLP

SEQ ID NO: 748 - protein, 1254 aa, Esox niger
MDSKLYHFQADQTGLPNLAPTAGLSGRRAVKRAGPSATLLPGGAEANNYGSMRWSNAADKADKSKRSLDGEYDILQELTVCKRPCLPTAQGSQCVGSSGATPPDSTESALGPPQPAVSEGGVESGGRAGGPIARGSEAVLLVPIPVLDLSCGLCGEELGAVGVAVKHFAAYHSAVPVLYHCRTCDKTDPNPHPISCHVPKCRPKVGVRVDGGFSCNHCGRSFGKAVGLSQHVRHVHPALYCQARSGTRAGKRLSLPRGGRAEGGSGRQTLIRSWLVTSDQEGQNMARQVGTILQDLGPARATSDSPEVSSRASLAEALSIPVQPSPPQSGVAEVLRGLLVGGATEDGFEIGGVTLSLGRVEQDGSLLDLAALELLRVVGGSGGGACRRIPGGERQAPNPGDGRSLSRRAKFRRAQRRYAKDRSRLASILFDGSDDGGPRKPPRDIARAFEERWSGPDAFRGLGQFHSDGSADSGPFRALITAAEVSENLRAIKSGTATGPDGVSRAALLAWDPSGERLSKLFSIWLASGSVPGVLKVCRTTLIPKSADPEVCGHVSGWRPLTIGSVLLRLYSRILNKRLSAACPISPRQRGFISSSGCSENLMILQGLISDARGRDRGLAVVFIDFARAFDSVSHTHILGALRGRGLDDHVVGLIEDSYKSVTTKVAVVGGDSPMIDMRVGVKQGDPMSPLLFNLALDPVIATLERIGLGYTLSEGMRVCTLAFADDLVLVSESWVGMARNINILETFCCLTGLRVQPKKCHGFFTQKREGALKVNQCSPWKLAGEELHMVGPGESVRYLGVSVGPWRGIEKPSLTGRLQAWLVSLGRSGLRPSQRVTMLRFYALPRLVYEADHGGLGQGALRVLDRIVRGAVKGWLHLPACTCDGLLYSRNKDGGLGLAKLAHLIPSIQVRRVYGLWHSDDKVTKEVTRRAMTPKRFRDLWLRAGGCLATLPGLEGVGVGPAGALAAPAVQASDMGWVPPPATICGGVEGTAIPAGPQATRSLTVPNWRQSEFQRWVDLDVQGRGIQSFYGDSRSNHWLAEPERYGFRQRYYIASLQLRANVYPTRESLSRGRSNTLLTCRHCEAETESCAHILGQCPVVKDSRIKRHHKLCGLLAEEAESAGWEVIKEMVCHTPAGARRRPDLVMLKDGYALVVDVTVRYEAAGDTLRVAEREKVARYSPVKRGVLRATRARRVRVFGFPLGARGKWHERNDRLLQDLGLGPRRRTEVAKLLSRRALLYSLDVLRDFFRIEG

SEQ ID NO: 749 - protein, 1019 aa, Nymphon striatum
MSDKQQTKCCTCTVKGNCVKCMCKKRNANCTNCIPGFRGCCKNKPNMNLLSHNDDAIDSTAGRKKCQLCNMELVSQRALTMHNRSHHTSQVFQDIRECSSASNTQHSSFPSVTDQHVQRLRKEFLPNFTTLEILAKKNGSIEGHESEFDDLYNSFIKSLQALQPEFFKKKGKKERRSKPRDDASQKCRKEKYDRRKAQFYFFNDQKKLLRQVENYDGSSADRDHTIFPAEEMHTYFSELLSQGKTCTAKSEYLPLPIPEDELSALKLEFENFEKINPTISSEVVIPILRRSTNRTSPGIDGIRPSTFKKFDPSAEIIAKIISIAYLSSYLPLSWRVANVSLFNKPGKDPTKLENRRPIAIFTFLRRLFSKVIVSLVKPFVSDLIHPSQRGFQAGRGCVENIYKLRQLIELAKTHNKTCVLVSFDARNAFNGVSRAHRTQSLKSLPLPDQLKSALLNIFNNSNIKVSHNSQTTKTIEVKDGVPQGEPASPLAFNLCIDFILRHLHDAFKGKGIQISDQEECIALGFADDLVISAASVPDAIEMSHRLVYLLNQIGLELNISKCKIFAINISGAPEVLSSELPITFLGHTDALKYLGSEILLEDRPSYRNIRDIISKRCESLIKYPYLHNWQKLIFCRTFITSLLTYPAQTDFNMQISTSPQITQAIRAINLLLESIFNLKGVHHCFIYGPKNGGLGFPNAKWVLDTNSAVTAGYIAQSADPQINHLTSANSVNLNGLLQQLASNLTNSIQPKPVDASEIEDKIVNICTDDHKMKGKRITESLQGASYSAWSETRSGKIAGSKVFQISRHSSAFVRFPERFSNAELLAAIRLRGGVPNLRCLSHVAKKHGTELCRLCKTSKESIGHIMGGCPQLGGLITDRHDTILKLIFAELVLKNPNWDFVLEPRPAANVVHHKPDILAQHSQSGTVTLIDLTIRNEHSFEAMNEAKQDKITKYEPLRSFYAVKNFSVLPVWFGARGAVDPQTSSVFKNTFNISDNFIDDLSIKIFKKSLHLYFKVLHS

SEQ ID NO: 750 - protein, 904 aa, Nymphon striatum
MSKDFAKNFYQILPHLKYLLKKMAPSKAMRVNLMTCIIHLLKASRPFNRNFLKRKAKKNGDQNQGMTPVRNVVRKNTTGEKLNSIFSMTRKKLLRQVENYDGSSADRDHTIFPAEEMHTYFSELLSQGKTCTAKSEYLPLPIPEDELSALKLEFENFEKINPTISSEVVIPILRRSTNRTSPGIDGIRPSTFKKFDPSAEIIAKIISIAYLSSYLPLSWRVANVSLFNKPGKDPTKLENRRPIAIFTFLRRLFSKVIVSLVKPFVSDLIHPSQRGFQAGRGCVENIYKLRQLIELAKTHNKTCVLVSFDARNAFNGVSRAHRTQSLKSLPLPDQLKSALLNIFNNSNIKVSHNSQTTKTIEVKDGVPQGEPASPLAFNLCIDFILRHLHDAFKGKGIQISDQEECIALGFADDLVISAASVSDAIEMSHRLVYLLNQIGLELNISKCKIFAINISGAPEVLSSELPITFLGHTDALKYLGSEILLEDRPSYRNIRDIISKRCESLIKYPYLHNWQKLIFCRTFITSLLTYPAQTDFNMQISTSPQITQAIRAINLLLESIFNLKGVHHCFIYGPKNGGLGFPNAKWVLDTNSAVTAGYIAQSADPQINHLTSANSVNLNGLLQQLASKLTNSIQPKPVDASEIEDKIVNICTDDHKMKGKRITESLQGASYSAWSETRSGKIAGSKVFQISRHSSAFVRFPERFSNAELLAAIRLRGGVPNLRCLSHVAKKHGTELCRLCKTSKESIGHIMGGCPQLGGLITDRHDTILKLIFAELVLKNPNWDFVLEPRPAANVVHHKPDILAQHSQSGTVTLIDLTIRNEHSFEAMNEAKQDKITKYEPLRSFYAVKNFSVLPVWFGARGAVDPETSSVFKNTFNISDNFIDDLSIKIFKKSLHLYFKVLHS

SEQ ID NO: 751 - protein, 1019 aa, Nymphon striatum
MSDKQQTKCCTCTVKGNCVKCMCKKRNANCTNCIPGFRGCCKNKPNMNLLSHNDDAIDSTAGRKKCQLCNMELVSQRALTMHNRSHHTSQVFQDIRECSSASNTQHSSFPSVTDQHVQRLRKEFLPNFTTLEILAKKNGSIEGHESEFDDLYNSFIKSLQALQPEFFKKKGKKERRSKPRDDASQKCRKEKYDRRKAQFYFFNDQKKLLRQVENYDGSSADRDHTIFPAEEMHTYFSELLSQGKTCTAKSEYLPLPIPEDELSALKLEFENFEKINPTISSEVVIPILRRSTNRTSPGIDGIRPSTFKKFDPSAEIIAKIISIAYLSSYLPLSWRVANVSLFNKPGKDPTKLENRRPIAIFTFLRRLFSKVIVSLVKPFVSDLIHPSQRGFQAGRGCVENIYKLRQLIELAKTHNKTCVLVSFDARNAFNGVSRAHRTQSLKSLPLPDQLKSALLNIFNNSNIKVSHNSQTTKTIEVKDGVPQGEPASPLAFNLCIDFILRHLHDAFKGKGIQISDQEECIALGFADDLVISAASVPDAIEMSHRLVYLLNQIGLELTISQCKIFAINISGAPEVLSSELPITFLGHTDALKYLGSEILLEDRPSYRNIRDIISKRCESLIKYPYLHNWQKLIFCRTFITSLLTYPAQTDFNMQISTSPQITQAIRAINLLLESIFNLKGVHHCFIYGPKNGGLGFPNAKWVLDTNSAVTAGYIAQSADPQINHLTSANSVNLNGLLQQLASNLTNSIQPKPVDASEIEDKIVNICTDDHKMKGKRITESLQGASYSAWSETRSGKIAGSKVFQISRHSSAFVRFPERFSNAELLAAIRLRGGVPNLRCLSHVAKKHGTELCRLCKTSKESIGHIMGGCPQLGGLITDRHDTILKLIFAELVLKNPNWDFVLEPRPAANVVHHKPDILAQHSQSGTVTLIDLTIRNEHSFEAMNEAKQDKITKYEPLRSFYAVKNFSVLPVWFGARGAVDPETSSVFKNTFNISDNFIDDLSIKIFKKSLHLYFKVLHS

SEQ ID NO: 752 - protein, 973 aa, Nymphon striatum
MNLLSHNDDAIDSTAGRKKCQLCNMELVSQRALTMHNRSHHTSQVFQDIRECSSASNTQHSSFPSVTDQHVQRLRKEFLPNFTTLEILAKKNGSIEGHESEFDDLYNSFIKSLQALQPEFFKKKGKKERRSKPRDDASQKCRKEKYDRRKAQFYFFNDQKKLLRQVENYDGSSADRDHTIFPAEEMHTYFSELLSQGKTCTAKSEYLPLPIPEDELSALKLEFENFEKINPTISSEVVIPILRRSTNRTSPGIDGIRPSTIKKFDPSAEIIAKIISIAYLSSYLPLSWRVANVSLFNKPGKDPTKLENRRPIAIFTFLRRLFSKVIVSLVKPFVSDLIHPSQRGFQAGRGCVENIYKLRQLIELAKTHNKTCVLVSFDARNAFNGVSRAHRTQSLKSLPLPDQLKSALLNIFNNSNIKVSHNSQTTKTIEVKDGVPQGEPASPLAFNLCIDFILRHLHDAFKGKGIQISDQEECIALGFADDLVISAASVPDAIEMSHRLVYLLNQIGLELNISKCKIFAINISGAPEVLSSELPITFLGHTDALKYLGSEILLEDRPSYRNIRDIISKRCESLIKYPYLHNWQKLIFCRTFITSLLTYPAQTDFNMQISTSPQITQAVRAINLLLESIFNLKGVHHCFIYGPKNGGLGFPNAKWVLDTNSAVTAGYIAQSADPQINHLTSANSVNLNGLLQQLASNLTNSIQPKPVDASEIEDKIVNICTDDHKMKGKRITESLQGASYSAWSETRSGKIAGSKVFQISRHSSAFVRFPERFSNAELLAAIRLCGGVPNLRCLSHVAKKHGTELCRLCKTSKESIGHIMGGCPQLGGLITDRHDTILKLIFAELVLKNPNWDFVLEPRPAANVVHHKPDILAQHSQSGTVTLIDLTIRNEHSFEAMNEAKQDKITKYEPLRSFYAVKNFSVLPVWFGARGAVDPQTSSVFKNTFNISDNFIDDLSIKIFKKSLHLYFKVLHS

SEQ ID NO: 753 - protein, 1206 aa, Hesperophylax magnus
MTTMSFATNVDEQGIIMSSVQMNMDSLRPQKTKAGIPRQRMKWTNDVNMFIVRSYFYVTKVETDMLLYRKKLHLLFSQNYPIAQVSEQRLADQKRAIFKNNLISVVTLEQIKREVADRLQRGNNLEQINTSNNVISDALNVDSLDNILVEMSNDITVDSNNLDVIYNLREINIANLNFVDENVVELANLLHNNINRYIDVEPTVRPKLPKLHTSKKLSKLIFELNNIILPKIIFDEISFLDLHTIVYASAITVCNKLGIKLSSSDDRSYSYSKPEWQIRLENDVVFLRSNIARVIEYKNGNRSRKILRHVDEIGRKFGYNIDSHNNENIINDLLDLLKQKLGVKASRLKRYNYTYNKKNNNRLFQKNEKIFYSKLDDKQNIISNNNIPLPSESDMRDFWTKIWSKDIKHNDSTPWIENEELNFSGIEQMSFSNISVELLTKIIKNTHNWKATGCDWIHNFWYKRLTTLHPLLAKNLSKFVSQPQNFPNFLTKGITYMLPKSENINNPSQYRPITCLPTIYKILTSCLTDLIYIHLDEKNILSEQQKGCRRKHMGCKEQLVIDSVILKQIQTRKRNLHTCYIDYQKAFDSVPHSWLIKVLNIYKINPIIISFLENIMSFWNTNLLINLKGKKIVIPGISIKRGIFQGDSLSPLWFCLALNPLSKMLIKSKFGIKVKGNTRESSTISHLLYMDDIKLFSNSEQNLEKMIEVVKNFSDDIKMTFGLDKCRTIHIEKGKIVDGDESIFRNFQITSMKRDEVYKYLGYPQSNRLDHTSIKNDIRIKFQTRIRKILKCNLSAKNLVKAINTWAIPLLTYSFGIIKWSNTDLDNLERLIRTTLTKFNCHHPNSAIERVNLPRNLGGRGIVKINSLKNNQVEMLRTFFHRKAHSSEMHKIICKADRNITPLNLYDENANIFINPNQELLDSWSNKILHAKHFNYLNQTYVDKFSSNKWLSIGELSAEIEGFMLAIQDRVINTKNYRKHIIKDTNQIDDLCRKCLAFPETIEHIISGCSILAPSEYTFRHNQVLKIIHQNLVIKHNLIDCRNIVPYYEYEPNSFLENEFYKIYYDKTILTDRTISHNRPDIVLHDKIKKITYIIDVAIPNSCNIQKSVNEKIRKYTDLGNEIKRIWHSQTIKILPFVISATGIIPSSLIKNLGVLDLSKNLYIKMQKSVILNTCRITKDFLNIYVEGSVGFIGPVRSSTEPNPLI

SEQ ID NO: 754 - protein, 812 aa, Hesperophylax magnus
MRDFWTKIWSKDIKHNESTPWIENEELNFSGIEQMSFSNISVELLSKIIKNTHNWKATGCDWIHNFWYKRLTTLHPLLAKNLSKFVSQPQNFPNFLTKGITYMLPKSENINNPSQYRPITCLPTIYKILTSCLTDLIYTHLDEKNILSEQQKGCRRKHMGCKEQLVIDSVILKQIQTRKRNLHTCYIDYQKAFDSVPHSWLIKVLNIYKINPIIISFLENIMSFWNTNLLINLKGKKIVIPGISIKRGIFQGDSLSPLWFCLALNPLSKMLIKSKFGIKVKGNTRESSTISHLLFMDDIKLFSNSEQNLEKMIEVVKNFSDDIKMTFGLDKCRTIHIEKGKIVDGDESIFRNFQITSMKRDEVYKYLGYPQSNRLDHTSIKNDIRIKFQTRIRKILKCNLSAKNLVKAINTWAIPLLTYSFGIIKWSNTDLDNLERLVRTTLTKFNCHHPNSAIERVNLPRNLGGRGIVKITSLKHNQVEMLRTFFHRKAHSSEMHKIICKADRNITPLNLYDENANIFINPNQELLDSWSNKILHAKHFNYLNQTYVDKFSSNKWLSIGELSAEIEGFMLAIQDRVINTKNYRKHIIKDTNQIDDLCRKCLAFPETIEHIISGCSILAPSEYTFRHNQVLKIIHQNLVIKHNLIDCRNIVPYYEYEPNSFLENEFYKIYYDKTILTDRTISHNRPDIVLHDKIKKITYIIDVAIPNSCNIQKSVNEKIRKYTDLGNEIKRIWHSQTIKILPFVISATGIIPSSLIKNLGVLDLSKNLYIKMQKSVILNTCRITKDFLNIYVEGSVGFIGPVRSSTEPNPLI

SEQ ID NO: 755 - protein, 812 aa, Hesperophylax magnus
MRDFWTKIWSKDIKHNESTPWIENEELNFSGIEQMSFSNISVELLTKIIKNTHNWKATGCDWIHNFWYKRLTILHPLLAKHLSKFVSQPQNFPNFLTKGITYMLPKSENINNPSQYRPITCLPTIHKILTSCLTDLIYTHLDEKNILSEQQKGCRRKHMGCKEQLVIDSVILKQIQTRKRNLHTCYIDYQKAFDSVPHSWLIKVLNIYKINPIIISFLENIMSFWNTNLLINLKGKKIVIPGISIKRGIFQGDSLSPLWFCLALNPLSKMLIKSKFGIKVKGNTRESSTISHLLFMDDIKLFSNSEQNLEKMIEVVKNFSDDIKMTFGLDKCRTIHIEKGKIVDGDESIFRNFQITSMKRDEVYKYLGYPQSNRLDHTSIKNDIRIKFQTRIRKILKCNLSAKNLVKAINTWAIPLLTYSFGIIKWSNTDLDNLERLIRTTLTKFNCHHPNSAIERVNLPRNLGGRGIVKITSLKHNQVEMPRTFFHSKAHSSEMHKIICRADRNITPLNLYDENANIFINPNQELLDYWSNKILHAKHFNYLNQTYVDKFSSNKWLSIGELSAEIEGFMLAIQDRVINTKNYRKHIIKDTNQIDDLCRKCLAFPETIEHIISGCSILAPSEYTFRHNQVLKIIHQNLVIKHNLIDCRNIVPYYEYEPNSFLENEFYKIYYDKTILTDRTISHNRPDIVLHDKIKKITYIIDVAIPNSCNIQKSVNEKIRKYTDLGNEIKRIWHSQTIKILPFVISATGIIPSSLIKNLGVLDLSKNLYIKMQKSVILNTCRITKDFLNIYVEGSVGFIGPVRSSTEPNPLI

SEQ ID NO: 756 - protein, 1206 aa, Hesperophylax magnus
MTTMSFATNVDEQGIIMSSVQMNMDSLRPQKTKAGIPRQRMKWTNDVNMFIVRSYFYVTKVETDMLLYRKKLHLLFSQNYPIAQVSEQRLADQKRAIFKNNLISVVTLEQIKREVADRLQRGNNLEQINTSNNVISDALNVDSLDNILVEMSNDITVDSNNLDVIYNLREINIANLNFVDENVVELANLLHNNINRYIDVEPTVRPKLPKLHTSKKLSKLIFELNNIILPKIIFDEISFLDLHTIVYASAITICNKLGIKLSSSDDRSYSYSKPEWQIRLENDVVFLRSNIARVIEYKNGNRSRKILRHVDEIGRKFGYNIDSHNNENIINDLLDLLKQKLGVKASRLKRYNYTYNKKNNNRLFQKNEKIFYSKLDDKQNIISNNNIPLPSESDMRDFRTKIWSKDIKHNDSTPWIENEELKFSGIEQMSFSNISVELLTKIIKNTHNWKATGCDWIHNFWYKRLTTLHPLLAKNLSKFVSQPQNFPNFLTKGITYMLPKSENINNPSQYRPITCLPTIYKILTSCLTDLIYTHLDEKNILSEQQKGCRRKHMGCKEQLVIDSVILKQIQTRKRNLHTCYIDYQKAFDSVPHSWLIKVLNIYKINPIIISFLENIMSFWNTNLLINLKGKKIVIPGISIKRGIFQGDSLSPLWFCLALNPLSKMLIKSKFGIKVKGNTRESSTISHLLYMDDIKLFSNSEQNLEKMIEVVKNFSDDIKMTFGLDKCRTIHIEKGKIVDGDESIFRNFQITSMKRDEVYKYLGYPQSNRLDHTSIKNDIRIKFQTRIRKILKCNLSAKNLVKAINTWAIPLLTYSFGIIKWSNTDLDNLERLIRTTLTKFNCHHPNSAIERVNLPRNLGGRGIVKITSLKHNQVEMLRTFFHRKAHSSEMHKIICKADRNITPLNLYDENANIFINPNQELLDSWSNKILHAKHFNYLNQTYVDKFSSNKWLSIGELSAEIEGFMLAIQDRVINTKNYRKHIIKDTNQIDDLCRKCLAFPETIEHIISGCSILAPSEYTFRHNQVLKIIHQNLVIKHNLIDCRNIVPYYEYEPNSFLENEFYKIYYDKTILTDRTISHNRPDIVLHDKIKKITYIIDVAIPNSCNIQKSVNEKIRKYTDLGNEIKRIWHSQTIKILPFVISATGIIPSSLIKNLDVLDLSKNLYIKMQKSVILNTCRITKDFLNIYVEGSVGFIGPVRSSTEPNPLI

SEQ ID NO: 757 - protein, 1206 aa, Hesperophylax magnus
MTTMSFATNVDEQGIIMSSVQMNMDSLRPQKTKAGIPRQRMKWTNDVNMFIVRSYFYVTKVETDMLLYRKKLHLLFSQNYPIAQVSEQRLADQKRAIFKNNLISVVTLEQIKREVADRLQRENNLEQINTSNNVISDALNVDSLDNILVEMSNDITVDSNNLDVIYNLREINIANLNFVDENVVELANLLHNNINRYIDVEPTIRPKLPKLHTSKKLSKLIFELNNIILPKIIFDEISFLDLHTIVYASAITVCNKLGIKLSSSDDRSYSYSKPEWQIRLENDVVFLRSNIARVIEYNNGNRSRKILRHVDEIGRKFGYNIDSHNNENIINDLLDLLKQKLGVKASRLKRYNYTYNKKNNNRLFQKNEKIFYSKLDDKQNIISNNNIPLPSESDMRDFWTKIWSKDIKHNDSTPWIENEELNFSGIEQMSFSNISVELLTKIIKNTHNWKATGCDWIHNFWYKRLTTLHPLLAKNLSKFVSQPQNFPNFLTKGITYMLPKSENINNPSQYRPITCLPTIYKILTSCLTDLIYTHLDEKNILSEQQKGCRRKHMGCKEQLVIDSVILKQIQTRKRNLHTCYIDYQKAFDSVPHSWLIKVLNIYKINPIIISFLENIMSFWNTNLLINLKGKKIVIPGISIKRGIFQGDSLSPLWFCLALNPLSKMLIKSKFGIKVKGNTRESSTISHLLYMDDIKLFSNSEQNLEKMIEVVKNFSDDIKMTFGLDKCRTIHIEKGKIVDGDESIFRNFQITSMKRDEVYKYLGYPQSNRLDHTSIKNDIRIKFQTRIRKILKCNLSAKNLVKAINTWAIPLLTYSFGIIKWSNTDLDNLERLIRTTLTKFNCHHPNSAIERVNLPRNLGGRGIVKITSLKHNQVEMLRTFFHRKAHSSEMHKIICKADRNITPLNLYDENANIFINPNQELLDSWSNKILHAKHFNYLNQTYVDKFSSNKWLSIGELSAEIEGFMLAIQDRVINTKNYRKHIIKDTNQIDDLCRKCLAFPETIEHIISGCSILAPSEYTFRHNQVLKIIHQNLVIKHNLIDCRNIVPYYEYEPNSFLENEFYKIYYDKTILTDRTISHNRPDIVLHDKIKKITYIIDVAIPNSCNIQKSVNEKIRKYTDLGNEIKRIWHSQTIKILPFVISATGIIPSSLIKNLGVLDLSKNLYIKMQKSVILNTCRITKDFLNIYVEGSVGFIGPVRSSTEPNPLI

SEQ ID NO: 758 - protein, 812 aa, Hesperophylax magnus
MRDFWTKIWSKDIKHNESTPWIENEELNFSGIEQMSFSNISVELLSKIIKNTHNWKATGCDWIHNFWYKRLTTLHPLLAKNLSKFVSQPQNFPNFLTKGITYMLPKCENINNPSQYRPITCLPTIYKILTSCLTDLIYTHLDEKNILSEQQKGCRRKHMGCKEQLVIDSVILKQIQTRKRNLHTCYIDYQKAFDSVPHSWLIKVLNIYKINPIIISFLENIMSFWNTNLLINLKGKKIVIPGISIKRGIFQGDSLSPLWFCLALNPLSKMLIKSKFGIKVKGNTRESSTISHLLFMDDIKLFSNSEQNLEKMIEVVKNFSDDIKMTFGLDKCRTIHIEKGKIVDGDESIFRNFQITSMKRDEVYKYLGYPQSNRLDHTSIKNDIRIKFQTRIRKILKCNLSAKNLVKAINTWAIPLLTYSFGIIKWSNTDLDNLERLVRTTLTKFNCHHPNSAIERVNLPRNLGGRGIVKITSLKHNQVEMLRTFFHRKAHSSEMHKIICKADRNITPLNLYDENANIFINPNQELLDSWSNKILHAKHFNYLNQTYVDKFSSNKWLSIGELSAEIEGFMLAIQDRVINTKNYRKHIIKDTNQIDDLCRKCLAFPETIEHIISGCSILAPSEYTFRHNQVLKIIHQNLVIKHNLIDCRNIVPYYEYEPNSFLENEFYKIYYDKTILTDRTISHNRPDIVLHDKIKKITYIIDVAIPNSCNIQKSVNEKIRKYTDLGNEIKRIWHSQTIKILPFVISATGIIPSSLIKNLGVLDLSKNLYIKMQKSVILNTCRITKDFLNIYVEGSVGFIGPVRSSTEPNPLI

SEQ ID NO: 759 - protein, 1124 aa, Hesperophylax magnus
MTTMSFATNVDEQGIIMSSVQMNMDSLRPQKTKAGIPRQRMKWTNDVNMFIVRSYFYVTKVETDMLLYRKKLHLLFSQNYPIAQVSEQRLADQKRAIFKNNLISVVTLEQIKREVADRLQRGNNLEQINTSNNVISDALNVDSLDNILVEMSNDITVDSNNLDVIYNLREINIANLNFVDENVVELANLLHNNINRYIDVEPTVRPKLPKLHTSKKLSKLIFELNNIILPKIIFDEISFLDLHTIVYASAITVCNKLGIKLSSSDDRSYSYSKPEWQIRLENDVVFLRSNIARVIEYKNGNRSRKILRHVDEIGRKFGYNIDSHNNENIINDLLDLLKQKLGVKASRLKRYNYTYNKKNNNRLFQKNEKIFYSKLDDKQNIISNNNIPLPSESDMRDFWTKIWSKDIKHNDSTAWIENEELNFSGIEQMSFSNISVELLTKIIKNTHNWKATGCDWIHNFWYKRLTTLHPLLAKNLSKFVSQPQNFPNFLTKGITCMLPKSENINNPSQYRPITCLPTIYKILTSCLTDLIYTHLDEKNILSEQQKGCRRKHMGCKEQLVIDSVILKQIQTRKRNLHTCYIDYQKAFDSVPHSWLIKVLNIYKINPIIISFLENIMSFWNTNLLINLKGKKIVIPGISIKRGIFQGDSLSPLWFCLALNPLSKMLIKSKFGIKVKGNTRESSTISHLLYMDDIKLFSNSEQNLEKMIEVVKNFSDDIKMTFGLDKCRTIHIEKGKIVDGDESIFRNFQITSMKRDEVYKYLGYPQSNRLDHTSIKNDIRIKFQTRIRKILKCNLSAKNLVKAINTWAIPLLTYSFGIIKWSNTDLDNLERLIRTTLTKFNCHHPNSAIERVNLPRNLGGRGIVKITSLKHNQVEMLRTFFHRKAHSSEMHKIICKADRNITPLNLYDENANIFINPNQELLDSWSNKILHAKHFNYLNQTYVDKFSSNKWLSIGELSAEIEGFMLAIQDRVINTKNYRKHIIKDTNQIDDLCRKCLAFPETIEHIISGCSILAPSEYTFRHNQVLKIIHQNLVIKHNLIDCRNIVPYYVYEPNSFLENEFYKIYYDKTILTDRTISHNRPDIVLHDKIKKITYIIDVAIPNSCNIQKSVNEKIRKYTDLGNLRL

SEQ ID NO: 760 - protein, 812 aa, Hesperophylax magnus
MRDFWTKIWSKDIKHNESTPWIENEELNFSGIEQMSFSNISVELLTKIIKNTHNWKATGCDWIHNFWYKRLTTLHPLLAKNLSKFVSQPQNFRNILTKGITYMLPKSENIYNPSQYRPITCLPTIYKILTSCLTDLIYTHLDEKSILSEQQKGCRRKHMGCKEQFVIDSVILKQIQTRKRNLHTCYIDYQKAFDSVPHSWLIKVLNIYKINPIIISFLENIMSFWNTNLLINLKGKKIVIPGISIKRGIFQGDSLSPLWFCLALNPLSKMLIKSKFGIKAKGNTRESSTISHLLFMDDIKLFSNSEQNLEKMIEVVKNFSDDIKMTFGLDKCRTIHIEKGKIVDGDESIFRNFQINSMKRDEVYKYLGYPQSNRLDHTSIKNDIRIKFQTRIRKILKCNLSAKNLVKAINTWAIPLLTYSFGIIKWSNTDLDNLERLIRTTLTKFNCHHPNSAIERVNLPRNLGGRGIVKITSLKHNQVEMLRTFFHRKAHSSEMHKIICKADRNITPLNLYDENANIFINPNQELLDSWSNKILHAKHFNYLNQTYVDKFSSNKWLSIGELSAEIEGFMLAIQDRVINTKNYRKHIIKDTNQIDDLCRKCLAFPETIEHIISGCSILAPSEYTFRHNQVLKIIHQNLVTKHNLIDCRNIVPYYEYEPNSFLENEFYKIYYDKTILTDRTISHNRPDIVLHDKIKKITYIIDVAIPNSCNIQKSVNEKIRKYTDLGNEIKRIWHSQTIKILPFVISATGIIPSSLIKNLGVLDLSKKLYIKMQKSVILNTCRITKDFLNIYVEGSVGFIGPVRSSTEPNPLI

SEQ ID NO: 761 - protein, 812 aa, Hesperophylax magnus
MRDFWTKIWSKDIKHNDSTPWIENEELNFSGIEQMSFSNISVELLTKIIKNTHNWKATGCDWIHNFWYKRLTTLHPLLAKNLSKFVSQPQNFPNFLTKGITYMLPKSENINNPSQYRPITCLPTIYKILTSCLTDLIYTHLDEKNILSEQQKGCRRKHMGCKEQLVIDSVILKQIQTRKRNLHTCYIDYQKAFDSVPHSWLIKVLNIYKINPIIISFLENIMSFWNTNLLINLKGKKIVIPGISIKRGIFQGDSLSPLWFCLALNPLSKMLIKSKFGIKVKGNTRESSTISHLLYMDDIKLFSNSEQNLEKMIEVVKNFSDDIKMTFGLDKCRTIHIEKGKIVDGDESIFRNFQITSMKRDEVYKYLGYPQSNRLDHTSIKNDIRIKFQTRIRKILKCNLSAKNLVKAINTWAIPLLTYSFGIIKWSNTDLDNLERLIRTTLTKFNCHHPNSAIERVNLPRNLGGRGIVKINSLKNNQVEMLRTFFHRKAHSSEMHKIICKADRNITPLNLYDENANIFINPNQELLDSWSNKILHAKHFNYLNQTYVDKFSSNKWLSIGELSAEIEGFMLAIQDRVINTKNYRKHIIKDTNQIDDLCRKCLAFPETIEHIISGCSILAPSEYTFRHNQVLKIIHQNLVIKHNLIDCRNIVPYYEYEPNSFLENEFYKIYYDKTILTDRTISHNRPDIVLHDKIKKITYIIDVAIPNSCNIQKSVNEKIRKYTDLGNEIKRIWHSQTIKILPFVISATGIIPSSLIKNLGVLDLSKNLYIKMQKSVILNTCRITKDFLNIYVEGSVGFIGPVRSSTEPNPLI

SEQ ID NO: 762 - protein, 1206 aa, Hesperophylax magnus
MTTMSFATNVDEQGIIMSSVQMNMDSLRPQKTKAGIPRQRMKWTNDVNMFIVRSYFYVTKVETDMLLYRKKLHLLFSQNYPIAQVSEQRLADQKRAIFKNNLISVVTLEQIKREVADRLQRGNNLEQINTSNNVISDALNVDSLDNILVEMSNDITVDSNNLAVIYNLREINIANLNFVDENVVELANLLHNNINRYIDVEPTVRPKLPKLHTSKKLSKLIFELNNIILPKIIFDEISFLDLHTIVYASAITVCNKLGIKLSSSDDRSYSYSKPEWQIRLENDVVFLRSNIARVIEYKNGNRSRKILRHVDEIGRKFGYNIDSYNNENIINDLLDLLKQKLGVKASRLKRYNYTYNKKNNNRLFQKNEKIFYSKLDDKQNIISNNNIPLPSESDMRDFWTKIWSKDIKHNESTPWIENEELNFSGIEQMSFSNISVELLSKIIKNTHNWKATGCDWIHNFWYKRLTTLHPLLAKNLSKFVSQPQNFPNFLTKGITYMLPKSENINNPSQYRPITCLPTIYKILTSCLTDLIYTHLDEKNILSEQQKGCRRKHMGCKEQLVIDSVILKQIQTRKRNLHTCYIDYQKAFDSVPHSWLIKVLNIYKINPIIISFLENIMSFWNTNLLINLKGKKIVIPGISIKRGIFQGDSLSPLWFCLALNPLSKMLIRSKFGIKVKGNTRESSTISHLLFMDDIKLFSNSEQNLEKMIEVVKNFSDDIKMTFGLDKCRTIHIEKGKIVDGDESIFRNFQITSMKRDEVYKYLGYPQSNRLDHTSIKNDIRIKFQTRIRKILKCNLSAKNLVKAINTWAIPLLTYSFGIIKWSNTDLDNLERLVRTTLTKFNCHHPNSAIERVNLPRNLGGRGIVKITSLKHNQVEMLRTFFHRKAHSSEMHKIICKADRNITPLNLYDENANIFINPNQELLDSWSNKILHAKHFNYLNQTYVDKFSSNKWLSIGELSAEIEGFMLAIQDRVINTKNYRKHIIKDTNQIDDLCRKCLAFPETIEHIISGCSILAPSEYTFRHNQVLKIIHQNLVIKHNLIDCRNIVPYYEYEPNSFLENEFYKIYYDKTILTDRTISHNRPDIVLHDKIKKITYIIDVAIPNSCNIQKSVNEKIRKYTDLGNEIKRIWHSQTIKILPFVISATGIIPSSLIKNLGVLDLSKNLYIKMQKSVILNTCRITKDFLNIYVEGSVGFIGPVRSSTEPNPLI

SEQ ID NO: 763 - protein, 1164 aa, Hesperophylax magnus
MDERCQYVHCSFIFLCNQSRNRYVVIQEKLHLLFSQNYPIAQVSEQRLADQKRAIFKNNLISVVTLEQIKREVADRLQRGNNLEQINTSNNVISDALNVDSLDNILVEMSNDITVDSNNLAVIYNLREINIANLNFVDENVVELANLLHNNINRYIDMEPTVRPKLPKLHTSKKLSKLIFELNNIILPKIIFDEISFLDLHTIVYASAITVCNKLGIKLSSSDDRSYSYSKPEWQIRLENDVVFLRSNIARVIEYKNGNRSRKILRHVDEIGRKFGYNIDSHNNENIINDLLDLLKQKLGVKASRLKRYNYTYNKKNNNRLFQKNEKIFYSKLDDKQNIISNNNIPLPSESDMRDFWTKIWSKDIKHNESTPWIENEELNFSGIEQMSFSNISVELLSKIIKNTHNWKATGCDWIHNFWYKRLTTLHPLLAKNLSKFVSQPQNFPNFLTKGITYMLPKSENINNPSQYRPITCLPTIYKILTSCLTDLIYTHLDEKNILSEQQKGCRRKHMGCKEQLVIDSVILKQIQTRKRNLHTCYIDYQKAFDSVPHSWLIKVLNIYKINPIIISFLENIMSFWNTNLLINLKGKKIVIPGISIKRGIFQGDSLSPLWFCLALNPLSKMLIRSKFGIKVKGNTRESSTISHLLFMDDIKLFSNSEQNLEKMIEVVKNFSDDIKMTFGLDKCRTIHIEKGKIVDGDESIFRNFQITSMKRDEVYKYLGYPQSNRLDHTSIKNDIRIKFQTRIRKILKCNLSAKNLVKAINTWAIPLLTYSFGIIKWSNTDLDNLERLVRTTLTKFNCHHPNSAIERVNLPRNLGGRGIVKITSLKHNQVEMLRTFFHRKAHSSEMHKIICKADRNITPLNLYDENANIFINPNQELLDSWSNKILHAKHFNYLNQTYVDKFSSNKWLSIGELSAEIEGFMLAIQDRVINTKNYRKHIIKDTNQIDDLCRKCLAFPETIEHIISGCSILAPSEYTFRHNQVLKIIHQNLVIKHNLIDCRNIVPYYEYEPNSFLENEFYKIYYDKTILTDRTISHNRPDIVLHDKIKKITYIIDVAIPNSCNIQKSVNEKIRKYTDLGNEIKRIWHSQTIKILPFVISATGIIPSSLIKNLGVLDLSKNLYIKMQKLVILNTCRITKDFLNIYVEGSVGFIGPVRSSTEPNPLI

SEQ ID NO: 764 - protein, 1122 aa, Hesperophylax magnus
MKWTNDVNMFIVRSYFYVTKLETDMLLYRKKLHSLFSQNYPIAQVNEQRLADQKRAIFKNNLIPVVTLEQIKREVADRLQMGNNLEQINTSNVISDTLNVDSLDNILVEMSNDITVDSNNLDVIYNLREINIANLNFIDDNVIELANLLHNNINRYIDVEPTVRPKLPKLHTSKKLSKLIFELNNIILPKIIFDEISFLDLHTIVYATAVTVCNKLGIKLSSSDDRSYSYSKPEWQIRLENDVVFLRSNIARVIEYKNWNRSRKILRHVDEIRRKFGYNIDSHNNENIINDLLDLLKQKLGVKASRLKRYNYTYNKKNNNRLFHKNEKIFYSKLDDKQNIISNNNIPLPSESDMRDFWTKIWSKDIKHNESSPWIENEELNFSGIEQMSFSNISVELLTEIIKNTHNWKATGCDWIHNFWYKRLTTLHPLLAKNLSKFVSQPQNFPNFLTKGITYMLPKSENINNPSQYRPITCLPTIYKILTSCLTDLIYTHLDEKNILSEQQKGCRRKHMGCKEQLVIDSVILKQIQTRKRNLHTCYIDYQKAFDSVPHSWLIKVLNIYKINPIIISFLENIMSFWNTNLLINLKGKKIVIPGISIKRGIFQGDSLSPLWFCLALNPLSKMLIKSKFGIKVKGNTRESSTISHLLYMDDIKLFSNSEQNLEKMIEVVKNFSDDIKMTFGLDKCRTIHIEKGKIVDGDESIFRNFQITSMKRDEVYKYLGYPQSNRLDHTSIKNDIRIKIQTRIRKILKCNLSAKNLVKAINTWAIPLLTYSFGIIKWSNTDLDNLERLIRTTLTKFNCHHPNSAIERVNLPRNLGGRGIVKITSLKHNQVEMLRTFFHRKAHSSEMHKIICKADINITPLNLYDENANIFINPNQELLDSWSNKILHAKHFNYLNQTYVDKISSNKWLSIGELSAEIEGFMLAIQDRVINTKKYRKHIIKDTNQIDDLCRKCLAFPETIEHIISGCSILAPSEYTFRHNQVLKIIHQNLVIKHNLIDCRNIVPYYEYEPNSFLENEFYKIYYDKTILTDRAISHNRPDIVLHDKIKKITYIIDVAIPNSCNIQKTVNEKIRKYTDLGNEIKRIWHSQTIKILPFVISATGIIPSSLIKNLGVLDLQKNYI

SEQ ID NO: 765 - protein, 1112 aa, Hesperophylax magnus
MTTMSFATNVDEQGIIMSSVQMNMDSLRPQKTKAGIPRQRMKWTNDVNMFIVRSYFYVTKVETDMLLYRKKLHLLFSQNYPIAQVSEQRLADQKRAIFKNNLISVVTLEQIKREVADRLQRGNNLEQINTSNNVISDALNVDSLDNILVEMSNDITVDSNNLAVIYNLREINIANLNFVDENVVELANLLHNNINRYIDVEPTVRPKLPKLHTSKKLSKLIFELNNIILPKIIFDEISFLDLHTIVYASAITVCNKLGIKLSSSDDRSYSYSKPEWQIRLENDVVFLRSNIARVIEYKNGNRSRKILRHVDEIGRKFGYNFDSHNNENIINDLLDLLKQKLGVKASRLKRYNYTYNKKNNNRLFQKNEKIFYSKLDDKQNIISNNNIPLPSESDMRDFWTKIWSKDIKHNESTPWIENEELNFSGIEQMSFSNISVELLTKIIKNTHNWKATGCDWIHNFWYKRLTTLHPLLAKNLSKFVSQPQNFPNFLTKGITYMLPKSENINNPSQYRPITCLPTIYKILTSCLTDLIYTHLDEKNILSEQQKGCRRKHMGCKEQLVIDSVILKQIQTRKRNLHTCYIDYQKAFDSVPHSWLIKVLNIYKINPIIISFLENIMSFWNTNLLINLKGKKIVIPGISIKRGIFQGDSLSPLWFCLALNPLSKMLIRSKFGIKVKGNTRESSTISHLLFMDDIKLFSNSEQNLEKMIEVVKNFSDDIKMTFGLDKCRTIHIEKGKIVDGDESIFRNFQITSMKRDEVYKYLGYPQSNRLDHTSIKNDIRIKFQTRIRKILKCNLSAKNLVKAINTWAIPILTYSFGIIKWSNTDLDNLERLVRTTLTKFNCHHPNSAIERVNLPRNLGGRGIVKITSLKHNQVEMLRTFFHRKAHSSEMHKIICKADRNITPLNLYDENANIFINPNQELLDSWSNKILHAKHFNYLNQTYVDKFSSNKWLSIGELSAEIEGFMLAIQDRVINTKNYRKHIIKDTNQIDDLCRKCLAFPETIEHIISGCSILAPSEYTFRHNQVLKIIHQNLVIKHNLIDCRNIVPYYEYEPNSFLENEFYKIYYDKTILTDRTISHNRPDIVLHDKIKKITYIIDVAIPNSCNIQKSVNEK

SEQ ID NO: 766 - protein, 1206 aa, Hesperophylax magnus
MTTMSFATNVDEQGIIMSSVQMNMDSLRPQKTKAGIPRQRMKWTNDVNMFIVRSYFYVTKVETDMLLYRKKLHLLFSQNYPIAQVSEQRLADQKRAIFKNDLISVMTLEQIKREVADRLQRGNNLEQINTSNNVISDALNVDSLDNILVEISNDITVDSNNLDVIYNLREINIANLNFVDENVVELANLLHNNINRYIDIEPTVRPKLPKLHTSKKLSKLIFELNNIILPKIIFDEISFLDLHTIVYASAITVCNKLGIKLSSSDDRSYSYSKPEWQIRLENDVVFLRSNIARVIEYKNGNRSRKILRHVDEIGRKFGYNIDSHNNENIINDLLDLLKQKLGVKASRLKRYNYTYNKKNNNRLFQKNEKIFYSKLDDKQNIISNNNIPLPSESDMRDFWTKIWSKDIKHNDSTPWIENEELNFSGIEQMSFSNISVELLTKIIKNTHNWKATGCDWIHNFWYKRLTTLHPLLAKNLSKFVSQPQNFPNFLTKGITYMLPKSENINNPSQYRPITCLPTIYKILTSCLTDLIYTHLDEKNILSEQQKGCRRKHMGCKEQLVIDSVILKQIQTRKRNLHTCYIDYQKAFDSVPHSWLIKVLNIYKINPIIISFLENIMSFWNTNLLINLKGKKIVIPGISIKRGIFQGDSLSPLWFCLALNPLSKMLIKSKFGIKVKGNTRESSTISHLLYMDDIKLFSNSEQNLEKMIEVVKNFSDDIKMTFGLDKCRTIHIEKGKIVDGDESIFRNFQITSMKRDEVYKYLGYPQSNRLDHTSIKNDIRIKFQTRIRKILKCNLSAKNLVKAINTWAIPLLTYSFGIIKWSNTDLDNLERLIRTTLTKFNCHHPNSAIERVNLPRNLGGRGIVKITSLKHNQVEMLRTFFHRKAHSSEMHKIICKADRNITPLNLYDENANIFINPNQELLDSWSNKILHAKHFNYLNQTYVDKFSSNKWLSIGELSAEIEGFMLAIQDRVINTKNYRKHIIKDTNQIDDLCRKCLAFPETIEHIISGCSILAPSEYTFRHNQVLKIIHQNLVIKHNLIDCRNIVPYYEYEPNSFLENEFYKIYYDKTILTDRTISHNRPDIVLHDKIKKITYIIDVAIPNSCNIQKSVNEKIRKYTDLGNEIKRIWHSQTIKILPFVISATGIIPSSLIKNLGVLDLSKNLYIKMQKSVILNTCRITKDFLNIYVEGSVGFICPVRSSTEPNPLI

SEQ ID NO: 767 - protein, 1100 aa, Hesperophylax magnus
MSSVQMNMDSIRPQKTKAGIPRQRMKWTNDVNMFIVRSYFYVTKVETDILLYRKKLHLLFSQNYPIAQVSEQRLADKKRAIFKNNLISVVTLEQIKREVADRLQRGNNLEQINTSNNVISDALNVDSLDNILVEMSNDITVDSNNLDVIYNLREINIANLNFVYENVVELANLLHNNINRYIDVEPTVRPKLPKLHTSKKLSKLIFELNNIILPKIIFDEISFLDLHTIVYDSAITVCNKLGIKLSSSDDRSYSYSKPEWQIRLENDVVFLRSNIARVIEYKNGNRSRKILRHVDEIGRKFGYNIDSHNNENIINDLLDLLKQKLGVKASRLKRYNYTYNKKNNNRLFQKNEKIFYSKLDDKQNIISNNNIPLPSESDMRDFWTKIWSKDIKHNESTPWIKNEELNFSGIEQMSFSNISVELLTKIIKNTHNWKATGCDWIHNFWYKRLTTLHPLLAKNLSKFVSQPQNFPNFLTKGITYMLPKSENINNPSQYRPITCLPTIYKILTSCLTDLIYTHLDEKNILSEQQKGCRRKHMGCKEQVVIDSVILKQIQTRKRNLHTCYIDYQKAFDSVPHSWLIKVLNIYKINPIIISFLENIMSFWNTNLLINLKGKKIVIPGISIKRGIFQGDSLSPLWFCLALNPLSKMLIKSKFGIKVKGNTRESSTISHLLFMDDIKLFSNSEQNLEKMIEVVKNFSDDIKMTFGLDKCRTIHIEKGKIVDGDESIFRNFQITSMKRDEVYKYLGYPQSNRLDHTSIKNDIRIKFQTRIRKILKCNLSAKNLVKAINTWAIPLLTYSFGIIKWSNTDLDNLERLIRTTLTKFNCHHPNSAIERVNLPRNLGGRGIVKITSLKHNQVEMLRTFFHRKAHSSKMHKIICKADRNITPLNLYDENANIFINPNQELLDSWSNKILHAKHFNYLNQTYVDKFSSNKWLSIGELSAEIEGFMLAIQDRVINTKNYRKHIIKDTNQIDDLCRKCLAFPETIEHIISGCSILAPSEYTFRHNQVLKIIHQNLVIKHNLIDCRNIVPYYEYEPNSFLENEFYKIYYDKTILTDRTISHNRPDIVLHDKNLKKITYIIDVAIPNSCNIKKSVNEKIRK

SEQ ID NO: 768 - protein, 1206 aa, Hesperophylax magnus
MTTMSFATNVDEQGIIMSSVQMNMDSLRPQKTKAGIPRQRMKWTNDVNMFIVRSYFYVTKVETDMLLYRKKLHLLFSQNYPIAQVSEQRLADQKRAIFKNNLISVVTLEQIKREVADRLQRGNNLEQINTSNNVISDALNVDSLDNILVEMSNDITVDSNNLDVIYNLREIDIANLNFVDENVVELANLLHNNINRYIDVEPTVRPKLPKLHTSKKLSKLIFELNNIILPKIIFDEISFLDLHTIVYASAITVCNKLGIKLSSSDDRSYSYSKPEWQIRLENDVVFLRSNIARVIEYKNGNRSRKILRHVDEIGRKFGYNIDSHNNENIINDLLDLLKQKLGVKASRLKRYNYTYNKKNNNRLFQKNEKIFYSKLDDKQNIISNNNIPLPSESDMRDFWTKIWSKDIKHNDSTPWIENEELNFSGIEQMSFSNISVELLTKIIKNTHNWKATGCDWIHNFWYKRLTTLHPLLAKNLSKFVSQPQNFPNFLTKGITYMLPKSENINNPSQYRPITCLPTIYKILTSCLTDLIYTHLDEKNILSEQQKGCRRKHMGCKEQLVIDSVILKQIQTRKRNLHTCYIDYQKAFDSVPHSWLIKVLNIYKINPIIISFLENIMSFWNTNLLINLKGKKIVIPGISIKRGIFQGDSLSPLWFCLALNPLSKMLIKSKFGIKVKGNTRESSTISHLLYMDDIKLFSNSEQNLEKMIEVVKNFSDDIKMTFGLDKCRTIHIEKGKIVDGDESIFRNFQITSMKRDEVYKYLGYPQSNRLDHTSIKNDIRIKFQTRIRKILKCNLSAKNLVKAINTWAIPLLTYSFGIIKWSNTDLDNLERLIRTTLTKFNCHHPNSAIERVNLPRNLGGRGIVKINSLKNNQVEMLRTFFHRKAHSSEMHKIICKADRNITPLNLYDENANIFINPNQELLDSWSNKILHAKHFNYLNQTYVDKFSSNKWLSIGELSAEIEGFMLAIQDRVINTKNYRKHIIKDTNQIDDLCRKCLAFPETIEHIISGCSILAPSEYTFRHNQVLKIIHQNLVIKHNLIDCRNIVPYYEYEPNSFLENEFYKIYYDKTILTDRTISHNRPDIVLHDKIKKITYIIDVAIPNSCNIQKSVNEKIRKYTDLGNEIKRIWHSQTIKILPFVISATGIIPSSLIKNLGVLDLSKNLYIQMQKSVILNTCRITKDFLNIYVEGSVGFIGPVRSSTEPNPLI

SEQ ID NO: 769 - protein, 811 aa, Limnephilus lunatus
MRDFWTNIWSKDIKHNESGPWIENEELNCSDIEQMSFSDISVELLAKIIKNTHNWKATGCDWIHNFWYKRLTTLHPLLAKNLSKFVREPQNFPNFLTKGITYMLPKSEHINNPSQYRPITCLPTIYKILTSCLTDLIYTHLDEKNVLSEQQKGCRRKHMGCKEQLVIDSVILKQIQTQKRNLHICYIDYQKAYDSVPHSWLIKVLNIYKINPIIISFLEKIMAFWNTDLLLNLKDKKIIVPGISIKRGIFQGDSLSPLWFCLALNPLSKMLIKSKFGIKIKGNTRERNIISHLLFMDDLKLYSNSEPNLEKMIKVVKNFSDDIKMTFGLDKCRTIHIEKGKIVDGDEGIFRNFKIESMKGGEVYKYLGYPQSNRLDHTSIKNDIRIKFKTRIRKILKCNLSAKNLVKAINTWAIPLLTYSFGIIKWSNTDLDSLERLIRTTLTKFHCHHPNSAIERINLPRNLGGRGIVKITSLKHNQVEMLRNFFHRKADSSEMHKIICKADRNISPLNLYDENASILINTNQELLDSWSNKILHAKHFNYLNQTYVDKFSSNKWLSIGELSAEIEGFMLAIQDRVINTKNYRKHIIKDANQIDDLCRKCLAFPETIEHIISGCSVLAPSEYTFRHNQVLKIIHQSLVIKHNLIDCRNVPYYEYEPNSFLENEFYKIYYDKTILTDRTISHNRPDIVLHDKIKKITYIIDVAIPNSCNIQKTVSEKIRKYTDLGNEIKRIWHSQTIKILPFVISATGIIPSSLIQNLGVLDLSKNLYIKMQKSVILNTCRITKDFLNIYIEGSVGFIGPVRISSEPNPLI

SEQ ID NO: 770 - protein, 1206 aa, Hesperophylax magnus
MTTMSFATNVDEQGIIMSSVQMNMDSLRPQKTKAGIPRQRMKWTNDVNMFIVRSYFYVTKVETDMLLYRKKLHLLFSQNYPIAQVSEQRLADQKRAIFKNNLISVVTLEQIKREVADRLQRGNNLEQINTSNNVISDALNVDSLDNILVEMSNDITVDSNNLDVIYNLREINIANLNFVDENVVELANLLQNNINRYIDVEPTVRPKLPKLHTSKKLSKLIFELNNIILPKIIFDEISFLDLHTIVYASAITVCNKLGIKLSSSDDRSYSYSKPEWQIRLENDVVFLRSNIARVIEYKNGNRSRKILRHVDEIGRKFGYNIDSHNNENIINDLLDLLKQKLGVKASRLKRYNYTYNKKNNNRLFQKNEKIFYSKLDDKQNIISNNNIPLPSESDMRDFWTKIWSKDIKHNDSTPWIENEELNFSGTEQMSFSNISVELLTKIIKNTHNWKATGCDWIHNFWYKRLTTLHPLLAKNLSKFVSQPQNFPNFLTKGITYMLPKSENINNPSQYRPITCLPTIYKILTSCLTDLIYTHLDEKNILSEQQKGCRRKHMGCKEQLVIDSVILKQIQTRKRNLHTCYIDYQKAFDSVPHSWLIKVLNIYKINPIIISFLENIMSFWNTNLLINLKGKKIVIPGISIKRGIFQGDSLSPLWFCLALNPLSKMLIKSKFGIKVKGNTRESSTISHLLYMDDIKLFSNSEQNLEKMIEVVKNFSDDIKMTFGLDKCRTIHIEKGKIVDGDESIFRNFQITSMKRDEVYKYLGYPQSNRLDHTSIKNDIRIKFQTRIRKILKCNLSAKNLVKAINTWAIPLLTYSFGIIKWSNTDLDNLERLIRTTLTKFNCHHPNSAIERVNLPRNLGGRGIVKITSLKHNQVEMLRTFFHRKAHSSEMHKIICKADRNITPLNLYDENANIFINPNQELLDSWSNKILHAKHFNYLNQTYVDKFSSNKWLSIGELSAEIEGFMLAIQDRVINTKNYRKHIIKDTNQIDDLCRKCLAFPETIEHIISGCSILAPSEYTFRHNQVLKIIHQNLVIKHNLIDCRNIVPYYEYEPNSFLENEFYKIYYDKTILTDRTISHNRPDIVLHDKIKKITYIIDVAIPNSCNIQKSVNEKIRKYTDLGNEIKRIWHSQTIKILPFVISATGIIPSSLIKNLGVLDLSKNLYIKMQKSVILNTCRITKDFLNIYVEGSVGFIGPVRSSTEPNPLI

SEQ ID NO: 771 - protein, 812 aa, Hesperophylax magnus
MRDFWTKIWSKDIKHNDSTPWIENEELNFSGIEQMSFSNISVELLTKIIKNTHNWKATGCDWIHNFWYKRLTTLHPLLAKNLSKFVSQPQNFPNFLTKGITYTLPKSENINNPSQYRPITCLPTIYKILTSCLTDLIYTHLDEKNILSEQQKGCRRKHMGCKEQLVIDSVILKQIQTRKRNLHTCYIDYQKAFDSVPHSWLIKVLNIYKINPIIISFLENIMSFWNTNLLINLKGKKIVIPGISIKRGIFQGDSLSPLWFCLALNPLSKMLIKSKFGIKVKGNTRESSTISHLLYMDDIKLFSNSEQNLEKMIEVVKNFSDDIKMTFGLDKCRTIHIEKGKIVDGDESIFRNFQITSMKRDEVYKYLGYPQSNRLDHTSIKNDIRIKFQTRIRKILKCNLSAKNLVKAINTWAIPLLTYSFGIIKWSNTDLDNLERLIRTTLTKFNCHHPNSAIERVNLPRNLGGRGIVKINSLKNNQVEMLRTFFHRKAHSSEMHKIICKADRNITPLNLYDENANIFINPNQELLDSWSNKILHAKHFNYLNQTYVDKFSSNKWLSIGELSAEIEGFMLAIQDRVINTKNYRKHIIKDTNQIDDLCRKCLAFPETIEHIISGCSILAPSEYTFRHNQVLKIIHQNLVIKHNLIDCRNIVPYYEYEPNSFLENEFYKIYYDKTILTDRTISHNRPDIVLHDKIKKITYIIDVAIPNSCNIQKSVNEKIRKYTDLGNEIKRIWHSQTIKILPFVISATGIIPSSLIKNLGVLDLSKNLYIKMQKSVILNTCRITKDFLNIYVEGSVGFIGPVRSSTEPNPLI

SEQ ID NO: 772 - protein, 812 aa, Hesperophylax magnus
MRDFWTKIWSKDIKHNESTPWIENEELNFSGIEQMSFSNISVELLSKIIKNTHNWKATGCDWIHNFWYKRLTTLHPLLAKNLSKFVSQPQNFPNFLTKGITYMLPKSENINNPSQYRPITCLPTIYKILTSCLTDLIYTHLDEKNILSEQQKGCRRKHMGCKEQLVIDSVILKQIQTRKRNLHTCYIDYQKAFDSVPHSWLIKVLNIYKINPIIISFLENIMSFWNTNLLINLKGKKIVIPGISIKRGIFQGDSLSPLWFCLALNPLSKMLIRSKFGIKVKGNTRESSTISHLLFMDDIKLFSNSEQNLEKMIEVVKNFSDDIKMTFGLDKCRTIHIEKGKIVDGDESIFRNFQITSMKRDEVYKYLGYPQSNRLDHTSIKNDIRIKFQTRIRKILKCNLSAKNLVKAINTWAIPLLTYSFGIIKWSNTDLDNLERLVRTTLTKFNCHHPNSAIERVNLPRNLGGRGIVKITSLKHNQVEMLRTFFHRKAHSSEMHKIICKADRNITPLNLYDENANIFINPNQELLDSWSNKILHAKHFNYLNQTYVDKFSSNKWLSIGELSAEIEGFMLAIQDRVINTKNYRKHIIKDTNQIDDLCRKCLAFPETIEHIISGCSILAPSEYTFRHNQVLKIIHQNLVIKHNLIDCRNIVPYYEYEPNSFLENEFYKIYYDKTILTDRTISHNRPDIVLHDKIKKITYIIDVAIPNSCNIQKSVNEKIRKYTDLGNEIKRIWHSQTIKILPFVISATGIIPSSLIKNLGVLDLSKNLYIKMQKSVILNTCRITKDFLNIYVEGSVGFIGPVRSSTEPNPLV

SEQ ID NO: 773 - protein, 1202 aa, Limnephilus lunatus
MSFTTNRNEERSVMSSTQMNNDSLRPPKTKAGIPRQRMKWTNDVNMFIVRSYFYVTKLETDMLLYRKKLHLIFSQNYPIAQVNEQRLADQKRAIFKNNLIPVVTLDQIKKEVADRLQLENNLEQVNTSSNVISDTLNVDSSDNILVEESNDITVDSNNLDVIYNLREINIANLNLLDENIIELANLLHNNINRYIDIEPTVRPKLPKLHTSKKLSKLISELNNIILPKIIFDDISFLDLHTIVYASAITICNKLGVKLTSSDDRSYNYRKPEWQSRLENDVVFLRSSIARVIEYKNGNRSRNILRHVDVIGRKFGYSIGSNNNENIINDLLDLLKQKLGVKASRLKRYNYTYNKKNNNRLFQKNEKIFYSKLDDKQNIISNNNNPLPSESDMRDFWTNIWSKDIKHNESGPWIENEELNCSDIEQMSFSDISVELLAKIIKNTHNWKATGCDWIHNFWYKRLTTLHPLLAKNLSKFVREPQNFPNFLTKGITYMLPKSEHINNPSQYRPITCLPTIYKILTSCLTDLIYTHLDEKNVLSEQQKGCRRKHMGCKEQLVIDSVILKQIQTQKRNLHICYIDYQKAYDSVPHSWLIKVLNIYKINPIIISFLEKIMAFWNTDLLLNLKDKKIIVPGISIKRGIFQGDSLSPLWFCLALNPLSKMLIKSKFGIKIKGNTRERNIISHLLFMDDLKLYSNSEPNLEKMIKVVKNFSDDIKMTFGLDKCRTIHIEKGKIVDGDEGIFRNFKIESMKGGEVYKYLGYPQSNRLDHTSIKNDIRIKFKTRIRKILKCNLSAKNLVKAINTWAIPLLTYSFGIIKWSNTDLDSLERLIRTTLTKFHCHHPNSAIERINLPRNLGGRGIVKITSLKHNQVEMLRNFFHRKADSSEMHKIICKADRNISPLNLYDENASILINTNQELLDSWSNKILHAKHFNYLNQTYVDKFSSNKWLSIGELSAEIEGFMLAIQDRVINTKNYRKHIIKDANQIDDLCRKCLAFPETIEHIISGCSVLAPSEYTFRHNQVLKIIHQSLVIKHNLIDCRNVPYYEYEPNSFLENEFYKIYYDKTILTDRTISHNRPDIVLHDKIKKITYIIDVAIPNSCNIQKTVSEKIRKYTDLGNEIKRIWHSQTIKILPFVISATGIIPSSLIQNLGVLDLSKNLYIKMQKSVILNTCRITKDFLNIYIEGSVGFIGPVRISSEPNPLI

SEQ ID NO: 774 - protein, 1206 aa, Hesperophylax magnus
MTTMSFATNVDEQGIIMSSVQMNMDSLRPQKTKAGIPRQRMKWTNDVNMFIVRSYFYVTKVETDMLLYRKKLHLLFSQNYPIAQVSEQRLADQKRAIFKNNLISVVTLEQIKREVADRLQRVNNLEQINTSNNVISDALNVDSLDNILVEMSNDITVDSNNLDVIYNLREINIANLNFVDENVVELANLLHNNINRYIDVEPTVRPKLPKLHTSKKLSKLIFELNNIILPKIIFDEISFLDLHTIVYASAITVCNKLGIKLSSSDDRSYSYSKPEWQIRLENDVVFLRSNIARVIEYKNGNRSRKILRHIDEIGRKFGYNIDSHNNENIINDLLDLLKQKLGVKASRLKRYNYTYNKKNNNRLFQKNEKIFYSKLDDKQNIISNNNIPLPSESDMRDFWTKIWSKDIKHNDSTPWIENEELNFSGIEQMSFSNISVELLTKIIKNTHNWKATGCDWIHNFWYKRLTTLHPLLAKNLSKFVSQPQNFPNFLTKGITYMLPKSENINNPSQYRPITCLPTIYKILTSCLTDLIYTHLDEKNILSEQQKGCRRKHMGCKEQLVIDSVILKQIQTRKRNLHTCYIDYQKAFDSVPHSWLIKVLNIYKINPIIISFLENIMSFWNTNLLINLKGKKIVIPGISIKRGIFQGDSLSPLWFCLALNPLSKMLIKSKFGIKVKGNTRESSTISHLLYMDDIKLFSNSEQNLEKMIEVVKNFSDDIKMTFGLDKCRTIHIEKGKIVDGDESIFRNFQITSMKRDEVYKYLGYPQSNRLDHTSIKNDIRIKFQTRIRKILKCNLSAKNLVKAINTWAIPLLTYSFGIIKWSNTDLDNLERLIRTTLTKFNCHHPNSAIERVNLPRNLGGRGIVKINSLKNNQVEMLRTFFHRKAHSSEMHKIICKADRNITPLNLYDENANIFINPNQELLDSWSNKILHAKHFNYLNQTYVDKFSSNKWLSIGELSAEIEGFMLAIQDRVINTKNYRKHIIKDTNQIDDLCRKCLAFPETIEHIISGCSILAPSEYTFRHNQVLKIIHQNLVIKHNLIDCRNIVPYYEYEPNSFLENEFYKIYYDKTILTDRTISHNRPDIVLHDKIKKITYIIDVAIPNSCNIEKSVDEKIRKYTDLGNEIKRIWHSQTIKILPFVISATGIIPSSLIKNLGVLDLSKNLYIKMQKSVILNTCRITKDFLNIYVEGSVGFIGPVRSSTEPNPLI

SEQ ID NO: 775 - protein, 1206 aa, Hesperophylax magnus
MTTMSFATNVDEQGIIMSSVQMNMDSLRPQKTKAGIPRQRMKWTNDVNMFIVRSYFYVTKVETDMLLYRKKLHLLFSQNYPIAQVSEQRLADQKRAIFKNNLISVVTLEQIKREVADRLQRGNNLEQINTSNNVISDALNVDSLDNILVEMSNDITVDSNNLAVIYNLREINIANLNFVDENVVELANLLHNNINRYIDVEPTVGPKLPKLHTSKKLSKLIFELNNIILPKIIFDEISFLDLHTIVYASAITVCNKLGIKLSSSDDRSYSYSKPEWQIRLENDVVFLRSNIARVIEYKNGNRSRKILRHVDEIGRKFGYNIDSHNNENIINDLLDLLKQKLGVKASRLKRYNYTYNKKNNNRLFQKNEKIFYSKLDDKQNIISNKNIPLPSESDMRDFWTKIWSKDIKHNDSTPWIENEELNFSGIEQMSFSNISVELLTKIIKNTHNWKATGCDWIHNFWYKRLTTLHPLLAKNLSKFVSQPQNFPNFLTKGITYMLPKSENINNPSQYRPITCLPTIYKILTSCLTDLIYTHLDEKNILSEQQKGCRRKHMGCKEQLVIDSVILKQIQTRKRNLHTCYIDYQKAFDSVPHSWLIKVLNIYKINPIIISFLENIMSFWNTNLLINLKGKKIVIPGISIKRGIFQGDSLSPLWFCLALNPLSKMLIKSKFGIKVKGNTRESSTISHLLYMDDIKLFSNSEQNLEKMIEVVKNFSDDIKMTFGLDKCRTIHIEKGKIVDGDESIFRNFKITSMKRDEVYKYLGYPQSNRLDHTSIKNDIRIKFQTRIRKILKCNLSAKNLVKAINTWAIPLLTYSFGIIKWSNTDLDNLERLIRTTLTKFNCHHPNSAIERVNLPRNLGGRGIVKITSLKHNQVEMLRTFFHRKAHSSEMHKIICKADRNITPLNLYDENANIFINPNQELLDSWSNKILHAKHFNYLNQTYVDKFSSNKWLSIGELSAEIEGFMLAIQDRVINTKNYRKHIIKDTNQIDDLCRKCLAFPETIEHIISGCSILAPSEYTFRHNQVLKIIHQNLVIKHNLIDCRNIVPYYEYEPNSFLENEFYKIYYDKTILTDRTISHNRPDIVLHDKIKKITYIIDVAIPNSCNIQKSVNEKIRKYTDLGNEIKRIWHSQTIKILPLVISATGIIPSSLIKNLGVLDLSKNLYIKMQKSVILNTCRITKDFLNIYVEGSAGFIGPVRSSTEPNPLI

SEQ ID NO: 776 - protein, 812 aa, Hesperophylax magnus
MRDFWTKIWSKDIKHNESTPWIENEELNFSGIEQMSFSNISVELLSKIIKNTHNWKATGCDWIHNFWYKRLTTLHPLLAKNLSKFVSQPQNFPNFLTKGITYMLPKSENINNPSQYRPITCLPTIYKILTSCLTDLIYTHLDEKNILSEQQKGCRRKHMGCKEQLVIDSVILKQIQTRKRNLHTCYIDYQKAFDSVPHSWLIKVLNIYKINPIIISFLENIMSFWNTNLLINLKGKKIVIPGISIKRGIFQGDSLSPLWFCLALNPLSKMLIRSKFGIKVKGNTRESSTISHLLFMDDIKLFSNSEQNLEKMIEVVKNFSDDIKMTFGLDKCRTIHIEKGKIVDGDESIFRNFQITSMKRDEVYKYLGYPQSNRLDHTSIKNDIRIKFQTRIRKILKCNLSAKNLVKAINTWAIPLLTYSFGIIKWSNTDLDNLERLVRTTLTKFHCHHPNSAIERVNLPRNLGGRGIVKITSLKHNQVEMLRTFFHRKAHSSEMHKIICKADRNITPLNLYDENANIFINPNQELLDSWSNKILHAKHFNYLNQTYVDKFSSNKWLSIGELSAEIEGFMLAIQDRVINTKNYRKHIIKDTNQIDDLCRKCLAFPETIEHIISGCSILAPSEYTFRHNQVLKIIHQNLVIKHNLIDCRNIVPYYEYEPNSFLENKFYKIYYDKTILTDRTISHNRPDIVLHDKIKKITYIIDVAIPNSCNIQKSVNEKIRKYTDLGNEIKRIWHSQTIKILPFVISATGIIPSSLIKNLGVLDLSKNLYIKMQKSVILNTCRITKDFSNIYVEGSVGFIGPVSSSTEPNPLI

SEQ ID NO: 777 - protein, 1202 aa, Limnephilus lunatus
MSFTTNRNEERSVMSSTQMNNDNLRPPKTKAGIPRQRMKWTNDVNMFIVRSYFYVTKLETDMLLYRKKLHLIFSQNYPIAQVNEQRLADQKRAIFKNNLIPVVTLDQIKKEVADRLQLENNLEQVNTSSNVISDTLNVDSSDNILVEESNDITVDSNNLDVIYNLREINIANLNLLDENIIELANLLHNNINRYIDIEPTVRPKLPKLHTSKKLSKLISELNNIILPKIIFDDISFLDLHTIVYASAITICNKLGVKLTSSDDRSYNYRKPEWQSRLENDVVFLRSSIARVIEYKNGNRSRNILRHVDVIGRKFGYSIGSNNNENIINDLLDLLKQKLGVKASRLKRYNYTYNKKNNNRLFQKNEKIFYSKLDDKQNIISNNNNPLPSESDMRDFWTNIWSKDIKHNESGPWIENEELNCSDIEQMSFSDISVELLAKIIKNTHNWKATGCDWIHNFWYKRLTTLHPLLAKNLSKFVREPQNFPNFLTKGITYMLPKSEHINNPSQYRPITCLPTIYKILTSCLTDLIYTHLDEKNVLSEQQKGCRRKHMGCKEQLVIDSVILKQIQTQKRNLHICYIDYQKAYDSVPHSWLIKVLNIYKINPIIISFLEKIMAFWNTDLLLNLKDKKIIVPGISIKRGIFQGDSLSPLWFCLALNPLSKMLIKSKFGIKIKGNTRERNIISHLLFMDDLKLYSNSEPNLEKMIKVVKIFSDDIKMTFGLDKCRTIHIEKGKIVDGDEGIFRNFKIESMKGGEVYKYLGYPQSNRLDHTSIKNDIRIKFKTRIRKILKCNLSAKNLVKAINTWAIPLLTYSFGIIKWSNTDLDSLERLIRTTLTKFHCHHPNSAIERINLPRNLGGRGIVKITSLKHNQVEMLRNFFHRKADSSEMHKIICKADRNISPLNLYDENASILINTNQELLDSWSNKILHAKHFNYLNQTYVDKFSSNKWLSIGELSAEIEGFMLAIQDRVINTKNYRKHIIKDANQIDDLCRKCLAFPETIEHIISGCSVLAPSEYTFRHNQVLKIIHQSLVIKHNLIDCRNVPYYEYEPNSFLENEFYKIYYDKTILTDRTISHNRPDIVLHDKIKKITYIIDVAIPNSCNIQKTVSEKIRKYTDLGNEIKRIWHSQTIKILPFVISATGIIPSSLIQNLGVLDLSKNLYIKMQKSVILNTCRITKDFLNIYIEGSVGFIGPVRISSEPNPLI

SEQ ID NO: 778 - protein, 812 aa, Hesperophylax magnus
MRDFWTKIWSKDIKHNESTPWIENEELNFSGIEQMSFSNISVELLSKIIKNTHNWKATGCDWIHNFWYKRLTTLHPLLAKNLSKFVSQPQNFPNFLTKGITYMLPKSENINNPSQYRPITCLPTIYKILTSCLTDLIYTHLDEKNILSEQQKGCRRKHMGCKEQLVIDSVILKQIQTRKRNLHTCYIDYQKAFDSVPHSWLIKVLNIYKINPIIISFLENIMSFWNTNLLINLKGKKIVIPGISIKRGIFQGDSLSPLWFCLALNPLSKMLIRSKFGIKVKGNTRESSTISHLLFMDDIKLFSNSEQNLEKMIEVVKNFSDDIKMTFGLDKCRTIHIEKGKIVDGDESIFRNFQITSMKRDEVYKYLGYPQSNRLDHTSIKNDIRIKFQTRIRKILKCNLSAKNLVKAINTWAIPLLTYSFGIIKWSNTDLDNLERLVRTTLTKFNCHHPNSAIERVNLPRNLGGRGIVKITSLKHNQVEMLRTFFHRKAHSSEMHKIICKADRNITPLNLYDENANIFINPNQELLDSWSNKILHAKHFNYLNQTYVDKFSSNKWLSIGELSAEIEGFMLAIQDRVINTKNYRKHIIKDTNQNDDLCRKCLAFPETIEHIISGCTILAPSEYTFRHNQVLKIIHQNLVIKHNLIDCRNIVPYYEYEPNSFLENEFYKIYYDKTILTDRTISHNRPDIVLHDKIKKITYIIDVAIPNSCNIQKSVNEKIRKYTDLGNEIKRIWHSQTIKILPFVISATGIIPSSLIKNLGVLDLSKNLYIKMQKSVILNTCRITKDFLNIYVEGSVGFIGPVRSSTEPNPLI

SEQ ID NO: 779 - protein, 1206 aa, Hesperophylax magnus
MTTMSFATNVDEQGIIMSSVQMNMDSLRPQKTKAGIPRQRMKWTNDVNMFIVRSYFYVTKVETDMLLYRKKLHLLFSQNYPIAQVSEQRLADQKRAIFKNNLISVVTLEQIKREVADRLQRGNNLEQINTSNNVISDALNVDSLDNILVEMSNDITVDSNNLDVIYNLREINIANLNFVDENVVELANLLHNNINRYIDVEPTVRPKLPKLHTSKKLSKLIFELNNIILPKIIFDEISFLDLHTIVYASAITVCNKLGIKLSSSDDRSYSYSKPEWQIRLENDVVFLRSNIARVIEYKNGNRSRKILRHVDEIGRKFGYNIDSHNNENIINDLLDLLKQKLGVKASRLKRYNYTYNKKNNNRLFQKNEKIFYSKLDDKQNIISNNNIPLPSESDMRDFWTKIWSKDIKHNDSTPWIENEELNFSGIEQMSFSNISVELLTKIIKNTHNWKATGCDWIHNFWYKRLTTLHPLLAKNLSKFVSQPQNFPNFLTKGITYMLPKSENINNPSQYRPITCLPTIYKILTSCLTDLIYTHLDEKNILSEQQKGCRRKHMGCKEQLVIDSVILKQIQTRKRNLHTCYIDYQKAFDSVPHSWLIKVLNIYKINPIIISFLENIMSFWNTNLLINLKGKKIVIPGISIKRGIFQGDSLSPLWFCLALNPLSKMLIKSKFGIKVKGNTRESSTISHLLYMDDIKLFSNSEQNLEKMIEVVKNFSDDIKMTFGLDKCRTIHIEKGKIVDGDESIFRNFQITSMKRDEVYKYLGYPQSNRLDHTSIKNDIRIKFQTRIRKILKCNLSAKNLVKAINTWAIPLLTYSFGIIKWSNTDLDNLERLIRTTLTKFNCHHPNSAIERVNLPRNLGGRGIVKITSLKHNQVEMLRTFFHRKAHSSEMHKIICKADRNITPLNLYDENANIFINPNQELLDSWSNKILHAKHFNYLNQTYVDKFSSNKWLSIGELSAEIEGFMLAIQDRVINTKNYRKHIIKDTNQIDDLCRKCLAFPETIEHIISGCSILAPSEYTFRHNQVLKIIHQNLVIKHNLIDCRNIVPYYEYEPNSFLENEFYKIYYDKTILTDRTISHNRPDIVLHDKIKKITYIIDVAIPNSCNIKKYVNEKIRKYTDLGNEIKRIWHSQTIKILPFVISATGIIPSSLIKNLGVLDLSKNLYIKMQKSVILNTCRITKDFLNIYVEGSVGFIGPVRSSTEPNPLI

SEQ ID NO: 780 - protein, 982 aa, Hesperophylax magnus
MIILLFVNALLFLLFLDLHTIVYASAITVCNKLGIKLSSSNDRSYSYSKPEWQIRLENDVVFLRSNIARVIEYKNGNRSRKILRHVDEIGRKFGYNIDSHNNENIINDLLDLLKQKLGVKASRLKRYNYTYNKKHNNRLFQKNEKIFYSKLDDKQNIISNNNIPLPSESDMRDFWTKIWSKDIKHNDSTPWIENEELNFSGIEQMSFSNISVELLTKIIKNTHNWKATGCDWIHNFWYKRLTTLHPLLAKNLSKFVSQPQNFPNFLTKGITYMLPKSENINNPSQYRPITCLPTIYKILTSCLTDLIYTHLDEKNILSEQQKGCRRKHMGCKEQLVIDSVILKQIQTRKRNLHTCYIDYQKAFDSVPHSWLIKVLNIYKINPIIISFLENIMSFWNTNLLINLKGKKIVIPGISIKRGIFQGDSLSPLWFCLALNPLSKMLIKSKFGIKVKGNTRESSTISHLLYMDDIKLFSNSEQNLEKMIEVVKNFSDDIKMTFGLDKCRTIHIEKGKIVDGDESIFRNFQITSMKRDEVYKYLGYPQSNRLDHTSIKNDIRIKFQTRIRKILKCNLSAKNLVKAINTWAIPLLTYSFGIIKWSNTDLDNLERLIRTTLTKFNYHHPNSAIERVNLPRNLGGRGIVKITSLKHNQVEMLRTFFHRKAHSSEMHKIICKADRNITPLNLYDENANIFINPNQELLDSWSNKILHAKHFNYLNQTYVDKFSSNKWLSIGELSAEIEGFMLAIQDRVINTKNYRKHIIKDTNQIDDLCRKCLAFPETIEHIISGCSILAPSEYTFRHNQVLKIIHQNLVIKHNLIDCRNIVPYYEYEPNSFLENEFYKIYYDKTILTDRTISHNRPDIVLHDKIKKITYIIDVAIPNSCNIQKSVNEKIRKYTDLGNEIKRIWHSQTIKILPFVISATGIIPSSLIKNLGVLDLSKNLYIKMQKSVILNTCRITKDFLNIYVEGSVGFIGPVRSSTEPNPLI

SEQ ID NO: 781 - protein, 941 aa, Hesperophylax magnus
MLSIILCKPEWQIRLENDVVFLRSNIARVIEYKNGNRSRKILRHVDEIGRKFGYNIDSHNNENIINDLLDLLKQKLGVKASRLKRYNYTYNKKNNNRLFQKNEKIFYSKLDDKQNIISNNNIPLPSESDMRDFWTKIWSKDIKHNESTPWIENEELNFSGIEQMSFSNISVELLSKIIKNTHNWKATGCDWIHNFWYKRLTTLHPLLAKNLSKFVSQPQNFPNFLTKGITYMLPKSENINNPSQYRPITCLPTIYKILTSCLTDLIYTHLDEKNILSEQQKGCRRKHMGCKEQLVIDSVILKQIQTRKRNLHTCYIDYQKAFDSVPHSWLIKVLNIYKINPIIISFLENIMSFWNTNLLINLKGKKIVIPGISIKRGIFQGDSLSPLWFCLALNPLSKMLIRSKFGIKVKGNTRESSTISHLLFMDDIKLFSNSEQNLEKMIEVVKNFSDDIKMTFGLDKCRTIHIEKGKIVDGDESIFRNFQITSMKRDEVYKYLGYPQSNRLDHTSIKNDIRIKFQTRIRKILKCNLSAKNLVKAINTWAIPLLTYSFGIIKWSNTDLDNLERLVRTTLTKFNCHHPNSAIERVNLPRNLGGRGIVKITSLKHNQVEMLRTFFHRKAHSSEMHKIICKADRNITPLNLYDENANIFINPNQELLDSWSNKILHAKHFNYLNQTYVDKFSSNKWLSIGELSAEIEGFMLAIQDRVINTKNYRKHIIKDTNQIDDLCRKCLAFPETIEHIISGCSILAPSEYTFRHNQVLKIIHQNLVIKHNLIDCRNIVPYYEYEPNSFLENEFYKIYYDKTILTDRTISHNRPDIVLHDKIKKITYIINVAIQNSCNIQKSVNEKIRKYTDLGNEIKRIWHSQTIKILPFVISATGIIPSSLIKNLGVLDLSKNLYIKMQKSVILNTCRITKDFLNIYVEGSVGFIGPVRSTTEPNPLI

SEQ ID NO: 782 - protein, 1266 aa, Hesperophylax magnus
MQMNKNMIGPTKYLLAVDSSFFLQFGVFLYSYIQATFNNNNNNNNNNSSKDTIISKLFCKMTTMSFATNVDEQGIIMSSVQMNMDSLRPQKTKAGIPRQRMKWTNDVNMFIVRSYFYVTKVETDMLLYRKKLHLLFSQNYPIAQVSEQRLADQKRAIFKNNLISVVTLEQIKREVADRLQRGNNLEQINTSNNVISDALNVDSLDNILVEMSNDITVDSNNLAVIYNLREINIANLNFVDENVVELANLLHNNINRYIDVEPTVRPKLPKLHTSKKLSKLIFELNNIILPKIIFDEISFLDLHTIVYASAITVCNKLGIKLSSSDDRSYSYSKPEWQIRLENDVVFLRSNIARVIEYKNGNRSRKILRHVDEIGRKFGYNIDSYNNENIINDLLDLLKQKLGVKASRLKRYNYTYNTKNNNRLFQKNEKIFYSKLDDKQNIISKNNIPLPSESDMRDFWTKIWSKDIKHNESTPWIENEELNFSGIEQMSFSNISVELLSKIIKNTHNWKATGCDWIHNFWYKRLTTLHPLLAKNLSKFVSQPQNFRNFLTKGITYMLPKSENINNPSQYRPITCLPTIYKILTSCLTDLIYTHLDEKNILSEQQKGCRRKHMGCKEQLVIDSVILKQIQTRKRNLHTCYIDYQKAFDSVPHSWLIKVLNIYKINPIIISFLENIMSFWNTNLLINLKGKKIVIPGISIKRGIFQGDSLSPLWFCLALNPLSKMLIRSKFGIKVKGNTRESSTISHLLFMDDIKLFSNSEQNLEKMIEVVKNFSDDIKMTFGLDKCRTIHIEKGKIVDGDESIFRNFQITSMKRDEVYKYLGYPQSNRLDHTSIKNDIRIKFQTRIRKILKCNLSAKNLVKAINTWAIPLLTYSFGIIKWSNTDLDNLERLVRTTLTKFNCHHPNSAIERVNLPRNSGGRGIIKITYLKHNQVEMLRTFFHRKAHSSEMHKIICKADRNITPLNLYDENANIFINPNQELLDSWSNKILHAKHFNYLNQTYVDKFSSNKWLSIGELSAEIEGFMLAIQDRVINTKNYRKHIIKDTNQIDDLCRKCLAFPETIEHIISGCSILAPSEYTFRHNQVLKIIHQNLVIKHNLIDCRNVVPYYEYEPNSFLENEFYKIYYDKTILTDRTISHNRPDIVLHDKIKKITFIIDVAIPNSCNIQKSVNEKIRKYTDLGNEIKRIWHSQTIKILPFVISATGIIPSSLIKNLGVLDLSKNLYIKMQKSVILNTCRITKDFLNIYVEGSVGFIGPVRSSTEPNPLI

SEQ ID NO: 783 - protein, 1206 aa, Hesperophylax magnus
MTTMSFATNVDEQGIIMSSVQMNMDSLRPQKTKAGIPRQRMKWTNDVNMFIVRSYFYVTKVETDMLLYRKKLHLLFSQNYPIAQVSEQRLADQKRAIFKNNLISVVTLEQIKREVADRLQRGNNLEQINTSNNVISDALNVDSLDNILVEMSNDITVDSNNLDVIYNLREINIANLNFVDENVVELANLLHNNINRYIDVEPTVRPKLPKLHTSKKLSKLIFELNNIILPKIIFDEISFLDLHTIVYASAITVCNKLGIKLSSSDDRSYSYSKPEWQIRLENDVVFLRSNIARVIEYKNGNRSRKILRHVDEIGRKFGYNIESHNNENIINDLLDLLKQKLGVKASRLKRYNYTYNKKNNNRLFQKNEKIFYSKLDDKQNIISNNNIPLPSESDMRDFWTKIWSKDIKHNDSTPWIENEELNFSGIEQMSFSNISVELLTKIIKNTHNWKATGCDWIHNFWYKRLTTLHPLLAKNLSKFVSQPQNFPNFLTKGITYMLPKSENINNPSQYRPITCLPTIYKILTSCLTDLIYTHLDEKNILSEQQKGCRRKHMGCKEQLVIDSVILKQIQTRKRNLHTCYIDYQKAFDSVPHSWLIKVLNIYKINPIIISFLENIMSFWNTNLLINLKGKKIVIPGISIKRGIFQGDSLSPLWFCLALNPLSKMLIKSKFGIKVKGNTRESSTISHLLYMDDIKLFSNSEQNLEKMIEVVKNFSDDIKMTFGLDKCRTIHIEKGKIVDGDESIFRNFQITSMKRDEVYKYLGYPQSNRLDHTSIKNDIRIKFQTRIRKILKCNLSAKNLVKAINTWAIPLLTYSFGIIKWSNTDLDNLERLIRTTLTKFNCHHPNSAIERVNLPRNLGGRGIVKINSLKNNQVEMLRTFFHRKAHSSEMHKIICKADRNITPLNLYDENANIFINPNQELLDSWSNKILHAKHFNYLNQTYVDKFSSNKWLSIGELSAEIEGFMLAIQDRVINTKNYRKHIIKDTNQIDDLCRKCLAFPETIEHIISGCSILAPSEYTFRHNQVLKIIHQNLVIKHNLIDCRNIVPYYEYEPNSFLENEFYKIYYDKTILTDRTISHNRPDIVLHDKIKKITYIIDVAIPNSCNIKKSVNEKIRKYTDLGNEIKRIWHSQTIKILPFVISATGIIPSSLIKNLGVLDISKNLYIKMQKSVILNTCRITKDFLNIYVEGSVGFIGPVRSSTEPNPLI

SEQ ID NO: 784 - protein, 812 aa, Hesperophylax magnus
MRDFWTKIWSKDIKHNESSPWIENEELNFSGIEQMSFSNISVELLTKIIKNTHNWKATGCDWIHNFWYKRLTTLHPLLAKNLSKFVSQPQNFPNFLTKGITYMLPKSENINNPSQYRPITCLPTIDKILTSCLTDLIYTHLDEKNILSEQQKGCRRKHMGCKEQLVIDSVILKQIQTRKRNLHTCYIDYQKAFDSVPHSWLIKVLNIYKINPIIISFLENIMSFWNTNLLINLKGKKIVIPGISIKRGIFQGDSLSPLWFCLALNPLSKMLIKSKFGIKVKGNIRESSTISHLLYMDDIKLFSNSEQNLEKMIEVVKNFSDDIKMTFGLDKCRTIHIEKGKIVDGDESIFRNFQITSMKRDEVYKYLGYPQSNRLDHSSIKNDIRIKFQTRIRKILKCNLSAKNLVKAINTWAIPLLTYSFGIIKWSNTDLDNLERLIRTTLTKFNCHHPNSAIERVNLPRNLGGRGIIKITSLKHNQVEMLRTFFHRKAHSSEMHKIICKADRNITPLNLYYENANIFINPNQELLDSWSNKILHAKHFNYLNQTYVDKISSNKWLSIGELSAEIEGFMLAIQDRVINTKNYRKHIIKDTNQIDDLCRKCLAFPETIEHIISGCSILAPSEYTFRHNQVLKIIHQNLVIKHNLIDCRNVVPYYEYEPNSFLENEFYKIYYDKTILTDRTISHNRPDIVLHDKIKKITYIIDVAIPNSCNIQKTVNEKIRKYTDLGNEIKRIWHSQTIKILPFVISATGIIPSSLIKNLGVLDLSKKLYIKMQKSVILNTCRITKDFLNIYVEGSVGFIGPVRISTEPNPLI

SEQ ID NO: 785 - protein, 1164 aa, Hesperophylax magnus
MDERCQYVHCSFIFLCNQSRNRYVVIQEKLHLLFSQNYPIAQVSEQRLADQKRAIFKNNLISVVTLEQIKREVADRLQRGNNLEQINTSNNVISDAFNVDSLDNILVEMSNDITVDSNNLDVIYNLREINIANLNFVDENVVELANLLHNNINRYIDVEPTVRPKLPKLHTSKKLSKLIFELNNIILPKIIFDEISFLDLHTIVYASAITVCNKLGIKLSSYDDRSYSYSKPEWQIRLENDVVFLRSNIARVMEYKNGNRSRKILRHVDEIGRKFGYNIDSHNNENIINDLLDLLKQKLGVKASRLKRYNYTYNKKNNNRLFQKNEKIFYSKLDDKQNIISNNNIPLPSESDMRDFWTKIWSKDIKHNDSTPWIENEELNFSGIEQMSFSNISVELLTKIIKNTHNWKATGCDWIHNFWYKRLTTLHPLLAKNLSKFVSQPQNFPNFLTKGITYMLPKSENINNPSQYRPITCLPTIYKILTSCLTDLIYTHLDEKNILSEQQKGCRRKHMGCKEQLVIDSVILKQVQTRKRNLHTCYIDYQKAFDSVPHSWLIKVLNIYKINPIIISFLENIMSFWNTNLLINLKGKKIVIPGISIKRGIFQGDSLSPLWFCLALNPLSKMLIKSKFGIKVKGNTRESSTISHLLYMDDIKLFSNSEQNLEKMIEVVKNFSDDIKMTFGLDKCRTIHIEKGKIVDGDESIFRNFQITSMKRDEVYKYLGYPQSNRLDHTSIKNDIRIKFQTRIRKILKCNLSAKNLVKAINTWAIPLLTYSFGIIKWSNTDLDNLERLIRTTLTKFNCHHPNSAIERVNLPRNLGGRGIVKINSLKNNQVEMLRTFFHRKAHSSEMHKIICKADRNITPLNLYDENANIFINPNQELLDSWSNKILHAKHFNYLNQTYVDKFSSNKWLSIGELSAEIEGFMLAIQDRVINTKNYRKHIIKDTNQIDDLCRKCLAFPETIEHIISGCSILAPSEYTFRHNQVLKIIHQNLVIKHNLIDCRNIVPYYEYEPNSFLENEFYKIYYDKTILTDRTISHNRPDIVLHDKIKKITYIIDVAIPNSCNIQKSVNEKIRKYTDLGNEIKRIWHSQTIKILPFVISATGIIPSSLIKNLGVLDLSKNLYIKMQKSVILNTCRITKDFLNIYVEGSVGFIGPVRSSTEPNPLI

SEQ ID NO: 786 - protein, 812 aa, Hesperophylax magnus
MRDFWTKIWSKDIKHNESTPWIENEELNFSGIEQMSFSNISVELLSKIIKNTHNWKATGCDWIHNFWYKRLTTLHPLLAKNLSKFVSQPQNFPNFLTKGITYMLPKSENINNPSQYRPITCLPTIYKILTSCLTDLIYTHLDEKNILSEQQKGCRRKHMGCKEQLVIDSVILKQIQTRKRNLHTCYIDYQKAFDSVPHSWLIKVLNIYKINPIIISFLENIMSFWNTNLLINLKGKKIVIPGISIKRGIFQGDSLSPLWFCLALNPLSKMLIRSKFGIKVKGNTRESSTISHLLFMDDIKLFSNSEQNLEKMIEVVKNFSDDIKMTFGLDKCRTIHIEKGKIVDGDESIFRNFQITSMKRDEVYKYLGYPQSNRLDHTSIKNDIRIKFQTRIRKILKCNLSAKNLVKAINTWAIPLLTYSFGIIKWSNTDLDNLERLIRTTLTKFNCHHPNSAIERVNLPRNLGGRGIVKITSLKHNQVEMLRTFFHRKAHSSEMHKIICKADRNITPLNLYDENANIFINPNQELLDSWSNKILHAKHFNYLNQTYVDKFSSNKWLSIGELSAEIEGFMLAIQDRVINTKNYRKHIIKDTNQIDDLCRKCLAFPETIEHIISGCSILAPSEYTFRHNQVLKIIHQNLVIKHNLIDCRNIVPYYEYEPNSFLENEFYKIYYDKTILTDRTISHNRPDIVLHDKIKKITYIIDVAIPNSCNIQKSVNEKIRKYTDLGNEIKRIWHSQTIKILPFVISATGIIPSSLIKNLGVLDLSKNLYIKMQKSVILNTCRITKDFLNIYVEGSVGFIGPVRSSTEPNPLI

SEQ ID NO: 787 - protein, 1036 aa, Hesperophylax magnus
MITTYVVIQEKITFTFLTKLSDCPSKRTKISRPKASYFQKNNLISVVTLEQIKREVADRLQRGNNLEQINTSNNVISDALNVDSLDNILVEMSNDITVDSNNLAVIYNLREINIANLNFVDENVVELANLLHNNINRYIDVEPTVRPKLPKLHTSKKLSKLIFELNNIILPKIIFDEISFLDLHTIVYASAITVCNKLGIKLASSDDRSYSYSKPEWQIRLENDVVFLRSNIARVIEYKNGNRSRKILRHVDEIGRKFGYNIDSHNNENIINDLLDLLKQKLGVKASRLKRYNYTYNKKNNNRLFQKNEKIFYSKLDDKQNIISNNNIPLPSESDMRDFWTKIWSKDIKHNESTPWRENEELNFSGIEQMSFSNISVELLSKIIKNTHNWKATGCDWIHNFWYKRLTTLHPLLAKNLSKFVSQPQNFPNFLTKGITYMLPKSENINNPSQYRPITCLPTIYKILTSCLTDLIYTHLDEKNILSEQQKGCRRKHMGCKEQLVIDSVILKQIQTRKRNLHTCYIDYQKAFDSVPHSWLIKVLNIYKINPIIISFLENIMSFWNTNLLINLKGKKIVIPGISIKRGIFQGDSLSPLWFCLALNPLSKMLIKSKFGIKVKGNTRESSTISHLLFMDDIKLFSNSEQNLEKMIEVVKNFSDDIKMTFGLDKCRTIHIEKGKIVDGDESIFRNFQITSMKWDEVYKYLGYPQSNRLDHTSIKNDIRIKFQTRIRKILKCNLSAKNLVKAINTWAIPLLTYSFGIIKWSNTDLDNLERLVRTTLTKFNCHHPNSAIERVNLPRNLGGRGIVKITSLKHNQVEMLRTFFHRKAHSSEMHKIICKADRNITPLNLYDENANIFINPNQELLDSWSNKILHAKHFNYLNQTYVDKFSSNKWLSIGELSAELEGFMLAIQDRVINTKNYRKHIIKDTNQIDDLCRKCLAFPETIEHIISGCSILAPSEYTFRHNQVLKIIHQNLVIKHNLIDCRNIVPYYEYEPNSFLENEFYKIYYDKTILTDRTISHNRPDIVLHDKIKKNNLYH

SEQ ID NO: 788 - protein, 812 aa, Hesperophylax magnus
MRDFWTKIWSKDIKHNDSTPWIENEELNFSGIEQMSFSNISVELLTKIIKNTHNWKATGCDWIHNFWYKRLTTLHPLLAKNLSKFVSQPQNFPNFLTKGITYMLPKSENINNPSQYRPITCLPTIYKILTSCLTDLIYTHLDEKNILSEQQKGCRRKHMGCKEQLVIDSVILKQIQTRKRNLHTCYIDYQKAFDSVPHSWLIKVLNIYKINPIIISFLENIMSFWNTNLLINLKGKKIVIPGISIKRGIFQGDSLSPLWFCLALNPLSKMLIKSKFGIKVKGNTRESSTISHLLYMDDIKLFSNSEQNLEKMIEVVKNFSDDIKMTFGLDKCRTIHIEKGKIVDGDESIFRNFQITSMKRDEVYKYLGYPQSNRLDHTSIKNDIRIKFQTRIRKILKCNLSAKNLVKAINTWAIPLLTYSFGIIKWSNTDLDNLERLIRTTLTKFNCHHPNSAIERVNLPRNLGGRGIVKITSLKHNQVEMLRTFFHRKAHSSEMHKIICKADRNITPLNLYDENANIFINPNQELLDSWSNKILHAKHFNYLNQTYVDKFSSNKWLSIGELSAEIEGFMLAIQDRVINTKNYRKHIIKDTNQIDDLCRKCLAFPETIEHIISGCSILAPSEYTFRHNQVLKIIHQNLVIKHNLIDCRNIVPYYEYEPNSFLENEFYKIYYDKTILTDRTISHNRPDIVLHDKIKKITYIIDVAIPNSCNIQKSVNEKIRKYTDLGNEIKRIWHSQTIKILPFVISATGIIPSSLIKNLGVLDLSKNLYIKMQKSVILNTCRITKDFLNIYVEGSVGFIGPVRSSTEPNPLI

SEQ ID NO: 789 - protein, 1119 aa, Hesperophylax magnus
MDERCQYVHCSFIFLCNQSRNRYVVIQEKLHLLFSQNYPIAQVSEQRLADQKRAIFKNNLISAVTLEQIKREVADRLQRGNNLEQINTSNNVISDALNVDSLDNILVEMSNDITVDSNNLDVIYNLREINIANLNFVDENVVELANLLHNNINRYIDVEPTVRPKLPKLHTSKKLSKLIFELNNIILPKIIFDEISFLDLHTIVYASAITVCNKLGIKLSSSDDRSYSYSKPEWQIRLENDVVFLRSNIARVIEYKNGNRSRKILRHVDEIGRKFGYNIDSHNNENIINDLLDLLKQKLGVKASRLKRYNYTYNKKNNNRLFQKNEKIFYSKLDDKQNITSNNNIPLPSESDMRDFWTKIWSKDIKHNDSTPWIENEELNFSDIEQMSFSNISVELLTKIIKNTHNWKATGCDWIHNFWYKRLTTLHPLLAKNLSKFVSQPQNFPNFLTKGITYMLPKSENINNPSQYRPITCLPTIYKILTSCLTDLIYTHLDEKNILSEQQKGCRRKHMGCKEQLVIDSVILKQIQTRKRNLHTCYIDYQKAFDSVPHSWLIKVLNIYKINPIIISFLENIMSFWNTNLLINLKGKKIVIPDISIKRGIFQGDSLSPLWFCLALNPLSKMLIKSKFGIKVKGNTRESSTISHLLYMDDIKLFSNSEQNLEKMIEVVKNFSDDIKMTFGLDKCRTIHIEKGKIVDGDESIFRNFQITSMKRDEVYKYLGYPQSNRLDHTSIKNDIRIKFQTRIRKILKCNLSAKNLVKAINTWAIPLLTYSFGIIKWSNTDLDNLERLIRTTLTKFNCHHPNSAIERVNLPRNLGGRGIVKINSLKNNQVEMLRTFFHRKAHSSEMHKIICKADRNITPLNLYDENANIFINPNQELLDSWSNKILHAKHFNYLNQTYVDKFSSNKWLSIGELSAEIEGFMLAIQDRVINTKNYRKHIIKDKNQIDDLCRKCLAFPETIEHIISGCSILAPSEYTFRHNQVLKIIHQNLVIKHNLIDCRNIVPYYEYEPNSFLENEFYKIYYDKTILTDRTISHNRPDIVLHDKIKKITYIIDVAIPNSCNIQKSVNEKIRKYTDLGNEIKRIWHSQTIKILPFVISATGIIPSSLIKNLGVLDLSKN

SEQ ID NO: 790 - protein, 812 aa, Hesperophylax magnus
MRDFWTKIWSKDIKHNDSTPWIENEELNFSGIEQMSFSNISVELLTKIIKNTHNWKATGCDWIHNFWYKRLTTLHPLLAKNLSKFVSQPQNFPNFLTKGITYMLPKSENINNPSQYRPITCLPTIYKILTSCLTDLIYTHLDEKNILSEQQKGCRRKHMGCKEQLVIDSVILKQIQTRKRNLHTCYIDYQKAFDSVPHSWLIKVLNIYKINPIIISFLENIMSFWNTNLLINLKGKKIVIPGISIKRGIFQGDSLSPLWFCLALNPLSKMLIKSKFGIKVKGNTRESSTISHLLYMDDIKLFSNSEQNLEKMIEVVKNFSDDIKMTFGLDKCRTIHIEKGKIVDGDESIFRNFQITSMKRDEVYKYLGYPQSNRLDHTSIKNDIRIKFQTRIRKILKCNLSAKNLVKAINTWAIPLLTYSFGIIKWSNTDLDNLERLIRTTLTKFNCHHPNSAIERVNLPRNLGGRGIVKITSLKHNQVEMLRTFFHRKAHSSEMHRIICKADRNITPLNLYDENANIFINPNQELLDSWSNKILHAKHFNYLNQTYVDKFSSNKWLSIGELSAEIEGFMLAIQDRVINTKNYRKHIIKDTNQIDDLCRKCLAFPETIEHIISGCSILAPSEYTFRHNQVLKIIHQNLVIKHNLIDCRNIVPYYEYEPNSFLENEFYKIYYDKTILTDRTISHNRPDIVLHDKIKKITYIIDVAIPNSCNIQKSVNEKIRKYTDLGNEIKRIWHSQTIKILPFVISATGIIPSSLIKNLGVLDLSKNLYIKMQKSVILNTCRITKDFLNIYVEGSVGFIGPVRSSTEPNPLI

SEQ ID NO: 791 - protein, 1162 aa, Hesperophylax magnus
MNDVNMFIVRSYFYVTKLETDMLLYRKKLHSLFSQNYPIAQVNEQRLADQKRAIFKNNLIPVVTLKQIKREVADRLQMVNNLEQINTINVISDALNVDSLDNILVEMSNDITVDSNNLDIIYNLREINIANLNFVDDNVIELANLLHNNINRYIDVEPTVRPKLPKLHTSKKLSKLIFELNNIILPKIIFDEISFLDLHTIVYATAITVCNKLGIKLSSSDDRSYSYSKPEWQIRLENDVVFLRSNIARVIEYKNGNRSRKILRHVDEIGRKFGYNIDSHNNENIINDLLDLLKQKLGVKASRLKRYNYTYNKKNNNRLFHKNEKIFYSKLDDKQNIISNNNIPLPSESDMRDFWTKIWSKDIKHNESSPWIENEELNFSGIEQMSFSNISVELLTKIIKNTHNWKATGCDWIHNFWYKRLTTLHPLLAKNLSKFVSQPQNFPNFLTKGITYMLPKSENINNPSQYRPITCLPTIYKILTSCLTDLIYTHLDEKNILSEQQKGCRRKHMGCKEQLVIDSVILKQIQTRKRNLHTCYIDYQKAFDSVPHSWLIKVLNIYKINPIIISFLENIMSFWNTNLLINLKGKKIVIPGISIKRGIFQGDSLSPLWFCLALNPLSKMLIKSKFGIKVKGNIRESSTISHLLYMDDIKLFSNSEQNLEKMIEVVKNFSDDIKMTFGLDKCRTIHIEKGKIVDGDESIFRNFQITSMKRDEVYKYLGYPQSNRLDHTSIKNDIRIKFQTRIRKILKCNLSAKNLVKAINTWAIPLLTYSFGIIKWSNTDLDNLERLIRTTLTKFNCHHPNSAIERVNLPRNLGGRGIIKITSLKHNQVEMLRTFFHRKAHSSEMHKIICKADRNITPLNLYDENANIFINPNQELLDSWSNKILHAKHFNYLNQTYVDKISSNKWLSIGELSAEIEGFMLAIQDRVINTKNYRKHIIKDTNQIDDLCRKCLAFPETIEHIISGCSILAPSEYTFRHNQVLKIIHQNLVIKHNLIDCRNIVPYYEYEPNSFLENEFYKIYYDKTILTDRAISHNRPDIVLHDKIKKITYIIDVAIPNSCNIQKSVSEKIRKYTDLGNEIKRICHSQTVKILPFVISATGIIPSSLIKNLGVLDLSKKLYIKMQKSVILNTCRITKDFLNVYVEGSVGFIGPVRSSTEPNPLI

SEQ ID NO: 792 - protein, 1158 aa, Hesperophylax magnus
MFIVRSYFYVTKVETDMLLYRKKLHLLFSQNYPIAQVSEQRLADQKRAIFKNNLISVVTLEQIKREVADRLQRGNNLEQINTSNNVISDALNVDSLDNILVEMSNDITVDSNNLDVIYNLREINIANLNFVDENVVELANLLHNNINRYIDVEPTVRPKLPKLHTSKKLSKLIFELNNIILPKIIFDEISFLDLHTIVYASAITVCNKLGIKLSSSDDRSYSYSKPEWQIRLENDVVFLRSNIARVIEYKNGNRSRKILRHVDEIGRKFGYNIDSHNNENIINDLLDLLKQKLGVKASRLKRYNYTYNKKNNNRLFQKNEKIFYSKLDDKQNIISNNNIPLPSESDMRDFWTKIWSKDIKHNDSTPWIENEELNFSGIEQMSFSNISVELLTKIIKNTHNWKATGCDWIHNFWYKRLTTLHPLLAKNLSKFVSQPQNFPNFLTKGITYMLPKSENINNPSQYRPITCLPTIYKILTSCLTDLIYTHLDEKNILSEQQKGCRRKHMGCKEQLVIDSVILKQIQTRKRNLHTCYIDYQKAFDSVPHSWLIKVLNIYKINPIIISFLENIMSFWNTNLLINLKGKKIVIPGISIKRGIFQGDSLSPLWFCLALNPLSKMLIKSKFGIKVKGNTRESSTISHLLYMDDIKLFSNSEQNLEKMIEVVKNFSDDIKMTFGLDKCKTIHIEKGKIVDGDESIFRNFQITSMKRDEVYKYLGYPQSNRLDHTSIKNDIRIKFQTRIRKILKCNLSAKNLVKAINTWAIPLLTYSFGIIKWSNTDLDNLERLIRTTLTKFNCHHPNSAIERVNVPRNLRGRGIGKINSLKNNQVEMLRTFFHRKAHSSEMHKIICKADRNITPLNLYDENANIFINPNQELLDSWSNKILHAKHFNYLNQTYVDKFSSNKWLSIGELSAEIEGFMLAIQDRVINTKNYRKHIIKDTNQIDDLCRKCLAFPETIEHIISGCSILAPSEYTFRHNQVLKIIHQNLVIKHNLIDCRNIVPYYEYEPNSFLENEFYKIYYDKTILTDRTISHNRPDIVLHDKIKKITYIIDVAIPNSCNIQKSVNEKIRKYTDLGNEIKRIWHSQTIKILPFVISATGIIPSSLIKNLGVLDLSKNLYIKMQKSVILNTCRITKDFLNIYVEGSVGFIGPVRSSTEPNPLI

SEQ ID NO: 793 - protein, 1107 aa, Hesperophylax magnus
MTTMSFATNVDEQGIIMSSVQMNMDSLRPQKTKAGIPRQRMKWTNDVNMFIVRSYFYVTKVETDMLLYRKKLHLLFSQNYPIAQVSEQRLADQKRAIFKNNLISVVTLEQIKREVADRLQRGNNLEQINTSNNVISDALNVDSLDNILVEMSNDITVDSNNLGVIYNLREINIANLNFVDENVVELANLLHNNINRYIDVEPTVRPKLPKLHTSKKLSKLIFELNNIILPKIIFDEISFLDLHTIVYASAITVCNKLGIKLSSSDDRSYSYSKPEWQIRLENDVVFLRSNIARVIEYKNGNRSRKILRNVDEIGRKFGYHIDSHNNENIINDLLDLLKQKLGVKASRLKRYNYTYNKKNNNRLLQKNEKIFYSKLDDKQNIISNNNIPLPSESDMRDFWTKIWSKDIKHNESTPWIENEELNFSGIEQMSFSNISVELLTKIIKNTHNWKATGCDWIHNFWYKRLTTLHPLLAKNLSKFVSQPQNFPNFLTKGITYMLPKSENINNPSQYRPITCKPTIYKILTSCLTDLIYTHLDEKNILSEQQKGCRRKHMGCKEQLVIDSVILKQIQTRKRNLHTCYIDYQKAFDSVPHSWLIKVLNIYKINPIIISFLENIMSFWNTNLLINLKGKKIVIPGISIKRGIFQGDSLSPLWFCLALNPLSKMLIKSKFGIKVKGNTRESSTISHLLYMDDIKLFSNSEQNLEKMIEVVKNFSDDIKMTFGLDKCKTIHIEKGKIVDGDESIFRNFQITSMKRDEVYKYLGYPQSNRLDHTSIKNDIRIKFQTRIRKILKCNLSAKNLVKAINTWAIPLLTYSFGIIKWSNTDLDNLERLIRTTLTKFYCHHPNSAIERVNLPRNLGGRGIVKITSLKHNQVEMLRTFFHRKAHSSEMHKIICKADRNITPLNLYDENANIFINPNQELLDSWSNKILHAKHFNYLNQTYVDKFSSNKWLSIGELSAEIEGFMLAIQDRVINTKNYRKHIIKDTNQIDDLCRKCLACPETIEHIISGCTILAPSEYTFRHNQVLKIIHQNLVIKHNLIDCRNIVPYYEYEPNSFLENEFYKIYYDKTILTDRTISHNRPDIVLHDKIKKYNGNYSESLDKDYMKYF

SEQ ID NO: 794 - protein, 1158 aa, Hesperophylax magnus
MFIVRSYFYVTKVETDMLLYRKKLHLLFSQNYPIAQVSEQRLADQKRAIFKNNLISVVTLEQIKREVADRLQRGNNLEQINTSNNVISDALNVDSLDNILVEMSNDITVDSNNLDVIYNLREINIANLNFVDENVVELANLLHNNINRYIDVEPTVRPKLPKLHTSKKLSKLIFELNNIILPKIIFDEISFLDLHTIVYASAITVCNKLGIKLSSSDDRSYSYSKPEWQIRLENDVVFLRSNIARVIEYKNGNRSRKILRHVDEIGRKFGYNIDSHNNENIINDLLDLLKQKLGVKASRLKRYNYTYNKKNNNRLFQKNEKIFYSKLDDKQNIISNNNIPLPSESDMRDFWTKIWSKDIKHNDSTPWIENEELNFSGIEQMSFSNISVELLTKIIKNTHNWKATGCDWIHNFWYKRLTTLHPLLAKNLSKFVSQPQNFPNFLTKGITYMLPKSENINNPSQYRPITCLPTIYKILTSCLTDLIYTHLDEKNILSEQQKGCRRKHMGCKEQLVIDSVILKQIQTRKRNLHTCYIDYQKAFDSVPHSWLIKVLNIYKINPIIISFLENIMSFWNTNLLINLKGKKIVIPGISIKRGIFQGDSLSPLWFCLALNPLSKMLIKSKFGIKVKGNTRESSTISHLLYMDDIKLFSNSEQNLEKMIEVVKNFSDDIKMTFGLDKCRTIHIEKGKIVDGDESIFRNFQITSMKRDEVYKYLGYPQSNRLDHTSIKNDIRIKFQTRIRKILKCNLSAKNLVKAINTWAIPLLTYSFGIIKWSNTDLDNLERLIRTTLTKFNCHHPNSAIERVNLPRNLRGRGIVKINSLKNNQVEMLRTFFHRKAHSSEMHKIICKADRNITPLNLYDENANIFINPNQELLDSWSNKILHAKHFNYLNQTYVDKFSSNKWLSIGELSAEIEGFMLAIQDRVINTKNYRKHIIKDTNQIDDLCRKCLAFPETIEHIISGCSILAPSEYTFRHNQVLKIIHQNLVIKHNLIDCRNIVPYYEYEPNSFLENEFYKIYYDKTILTDRTISHNRPDIVLHDKIKKITYIIDVAIPNSCNIQKSVNEKIRKYTDLGNEIKRIWHSQTIKILPFVISATGIIPSSLIKNLGVLDLSKNLYIKMQKSVILNTCRITKDFLNIYVEGSVGFIGPVRSSTEPNPLI

SEQ ID NO: 795 - protein, 1156 aa, Hesperophylax magnus
MTTMSFATNVDEQGIIMSSVQMNMDSPRPQKTKAGIPRQRMKWTNDVNMFIVRSYFYVTKVETDMLLYRKKLHLLFSQNYPIAQVSEQRLADQKRAIFKNNLISVVTLEQIKREVADRLQRGNNLEQINTSNNVISDALNVDSLDNILVEMSNDITVDSNNLDVIYNLREINIANLNFVDENVVELANLLHNNINRYIDVEPTVRPKLPKLHTSKKLSKLIFQLNNIILPKIIFDEISFIDLHTIVYASAITVCNKLGIKLSSSDDRSYSYSKPEWQIRLENDVVFLRSNIARVIEYKNGNRSRKILRHVDEIGRKFGYNIDSHNNENIINDLLDLLKQKLGVKASRLKRYNYTYNKKNNNRLFQKNEKIFYSKLDDKQNIISNNNIPLPSESDMRDFWTKIWSKDIKHNESTPWIENEELNFSGIEQMSFSNISVELLSKIIKNTHNWKATGCDWIHNFWYKRLTTLHPLLAKNLSKFVSQPQNFPNFLTKGITYMLPKSENIYNPSQYRPITCLPTIYKILTSCLTDLIYTHLDEKNILSEQQKGCRRKHMGCKEQLVIDSVILKQIQTRKRNLHTCYIDYQKAFDSVPHSWLIKVLNIYKINPIIISFLENIMSFWNTNLLINLKGKKIVIPGISIKRGIFQGDSLSPLWFCLALNPLSKMLIKSKFGIKVKGNTRESSTISHLLFMDDIKLFSNSEQNLEKMIEVVKNFSDDIKMTFGLDKCRTIHIEKGKFVDGDESIFRNFQITSMKRDEVYKYLGYPQSNRLDHTSIKNDIRIKFQTRIRKILKCNLSAKNLVKAINTWAIPLLTYSFGIIKWSNTDLDNLERLIRTTLTKFNCHHPNSAIERVNLPRNLGGRGIVKITSLKHNQVEMLRTFFHRKAHSSEMHKIICKADRNITPLNLYDENANIFINPNQELLDSWSNKILHAKHFNYLNQTYVDKFSSNKWLSIGELSAEIEGFMLAIQDRVVNTKNYRKHIIKDTNQIDDLCRKCLAFPETIEHIISGCSILAPSEYTFRHNQVLKIIHQNLVTKHNLIDCRNIVPYYEYEPNSFLENEFYKIYYDKTILTDRTISHNRPDIVLHDKIKKITYIIDVAIPNSCNIQKSVNEKIRKYTDLGNEIKRIWHSQTIKILPFVISFFFFFFFNIIIIILIN

SEQ ID NO: 796 - protein, 1206 aa, Hesperophylax magnus
MTTMSFATNVDEQGIIMSSVQMNMDSLRPQKTKAGIPRQRMKWTNDVNMFIVRSYFYVTKVETDMLLYRKKLHLLFSQNYPIAQVSEQRLADQKRAIFKNNLISVVTLEQIKREVADRLQRGNNLEQINTSNNVISDALNVDSLDNILVEMSNDITVDSNNLDVIYNLREINIANLNFDDENVVELANLLHNNINRYIDVEPTVRPKLPKLHTSKKLSKLIFELNNIILPKIIFDEISFLDLHTIVYASAITVCNKLGIKLSSSDDRSYSYSKPEWQIRLENDVVFLRSNIARVIEYKNGNRSRKILRHVDEIGRKFGYNIDSHNNENIINDLLDLLKQKLGVKASRLKRYNYTYNKKNNNRLFQKNEKIFYSKLDDKQNIISNNNIPLPSESDMRDFWTKIWSKDIKHNDSTPWIENEELNFSGIEQMSFSNISVELLTKIIKNTHNWKATGCDWIHNFWYKRLTTLHPLLAKNLSKFVSQPQNFPNFLTKGITYMLPKSENINNPSQYRPITCLPTIYKILTSCLTDLIYTHLDEKNILSEQQKGCRRKHMGCKEQLVIDSVILKQIQTRKRNLHTCYIDYQKAFDNVPHSWLIKVLNIYKINPIIISFLENIMSFWNTNLLINLKGKKIVIPGISIKRGIFQGDSLSPLWFCLALNPLSKMLIKSKFGIKVKGNTRESSTISHLLYMDDIKLFSNSEQNLEKMIEVVKNFSDDIKMTFGLDKCRTIHIEKGKIVDGDESIFRNFQITSMKRDEVYKYLGYPQSNRLDHTSIKNDIRIKFQTRIRKILKCNLSAKNLVKAINTWAIPLLTYSFGIIKWSNTDLDNLERLIRTTLTKFNCHHPNSAKERVNLPRNLGGRGIVKINSLKNNQVEMLRTFFHRKAHSSEMHKIICKADRNITPLNLYDENANIFINPNQELLDSWSNKILHAKHFNYLNQTYVDKFSSNKWLSIGELSAEIEGFMLAIQDRVINTKNYRKHIIKDTNQIDDLCRKCLAFPETIEHIISGCSILAPSEYTFRHNQVLKIIHQNLVIKHNLIDCRNIVPYYEYEPNSFLENEFYKIYYDKTILTDRTISHNRPDIVLHDKIKKITYIIDVAIPNSCNIQKSVNEKIRKYTDLGNEIKRIWHSQTIKILPFVISATGIIPSSLIKNLGVLDLSKNLYIKMQKSVILNTCRITKDFLNIYVEGSVGFIGPVRSSTEPNPLI

SEQ ID NO: 797 - protein, 1095 aa, Hesperophylax magnus
MTTMSFATNVDEQGIIMSSVQMNMDSLRPQKTKAGIPRQRMKWTNDVNMFIVRSYFYVTKVETDMLLYRKKLHLLFSQNYPIAQVSEQRLADQKRAIFKNNLISVVTLEQIKREVADRLQRGNNLEQINTSNNVISDALNVDSLDNILVEMSNDITVDLNNLDVIYNLREINIANLNFVDENVVELANLLHNNINRYIDVEPTVRPKLPKLHTSKKLSKLIFELNNIILPKIIFDEISFLDLHTIVYASAITVCNKLGIKLSSSDDRSYSYSKPEWQIRLENDVVFLRSNIARVIEYKNGNRSRKILRHVDEIGRKFGYNIDSHNNENIINDLLDLLKQKLGVKASRLKRYNYTYNKKNNNRLFQKNEKIFYSKLDDKQNIISNNNIPLPSESDMRDFWTKIWSKDIKHNDSTPWIENEELNFSGIEQMSFSNISVELLTKIIKNTHNWKATGCDWIHNFWYKRLTTLHPLLAKNLSKFVSQPQNFPNFLTKGITYMLPKSENINNPSQYRPITCLPTIYKILTSCLTDLIYTHLDEKNILSEQQKGCRRKHMGCKEQLVIDSVILKQIQTRKRNLHTCYIDYQKAFDSVPHSWLIKVLNIYKINPIIISFLENIMSFWNTNLLINLKGKKIVIPGISIKRGIFQGDSLSPLWFCLALNPLSKMLIKSKFGIKVKGNTRESSTISHLLYMDDIKLFSNSEQNLEKMIEVVKNFSDDIKMTFGLDKCRTIHIEKGKIVDGDESIFRNFQITSMKRDEVYKYLGYPQSNRLDHTSIKNDIRIKFQTRIRKILKCNLSAKNLVKAINTWAIPLLTYSFGIIKWSNTDLDNLERLIRTTLTKFNCHHPNSAIERVNLPRNLGGRGIVKINSLKNNQVEMLRNFFHRKAHSSEMHKIICKADRNITPLNLYDENANIFINPNQELLDSWSNKILHAKHFNYLNQTYVDKFSSNKWLSIGELSAEIEGFMLAIQDRVINTKNYRKHIIKDTNQIDDLCRKCLAFPETIEHIISGCSILAPSEYTFRHNQVLKIIHQNLVIKHNLIDCRNIVPYYEYEPNSFLENEFYKIYYDKTILTDRTISHNRPDIVLHDKIKKNNLYH

SEQ ID NO: 798 - protein, 812 aa, Hesperophylax magnus
MRDFWTKIWSKDIKHNDSTPWIENEELNFSGIEQMSFSNISVELLTKIIKNTHNWKATGCDWIHNFWYKRLTTLHPLLAKNLSKFVSQPQNFPNFLTKGITYMLPKSENINNPSQYRPITCLPTIYKILTSCLTDLIYTHLDEKNILSEQQKGCRRKHMGCKEQLIIDSVILKQIQTRKRNLHTCYIDYQKAFDSVPHSWLIKVLNIYKINPIIISFLENIMSFWNTNLLINLKGKKIVIPGISIKRGIFQGDSLSPLWFCLALNPLSKMLIKSKFGIKVKGNTRESSTISHLLFMDDIKLFSNSEQNLEKMIEVVKNFSDDIKMTFGLDKCRTIHIEKGKIVDGDESIFRNFQITSMKRDEVYKYLGYPQSNRLDHTSIKNDIRIKFQTRIRKILKCNLSAKNLVKAINTWAIPLLTYSFGIIKWSNTDLDNLERLIRTTLTKFNCHHPNSAIERVNLPRNLGGRGIVKITSLKHNQVEMLRTFFHRKAHSSEMHKIICKADRNITPLNLYDENANIFINPNQELLDSWSNKILHAKHFNYLNQTYVDKFSSNKWLSIGELSAEIEGFMLAIQDRVINTKNYRKHIIKDTNQIDDLCRKCLAFPETIEHIISGCSILAPSEYTFRHNQVLKIIHQNLVIKHNLIDCRNIVPYYEYEPNSFLENEFYKIYYDKTILTDRTISHNRPDIVLHDKIKKITYIIDVAIPNSCNIQKSVNEKIRKYTDLGNEIKRIWHSQTIKILPFVISATGIIPSSLIKNLGVLDLSKNLYIKMQKSVILNTCRITKDFLNIYVEGSVGFIGPVRSSTEPNPLI

SEQ ID NO: 799 - protein, 812 aa, Hesperophylax magnus
MRDFWTKIWSKDIKHNDSTPWIENEELNFSGIEQMSFSNISVELLTKIIKNTHNWKATGCDWIHNFWYKRLTTLHPLLAKNLSKFVSQPQNFPNFLTKGITYMLPKSENINNPSQYRPITCLPTIYKILTSCLTDLIYTHLDEKNILSEQQKGCRRKHMGCKEQLVIDSVILKQIQTRKRNLHTCYIDYQKAFDSVPHSWLIKVLNIYKINPIIISFLENIMSFWNTNLLINLKGKKIVIPGISIKRGIFQGDSLSPLWFCLALNPLSKMLIKSKFGIKVKGNTRESSTISHLLYMDDIKLFSNSEQNLEKMIEVVKNFSDDIKMTFGLDKCRTIHIEKGKIVDGDESIFRNFQITSMKRDEVYKYLGYPQSNRLDHTSIKNDIRIKFQTRIRKILKCNLSAKNLVKAINTWAIPLLTYSFGIIKWSNTDLDNLERLIRTTLTKFNCHHPNSAIERVNLPRNLGGRGIVKITSLKHNQVEMLRTFFHRKAHSSEMHKIICKADRNITPLNLYDENANIFINPNQELLDSWSNKILHAKHFNYLNQTYVDKFSSNKWLSIGELSAEIEGFMLAIQDRVINTKNYRKHIIKDTNQIDDLCRKCLAFPETIEHIISGCSILAPSEYTFRHNQVLKIIHQNLVIKHNLIDCRNIVPYYEYEPNSFLENEFYKIYYDKTILTDRTISHNRPDIVLHDKIKKITYIIDVAIPNSCNIQKSVNEKIRKYTDLGNEIKRIWHSQTIKILPLVISATGIIPSSLIKNLGVLDLSKNLYIKMQKSVILNTCRITKDFLNIYVEGSVGFIGPVRSSTEPNPLI

SEQ ID NO: 800 - protein, 1164 aa, Hesperophylax magnus
MDEQCQYVHCSFIFLCNQSRNRYVVIQKKLHLLFSQNYPIAQVTEQRLADQKRAIFKNNLISVVTLEQIKREVADRLQRGNNLEQINTSNNVITDALNVDSLDNILVEISNDITVDSNNLAVIYNLREINIANLNFVDENVVELANLLHNNINRYIDVEPTVRPKLPKLHTSKKLSKLIFELNNIILPKIIFDEISFLDLHTIIYASAITVCNKLGIKLSSSDDRSYSYSKPEWQIRLENDVVFLRSNIARVIEYKNGNRSRKILRHVDEIGRKFGYNIDSHNNENIINDLLDLLKQKLGVKASRLKRYNYTYNKKNNNRLFQKNEKIFYSKLDDKQNIISNNNIPLPSESDMRDFWTKIWSKDIKHNESTPWIENEELNFSGIEQMSFSNISVELLSKIIKNTHNWKATGCDWIHNFWYKRLTTLHPLLAKNLSKFVSQPQNFPNFLTNGITYMLPKSENINNPSQYRPITCLPTIYKILTSCLTDLIYTHLDEKNILSEQQKGCRRKHMGCKEQLVIDSVILKQIQTRKRNLHTCYIDYQKAFDSVPHSWLIKVLNIYKINPIIISFLENIMSFWNTNLLINLKGKKIVIPGISIKRGIFQGDSLSPLWFCLALNPLSKMLIRSKFGIKVKGNTRESSTISHLLFMDDIKLFSNSEQNLEKMIEVVKNFSDDIKMTFGLDKCRTIHIEKGKIVDGDESIFRNFQITSMKRDEVYKYLGYPQSNRLDHTSIKNDIRIKFQTRIRKILKCNLSAKNLVKAINTWAIPLLTYSFGIIKWSNTDLDNLERLVRTTLTKFNCHHPNSAIERVNLPRNLGGRGIVKITSLKHNQVEMLRTFFHRKAHSSEMHKIICKADRNITPLNLYDENANIFINPNQELLDSWSNKILHAKHFNYLNQTYVDKFSSNKWLSIGELSAEIEGFMLAIQDRVINTKNYRKHIIKDTNQIDDLCRKCLAFPETIEHIISGCSILAPSEYTFRHNQVLKIIHQNLVIKHNLIDCRNIVPYYEYEPNSFLENEFYKIYYDKTILTDRTISHNRPDIVLHDKIKKITYIIDVAIPNSCNIQKSVNEKIRKYTDLGNEIKRIWHSQTIKILPFVISATGIIPSSLIKNLGVLDLSKNLYIKMQKSVILNTCRITKDFLNIYVEGSVGFIGPVSSSTEPNPLI

SEQ ID NO: 801 - protein, 1164 aa, Hesperophylax magnus
MDERCQYVHCSFIFLCNQSRNRYVVIQEKLHLLFSQNYPIAQVSEQRLADQKRAIFKNNLISVVTLEQIKREVADRLQRGNNLEQINTSNNVISDALNVDSLDNILVEMSNDITVDSNNLDVIYNLREINIANLNFVDENVVELANLLHNNIKRYIDVEPTVRPKLPKLHTSKKLSKLIFELNNIILPKIIFDEISFLDLHTIVYASAITVCNKLGIKLSSSDDRSYSYSKPEWQIRLENDVVFLRSNIARVIEYKNGNRSRKILRHVDEIGRKFGYNIDSHNNENIINDLLDLLKQKLGVKASRLKRYNYTYNKKNNNRLFQKNEKIFYSKLDDKQNIISNNNIPLPSESDMRDFWTKIWSKDIKHNDSTSWIENEELNFSGIEQMSFSNISVELLTKIIKNTHNWKATGCDWIHNFWYKRLTTLHPLLAKNLSKFVSQPQNFPNFLTKGITYMLPKSENINNPSQYRPITCLPTIYKILTSCLTDLIYTHLDEKNILSEQQKGCRRKHMGCKEQLVIDSVILKQIQTRKRNLHTCYIDYQKAFDSVPHSWLIKVLNIYKINPIIISFLENIMSFWNTNLLINLKGKKIVIPGISIKRGIFQGDSLSPLWFCLALNPLSKMLIKSKFGIKVKGNTRESSTISHLLYMDDIKLFSNSEQNLEKMIEVVKNFSDDIKMTFGLDKCRTIHIEKGKIVDGDESIFRNFQITSMKRDEVYKYLGYPQSNRLDHTSIKNDIRIKFQTRIRKILKCNLSAKNLVKAINTWAIPLLTYSFGIIKWSNTDLDNLERLIRTTLTKFNCHHPNSAIERVNLPRNLGGRGIVKITSLKHNQVEMLRTFFHRKAHSSEMHKIICKADRNITPLNLYDENANIFINPNQELLDSWSNKILHAKHFNYLNQTYVDKFSSNKWLSIGELSAEIEGFMLAIQDRVINTKNYRKHIIKDTNQIDDLCRKCLAFPETIEHIISGCSILAPSEYTFRHNQVLKIIHQNLVIKHNLIDCRNIVPYYEYEPNSFLENEFYKIYYDKTILTDRTISHNRPNIVLHDKIKKITYIIDVAIPNSCNIQKSVNEKIRKYTDLGNEIKRIWHSQTIKILPFVISATGIIPSSLIKNLGVLDLSKNLYIKMQKSVILNTCRITKDFLNIYVEGSVGFIGPVRSSTEPNPLI

SEQ ID NO: 802 - protein, 1142 aa, Hesperophylax magnus
MLLYRKKLHLLFSQNYPIAQVSEQRLADQKRAIFKNNLISVVTLEQIKREVADRLQRGNNLEQINTSNNVISDALNVDSLDNILVEMSNDITVDSNNLDVIYNLREINIANLNFVDENVVELANLLHNNINRYIDVEPTVRPKLPKLHTSKKLSKLIFELNNIILPKIIFDEISFLDLHAIVYASAITVCNKLGIKLSSSDDRSYSYSKPEWQIRLENDVVFLRSNIARVIEYKNGNRSRKILRHVDEIGRKFGYNIDSHNNENIINDLLDLLKQKLGVKASRLKRYNYTYNKKNNNRLFQKNEKIFYSKLDDKQNIISNNNIPLPSESDMRDFWTKIWSKDIKHNDSTPWIENEELNFSGIEQMSFSNISVELLTKIIKNTHNWKATGCDWIHNFWYKRLTTLHPLLAKNLSKFVSQPQNFPNFLTKGITYMLPKSENINNPSQYRPITCLPTIYKILTSCLTDLIYTHLDEKNILSEQQKGCRRKHMGCKEQLVIDSVILKQIQTRKRNLHTCYIDYQKAFDSVPHSWLIKVLNIYKINPIIISFLENIMSFWNTNLLINLKGKKIVIPGIPIKRGIFQGDSLSPLWFCLALNPLSKMLIKSKFGIKVKGNTRESSTISHLLYMDDIKLFSNSEQNLEKMIEVVKNFSDDIKMTFGLDKCRTIHIEKCKIVDGDESIFRNFQITSMKRDEVYKYLGYPQSNRLDHTSIKNDIRIKFQTRIRKILKCNLSAKNLVKAINTWAIPLLTYSFGIIKWSNTDLDNLERLIRTTLTKFNCHHPNSAIERVNLPRNLGGRGIVKITSLKHNQVEMLRTFFHRKAHSSEMHKIICKADRNITPLNLYDENANIFINPNQELLDSWSNKILHAKHFNYLNQTYVDKFSSNKWLSIGELSAEIEGFMLAIQDRVINTKNYRKHIIKDTNQIDDLCRKCLAFPETIEHIISGCSILAPSEYTFRHNQVLKIIHQNLVIKHNLIDCRNIVPYYEYEPNSFLENEFYKIYYDKTILTDRTISHNRPDIVLHDKIKKITYIIDVAIPNSCNIQKSVNEKIRKYTDLGNEIKRIWHSQTIKILPFVISATGIIPSSLIKNLGVLDLSKNLYIKMQKSVILNTCRITKDFLNIYVEGSVGFIGPVRSSTEPNPLI

SEQ ID NO: 803 - protein, 1095 aa, Hesperophylax magnus
MTTMSFATNVDEQGIIMSSVQMNMDSLRPQKTKAGIPRQRMKWTNDVNMFIVRSYFYVTKVETDMLLYRKKLHLLFSQNYPIAQVSEQRLADQKRAIFKNNLISVVTLEQIKREVADRLQRGNNLEQINTSNNVISDALNVDSLDNILVEMSNDITVDSNNLDVIYNLREINIANLNFVDENVVELANLLHNNINRYIDVEPTVRPKLPKLHTSKKLSKLIFELNNIILPKIIFDEISFLDLHTIVYASAITVCNKLGIKLSSSDDRSYSYSKPEWQIRLENDVVFLRSNIARVIEYKNGNRSRKILRHVDEIGRKFGYNIDSHNNENIINDLLDLLKQKLGVKASRLKRYNYTYNKKNNNRLFQKNEKIFYSKLDDKQNIISNNNIPLPSESDMRDFWTKIWSKDIKHNDSTPWIENEELNFSGIEQMSFSNISVELLTKIIKNTHNWKATGCDWIHNFWYKRLTTLHPLLAKNLSKFVSQPQNFPNFLTKGITYMLPKSENINKPSQYRPIACLPTIYKILTSCLTDLIYTHLDEKNILSEQQKGCRRKHMGCKEQLVIDSVILKQIQTRKRNLHTCYIDYQKAFDSVPHSWLIKVLNIYKINPIIISFLENIMSFWNTNLLINLKGKKIVIPGISIKRGIFQGDSLSPLWFCLALNPLSKMLIKSKFGIKVKSNTRESSTISHLLYMDDIKLFSNSEQNLEKMIEVVKNFSDDIKMTFGLDKCRTIHIEKGKIVDGDESIFRNFQITSMKRDEVYKYLGYPQSNRLDHTSIKNDIRIKFQTRIRKILKCNLSAKNLVKAINTWAIPLLTYSFGIIKWSNTDLDNLERLIRTTLTKFNCHHPNSAIERVNLPRNLGGRGIVKITSLKHNQVEMLRTFFHRKAHSSEMHKIICKADRNITPLNLYDENANIFINPNQELLDSWSNKILHAKHFNYLNQTYVDKFSSNKWLSIGELSAEIEGFMLAIQDRVINTKNYRKHIIKDTNQIDDLCRKCLAFPETIEHIISGCSILAPSEYTFRHNQVLKIIHQNLVIKHNLIDCRNIVPYYEYEPNSFLENEFYKIYYDKTILTDRTISHNRPDIVLHDKIKKNNLYH

SEQ ID NO: 804 - protein, 812 aa, Hesperophylax magnus
MRDFWTKIWSKDIKHNESSPWIENEELNFSGIEQMSFSNISVELLTKIIKNTHNWKATGCDWIHNFWYKRLTTLHPLLAKNLSKFVSQPQNFPNFLTKGITYMLPKSENINNPSQYRPITCLPTIYKILTSCLTDLIYTHLDEKNILSEQQKGCRRKHMGCKEQLVIDSVILKQIQTRKRNLHTCYIDYQKAFDSVPHSWLIKVLNIYKINPIIISFLENIMSFWNTNLLINLKGKKIVIPGISIKRGIFQGDSLSPLWFCLALNPLSKMLIKSKFGIKVKGNIRESSTISHLLYMDDIKLFSNSEQNLEKMIEVVKNFSDDIKMTFGLDKCRTIHIEKGKIVDGDESIFRNFQINSMKRDEVYKYLGYPQSNRLDHSSIKNDIRIKFQTRIRKILKCNLSAKNLVKAINTWAIPLLTYSFGIVKWSNTDLDNLERLIRTTLTNFNCHHPNSAIERVNLPRNLGGRGIIKITSLKHNQVEMLRTFFHRKAHSSEMHKIICKADRNITPLNLYDENANIFINPNQELLDSWSNKILHAKHFNYLNQTYVDKISSNKWLSIGELSAEIEGFMLAIQDRVINTKNYRKHIIKDTNQIDDLCRKCLAFPETIEHIISGCSILAPSEYTFRHNQVLKIIHQNLVIKHNLIDCRNVVPYYEYEPNSFLENEFYKIYYDKTILTDRAISHNRPDIVLHDKIKKITYIIDVAIPNSCNIQKSVSEKIRKYTDLGNEIKRIWHSQTVKILPFVISATGIIPSSLIKNLGVLDLSKKLYIKMQKSVILNTCRITKDFLNVYVEGSVGFIGPVRSSTEPNPLI

SEQ ID NO: 805 - protein, 701 aa, Hesperophylax magnus
MRDFWTKIWSKDIKHNESTPWIENEELNFSGIEQMSFSNISVELLTKIIKNTHNWKATGCDWIHNFWYKRLTTLHPLLAKNLSKFVSQPQNFPNFLTKGITYMLPKSENINNPSQYRPITCLPTIYKILTSCLTDLIYTHLDEKNILSEQQKGCRRKHMGCKEQLVIDSVILKQIQTRKRNLHTCYIDYQKAFDSVPHSWLIKVLNIYKINPIIISFLENIMSFWNTNLLINLKGKKIVIPGISIKRGIFQGDSLSPLWFCLALNPLSKMLIKSKFGIKVKGNTRESSTISHLLFMDDIKLFSNSEQNLEKMIEVVKNFSDDIKMTFGLDKCRTIHIEKGKIVDGDESIFRNFQITSMERDEVCKYLGFPQSNRLDHNSIKNDIRIKFQTRIRKILKCNLSSKNLVKAIDTWAIPLLTYSFGIIKWSNTDLDNLESLIRTTLTKFNCHHPNSAIERVNLPRNLGGRGIVKITSLKHNQVEMLRTFFHRKAHSSEMHKIICKADRNITPLNLYDENANIFINPNQELLDSWSNKILHAKHFNYLNQTYVDKFSSNKWLSIGELSAEIEGFMLAIQDRVINTKNYRKHIIKDTNQIDDLCRKCLAFPETIEHIISGCSILAPSEYTFRHNQVLKIIHQSLVIKHNLIDCRNIIPYYEYEPNSFLENEFYKIYYDKTILTDRTISHNRPDIVLHDKIKKNNLYH

SEQ ID NO: 806 - protein, 701 aa, Hesperophylax magnus
MRDFWTKIWSKDIKHNESTPWIENEELNFSGIEQMSFSNISVELLSKIIKNTHNWKATGCDWIHNFWYKRLTTLHPLLAKNLSKFVSQPQNFPNFLTKGITYMLPKSENINNPSHYRPITCLPTIYKILTSCLTDLIYTHLDEKNILSEQQKGCRRKHMGCKEQLVIDSVILKQIQTRKRNLHTCYIDYQKAFDSVPHSWLIKVLDIYKINPIIISFLENIMSFWNTNLLINLKGKKIVIPGISIKRGIFQGDSLSPLWFCLALNPLSKMLIRSKFGIKVKGNTRESSTISHLLFMDDIKLFSNSEQNLEKMIEVVKNFSDDIKMTFGLDKCRTIHIEKGKIVDGDESIFRNFQITSMKRDEVYKYLGYPQSNRLDHTSIKNDIRIKFQTRIRKILKCNLSAKNLVKAINTWAIPLLTYSFGIIKWSNTDLDNLGRLVRTTLTKFNCHHPNSAIERVNLPRNLGGRGIVKITSLKHNQVEMLRTFFHRKAHSSEMHKIICKADRNITPLNLYDENANIFINPNQELLDSWSNKILHAKHFNYLNQTYVDKFSSNKWLSIGELSAEIEGFMLAIQDRVINTKNYRKHIIKDTNQIDDLCRKCLAFPETIEHIISGCSILAPSEYTFRHNQVLKIIHQNLVIKHNLIDCRNIVPYYEYEPNSFLENEFYKIYYDKTILTDRTISHNRPDIVLHDKIKKNNLYH

SEQ ID NO: 807 - protein, 1070 aa, Hesperophylax magnus
MDERCQYVHCSFIFLCNQSRNRYVVIQEKLHLLFSQNYPIAQVSEQRLADQKRAIFKNNLISVVTLEQIKREVADRLQRGNNLEQINTSNNVISDALNVYSLDNILVEMSNDITVDSNNLAVIYNLREINIENLNFVDENVVELANLLHNNINRYIDVEPTVRPKLPKLHKSKKLSKLIFELNNIILPKIIFDEISFLDLHTIVYASAITVCNKLGIKLSSSDDRSYSYSKPEWQIRLENDVVFLRSNIARVIEYKNGNRSRKILRHVDEIGRKFGYNIDSYNNENIINDLLDLLKQKLGVKASRLKRYNYTYNKKNNNRLFQKNEKIFYSKLDDKQNIISNNNIPLPSESDMRDFWTKIWSKDIKHNESTPWIENEELNFSGIEQMSFSNISVELLSKIIKNTHNWKATGCDWIHNFWYKRLTTLHPLLAKNLSKFVSQPQNFPNFLTKGITYMLPKSENINNPSQYRPITCLPTIYKILTSCLTDLIYTHLDEKNILSEQQKGCRRKHMGCKEQLVIDSVILKQIQTRKRNLHTCYIDYQKAFDSVPHSWLIKVLNIYKINPIIISFLENIMSFWNTNLLINLKGKKIVIPGISIKRGIFQGDSLSPLWFCLALNPLSKMLIRSKFGIKVKGNTRESSTISHLLFMDDIKLFSNSEQNLEKMIEVVKNFSDDIKMTFGLDKCRTIHIEKGKIVDGDESIFRNFQITSMKRDEVYKYLGYPQSNRLDHTSIKNDIRIKFQTRIRKILKCNLSAKNLVKAINTWAIPLLTYSFGIIKWSNTDLDNLERLVRTTLTKFNCHHPNSAIERVNLPRNLGGRGIVKITSLKHNQVEMLRTFFHRKAHSSEMHKIICKADRNITPLNLYDENANIFINPNQELLDSWSNKILHAKHFNYLNQTYVDKFSSNKWLSIGELSAEIEGFMLAIQDRVINTKNYRKHIIKVTNQIDDLCRKCLAFPETIEHIISGCSILAPSEYTFRHNQVLKIIHQNLVIKHNLIDCRNVVPYYEYEPNSFLENEFYKIYYDKTILTDRTISHNRPDIVLHDKIKKITYIIDVAIPNSCNIQNLLMKK

SEQ ID NO: 808 - protein, 812 aa, Hesperophylax magnus
MRDFWTKIWSKDIKQNESTPWIENEELNFSGIEQMSFSNISVELLSKIIKNTHNWKATGCDWIHNFWYKRLTTLHPLLAKNLSKFVSQPQNFPNFLTKGITYMLPKSENINNPSQYRPITCLPTIYKILTSCLTDLIYTHLDEKNILSEQQKGCRRKHMGCKEQLVIDSVILKQIQTRKRNLHTCYIDYQKAFDSVPHSWLIKVLNIYKINPIIISFLENIMSFWNTNLLINLKGKKIVITGISIKRGIFQGDSLSPLWFCLALNPLSKILIRSKFGIKVKGNTRESSTISHLLFMDDIKLFSNSEQNLEKMIEVVKNFSDDIKMTFGLDKCRTIHIEKGKIVDGDESIFRNFQITSMKRDEVYKYLGYPQSNRLDHTSIKNDIRIKFQTRIRKILKCNLSAKNLVKAINTWAIPLLTYSFGIIKWSNTDLDNLERLIRTTLTKFNCHHPNSAIERVNLPRNLGGRGIVKITSLKHNQVEMLRTFFHRKAHSSEMHKIICKADRNITPLNLYDENANIFINPNQELLDSWSNKILHAKHFNYLNQTYVDKFSSNKWLSIGELSAEIEGFMLAIQDRVINTKNYRKHIIKDTNQIDDLCRKFLAFPETIENIISGCSILAPSEYTFRHNQVLKIIHQNLVIKHNLIDCRNIVPYYEYEPNSFLENEFYKIYYDKTILTDRTISHNRPDIVLHDKIKKITYIIDVAIPNSCNIQKSVNEKIRKYTDLGNEIKRIWHSQTIKILPFVISATGIIPSSLIKNLGVLDLSKKLYIKMQKSVILNTCRITKDFLNIYVEGSVGFIGPVRSSTEPNPLI

SEQ ID NO: 809 - protein, 1206 aa, Hesperophylax magnus
MTTMSFATNVDEQGIIMSSVQMNMDSLRPQKTKAGIPRQRMKWTNDVNMFIVRSYFYVTKVETDMLLYRKKLHLLFSQNYPIAQVSEQRLADQKRAIFKNNLISVVTLEQIKREVADRLQRGNNLEKINTSNNVISDTLNVDSLDNILVEMSNDITVDSNNLAVIYNLREINIANLNFVDENVVELANLLHNNINRYIDVEPTVRPKLPKLHTSKKLSKLIFELNNIILPKIIFDEISFLDLHTIVYASAITVCNKLGIKLSSSDDRSYSYSKPEWQIRLENDVVFLRSNIARVIEYKNGNRSRKILRHVDEIGRKFGYNIDSYNNENIINDLLDLLKQKLGVKASRLKRYNYTYNKKNNNRLFQKNEKIFYSKLDDKQNIISNNNIPLPSESDMRDFWTKIWSKDIKHNESTPWIENEELNFSGIEQMSFSNISVELLSKIIKNTHNWKATGCDWIHNFWYKRLTTLHPLLAKNLSKFVSQPQNFPNFLTKGITYMLPKSENINNPSQYRPITCLPTIYKILTSCLTDLIYTHLDEKNILSEQQKGCRRKHMGCKEQLVIDSVILKQIQTRKRNLHTCYIDYQKAFDSVPHSWLIKVLNIYKINPIIISFLENIMSFWNTNLLINLKGKKIVIPGISIKRGIFQGDSLSPLWFCLALNPLSKMLIRSKFGIKVKGNTRESSTISHLLFMDDIKLFSNSEQNLEKMIEVVKNFSDDIKMTFGLDKCRTIHIEKGKIVDGDESIFRNFQITSMKRDEVYKYLGYPQSNRLDHTSIKNDIRIKFQTRIRKILKCNLSAKNLVKAINTWAIPLLTYSFGIIKWSNTDLDNLERLVRTTLTKFNCHHPNSAIERVNLPRNLGGRGIVKITSLKHSQVEMLRTFFHRKAHSSEMHKIICKADRNITPLNLYDENANIFINPNQELLDSWSNKILHAKHFNYLNQTYVDKFSSNKWLSIGELSAEIEGFMLAIQDRVINTKNYRKHIIKDTNQIDDLCRKCLAFPETIEHIISGCSILAPSEYTFRHNQVLKIIHQSLVIKHNLIDCRNVVPYYEYEPNSFLENEFYKIYYDKTILTDRTISHNRPDIVLHDKIKKITYIIDVAIPNSCNIQKSVNEKIRKYTDLGNEIKRIWHSQTIKILPFVISATGIIPSSLIKNLGVLDLSKNLYIKMQKSVILNTCRITKDFLNIYVEGSVGFIGPVRSSTEPNPLI

SEQ ID NO: 810 - protein, 1206 aa, Hesperophylax magnus
MTTMSFATNVDEQGIIMSSVQMNMDSLRPQKTKAGIPRQRMKWTNDVNMFIVRSYFYVTKVETDMLLYRKKLHLLFSQNYPIAQVSEQRLADQKRAIFKNNLISVVTLEQIKREVADRLQRGNNLEQINTSNNFISHALNVDSLDNILVEISNDITVDSNNLDVIYNLREINIANLNFVDENVVELANLLHNNINRYIDVEPTVRPKLPKLHTSKKLSKLIFELNNIILPKIIFDEISFLDLHTIVYASAITVCNKLGIKLSSSDDRSYSYSIPEWQIRLENDVVFLRSNIARVIEYKNGNRSRKILRHVDEIGKKFGYNIDSHNNENIINDLLDLLKQKLGVKASRLKRYNYTYNKKHNNRLFQKNEKIFYSKLDDKQNIISNNNIPLPSESDMRDFWTKIWSKDIKHNDSTPWIENEELNFSGIEQMSFSNISVELLTKIIKNTHNWKATGCDWIHNFWYKRLTTLHPLLAKNLSKFVSQPQNFPNFLTKGITYMLPKSENINNPSQYRPITCLPTIYKILTSCLTDLIYTHLDEKNILSEQQKGCRRKHMGCKEQLVIDSVILKQIQTRKRNLHTCYIDYQKAFDSVPHSWLIKVLNIYKINPIIISFLENIMSFWNTNLLINLKGKKIVIPGISIKRGIFQGDSLSPLWFCLALNPLSKMLIKSKFGIKVKGNTRESSTISHLLYMDDIKLFSNSEQNLEKMIEVVKNFSDDIKMTFGLDKCRTIHIEKGKIVDGDESIFRNFQITSMKRDEVYKYLGYPQSNRLDHTSIKNDIRIKFQTRIRKILKCNLSAKNLVKAINTWAIPLLTYSFGIIKWSNTDLDNLERLIRTTLTKFNCHHPNSAIERVNLPRNLGGRGIVKITSLKHNQVEMLRTFFHRKAHSSEMHKIICKADRNITPLNLYDENANIFINPNQELLDSWSNKILHAKHFNYLNQTYVDKFSSNKWLSIGELSAEIEGFMLAIQDRVINTKNYRKHIIKDTNQIDDLCRKCLAFPETIEHIISGCSILAPSEYTFRHNQVLKIIHQNLVIKHNLIDCRNIVPYYEYEPNSFLENEFYKIYYDKTILTDRTISHNRPDIVLHDKIKKITYIIDVAIPNSCNIQKSVNEKIRKYTDLGNEIKRIWHSQTIKILPFVISATGIIPSSLIKNLGVLDLSKNLYIKMQKSVILNTCRITKDFLNIYVEGSVGFIGPVRSSTEPNPLI

SEQ ID NO: 811 - protein, 1095 aa, Hesperophylax magnus
MTTMSFATNVDEQGIIMSSVQMNMDSLRPQKTKAGIPRQRMKWTNDVNMFIVRSYFYVTKVETDMLLYRKKLHLLFSQNYPIAQVSEQRLADQKRAIIKNNLISVVTLEHIKREVADRLQRGNNLEQINTSNNVISDALNVDSLDNILVEMSNDITVDSNNLDVIYNLREINIANLNFVDENVVELANLLHNNINRYIDVEPTVRPKLPKLHTSKKLSKLIFELNNIILPKIIFDEISFLDLHTIVYASAITVCNKLGIKLSSSDDRSYSYSKPEWQIRLENDVVFLRSNIARVIEYKNGNRSRKILRHVDEIGRKFGYNIESHNNENIINDLLDLLKQKLGVKASRLKRYNYTYNKKNNNRLFQKNEKIFYSKLDDKQNIISNNNIPLPSESDMRDFWTKLWSKDIKHNDSTPWIENEELNFSGIEQMSFSNISVELLTKIIKNTHNWKATGCDWIHNFWYKRLTTLHPLLAKNLSKFVSQPQNFPNFLTKGITYMLPKSENINNPSQYRPITCLPTIYKILTSCLTDLIYTHLDEKNILSEQQKGCRRKHMGCKEQLVIDSVILKQIQTRKRNLHTCYIDYQKAFDSVPHSWLIKVLNIYKINPIIISFLENIMSFWNTNLLINLKGKKIVIPGISIKRGIFQGDSLSPLWFCLALNPLSKMLIKSKFGIKVKGNTRESSTISHILYMDDIKLFSKSEQNLEKMIEVVKNFSDDIKMTFGLDKCRTIHIEKGKIVDGDESIFRNFQITSMKRDEVYKYLGYPQSNRLDHTSIKNDTRIKFQTRIRKILKCNLSAKNLVKAINTWAIPLLTYSFGIIKWSNTDLDNLERLIRTTLTKFNCHHPNSAIERVNLPRNLGGRGIVKINSLKNNQVEMLRTFFHRKAHSSEMHKIICKADRNITPLNLYDENANIFINPNQELLDSWSNKILHAKHFNYLNQTYVDKFSSNKWLSIGELSAEIEGFMLAIQDRVINTKNYRKHIIKDTNQIDDLCRKCLAFPETIEHIISGCSILAPSEYTFRHNQVLKIIHQNLVIKHNLIDCRNIVPYYEYEPNSFLENEFYKIYYDKTILTDRTISHNRPDIVLHDKIKKNNLYH

SEQ ID NO: 812 - protein, 1158 aa, Hesperophylax magnus
MFIVRSYFYVTKVETDMLLYRKKLHLLFSQNYPIAQVSEQRLADQKRAIFKNNLISVVTLEQIKREVADRLQRGNNLEQINTSNNVISDALNVDSLDNILVEMSNDITVDSNNLDVIYNLREINIANLNFVDENVVELANLLYNNINRYIDVEPTVRPKLPKLHTSKKLSKLIFELNNIILPKIIFDEISFLDLHTIVYASAITACNKLGIKLSSSDDRSYSYSKPEWQIRLENDVVFLRSNIARVIEYKNGNRSRKILRHVDEIGRKFGYNIDSHNNENIINDLLDLLKQKLGVKASRLKRYNYTYNKKNNNRLFQKNEKIFYSKLDDKQNIISNNNIPLPSESDMRDFWTKIWSKDIKHNDSTPWIENEELNFSGIEQMSFSNISVELLTKIIKNTHNWKATGCDWIHNFWYKRLTTLHPLLAKNLSKFVSQPQNFPNFLTKGITYMLPKSENINNPSQYRPITCLPTIYKILTSCLTDLIYTHLDEKNILSEQQKGCRRKHMGCKEQLVIDSVILKQIQTRKRNLHTCYIDYQKAFDSVPHSWLIKVLNIYKINPIIISFLENIMSFWNTNLLINLKGKKIVIPGISIKRGIFQGDSLSPLWFCLALNPLSKMLIKSKFGIKVKGNTRESSTISHLLYMDDIKLFSNSEQNLEKMIEVVKNFSDDIKMTFGLDKCRTIHIEKGKIVDGDESIFRNFQITSMKRDEVYKYLGYPQSNRLDHTSIKNDIRIKFQTRIRKILKCNLSAKNLVKAINTWAIPLLTYSFGIIKWSNTDLDNLERLIRTTLTKFNCHHPNSAIERVNLPRNLGGRGIVKITSLKHNQVEMLRTFFHRKTHSSEMHKIICKADRNITPLNLYDENANIFINPNQELLDSWSNKILHAKHFNYLNQTYVDKFSSNKWLSIGELSAEIEGFMLAIQDRVINTKNYRKHIIKDTNQIDDLCRKCLAFPETIEHIISGCSILAPSEYTFRHNQVLKIIHQNLVIKHNLIDCRNIVPYYEYEPNSFLENEFYKIYYDKTILTDRTISHNRPDIVLHDKIKKITYIIDVAIPNSCNIQKSVNEKIRKYTDLGNEIKRIWHSQTIKILPFVISATGIIPSSLIKNLGVLDLSKNLYIKMQKSVILNTCRITKDFLNIYVEGSVGFIGPVRSSTEPNPLI

SEQ ID NO: 813 - protein, 812 aa, Hesperophylax magnus
MRDFWTKIWSKDIKHNESTPWIENEELNFSGIEQMSFSNISVELLSKIIKNTHNWKATGCDWIHNFWYKRLTTLHPLLAKNLSKFVSQPQNFPNFLTKGITYMLPKSENINNPSQYRPITCLPTIYKILTSCLTDLIYTHLDEKNILSEQQKGCRRKHMGCKEQLVIDSVILKQIQTRKRNLHTCYIDYQKAFDSVPHSWLIKVLNIYKINPIIISFLENIMSFWNTNLLINLKGKKIVIPGISIKRGIFQGDSLSPLWFCLALNPLSKMLIRSKFGIKVKGNTRESSTISHLLFMDDIKLFSNSEQNLEKMIEVVKNFSDDIKMTFGLDKCRTIHIEKGKIVDGDESIFRNFQITSMKRDEVYKYLGYPQSNRLDHNSIKNDIRIKFQTRIRKILKCNLSAKNLVKAINTWAIPLLTYSFGIIKWSNTDLDNLERLVRTTLTKFNCHHPNSAIERVNLPRNLGGRGIVKITSLKHNQVEMLRTFFHRKAHSSEMHKIICKADRNITPLNLYDENANIFINPNQELLDSWSNKILHAKHFNYLNQTYVDKFSSNKWLSIGELSAEIEGFMLAIQDRVINTKNYRKHIIKDTNQIDDLCRKCLAFPETIEHIISGCSILAPSEYTFRHNQVLKIIHQNLVIKHNLIDCRNIVPYYEYEPNSFLENEFYKIYYDKTILTDRTISHNRPDIVLHDKIKKITYIIDVAIPNSCNIQKSVNEKIRKYTDLGNEIKRIWHSQTIKILPFVISATGIIPSSLIKNLGVLDLSKNLYIKMQKSVILNTCRITKDFLNIYVEGSVGFIGPVRSSTEPNPLI

SEQ ID NO: 814 - protein, 1053 aa, Hesperophylax magnus
MKWTNDVNMFIVRSYFYVTKVETDMLLYRKKLHLLFSQNYPIAQVSEQRLADQKRAIFKNNLISVVTLEQIKREVADRLQRGNNLEQINTSNNVISDALNVDSLDNILVEMSNDITVDSNNLDVIYNLREINIANLNFVDENVVELANLLKPEWQIRLENDVVFLRSNIARVIEYKNGNRSRKILRHVDEIGRKFGYNIDSHNNENIINDLLDLLKQKLGVKASRLKRYNYTYNKKNNNRLFQKNEKIFYSKLDDKQNIISNNNIPLPSESDMRDFWTKIWSKDIKHNDSTPWIENEELNFSGIEQMSFSNISVELLTKIIKNTHNWKATGCDWIHNFWYKRLTTLHPLLAKNLSKFVSQPQNFPNFLTKGITYMLPKSENINNPSQYRPITCLPTIYKILTSCLTDLIYTHLDEKNILSEQQKGCRRKHMGCKEQLVIDSVILKQIQTRKRNLHTCYIDYQKAFDSVPHSWLIKVLNIYKINPIIISFLENIMSFWNTNLLINLKGKKIVIPGISIKRGIFQGDSLSPLWFCLALNPLSKMLIKSKFGIKVKGNTRESSTISHLLYMDDIKLFSNSEQNLEKMIEVVKNFSDDIKMTFGLDKCRTIHIEKGKIVDGDESIFRNFQITSMKRDEVYKYLGYPQSNRLDHTSIKNDIRIKFQTRIRKILKCNLSAKNLVKAINTWAIPLLTYSFGIIKWSNTDLDNLERLIRTTLTKFNFHHPNSAIERVNLPRNLGGRGIVKINSLKNNQVEMLRTFFHRKAHSSEMHKIICKADRNITPLNLYDENANIFINPNQELLDSWSNKILHAKHFNYLNQTYVDKFSSNKWLSIGELSAEIEGFMLAIQDRVINTKNYRKHIIKDTNQIDDLCRKCLAFPETIEHIISGCSILAPSEYTFRHNQVLKIIHQNLVIKHNLIDCRNIVPYYEYEPNSFLENEFYKIYYDKTILTDRTISHNRPDIVLHDKIKKITYIIDVAIPNSCNIQKSVNEKIRKYTDLGNEIKRIWHSQTIKILPFVISATGIIPSSLIKNLGVLDLSKKFIYKDAKVGHFEYM

SEQ ID NO: 815 - protein, 812 aa, Hesperophylax magnus
MRDFWTKIWSKDIKHNDSTPWIENEELNFSGIEQMSFSNISVELLTKIIKNTHNWKATGCDWIHNFWYKRLTTLHPLLAKNLSKFVSQPQNFPNFLTKGITYMLPKSENINNPSKYRPITCLPTIYKILTSCLTDLIYTHLDEKNILSEQQKGCRRKHMGCKEQLVIDSVILKQIQTRKRNLHTCYIDYQKAFDSVPHSWLIKVLNIYKINPIIISFLENIMSFWNTNLLINLKGKKIVIPGISIKRGIFQGDSLSPLWFCLALNPLSKMLIKSKFGIKVKGNTRESSTISHLLYMDDIKLFSNSEQNLEKMIEVVKNFSDDIKMTFGLDKCRTIHIEKGKIVDGDESIFRNFQITSMKRDELYKYLGYPQSNRLDHTSIKNDIRIKFQTRIRKILKCNLSAKNLVKAINTWAIPLFTYSFGIIKWSNTDLDNLERLIRITLTKFNCHHPNSAIERVNLPRNLGGRGIVKINSLKNNQVEMLRTFFHRKAHSSEMHKIICKADRNITPLNLYDENANIFINPNQELLDSWSNKILHAKHFNYLNQTYVDKFSSNKWLSIGELSAEIEGFMFAIQDRVINTKNYRKHIIKDTNQIDDLCRKCLAFPETIEHIISGCSILAPSEYTFRHNQVLKIIHQNLVIKHNLIDCRNIVPYYEYEPNSFLENEFYKIYYDKTILTDRTISHNRPDIVLHDKIKKITYIIDVAIPNSCNIQKSVNEKIRKYTDLGNEIKRIWHSQTIKILPFVISATGIIPSSLIKNLGVLDLSKNLYIKMQKSVILNTCRITKDFLNIYVEGSVGFIGPVRSSTEPNPLI

SEQ ID NO: 816 - protein, 1166 aa, Hesperophylax magnus
MKWTNDVNMFIVRSYFYVTKVETDMLLYRKKLHLLFSQNYPIAQVSQQRLADQKRAIFKNNLISVVTLEQIKREVADRLQRGNNLEQINTSNNVISDALNVDSLDNILVEISNDITVDSNNLAVIYNLREINIANLNFVDENVVELANLLHNNINRYIDVEPTVRPKLPKLHTSKKLSKLIFELNNIILPKIIFDKISFLDLHTIVYASAITVCNKLGIKLSSSDDRSYSYSKPEWQIRLENDVVFLRSNIARVIEYKNGNRSRKILRHVDEIGRKFGYNIDSHNNENIINDLLDLLKQKLGVKASRLKRYNYTYNKKNNNRLFQKNEKIFYSKLDDKQNIISNNNIPLPSESDMRDFWTKIWSKDIKHNESTPWIENEELNFSGIEQMSFSNISVELLSKIIKNTHNWKATGCDWIHNFWYKRLTTLHPLLAKNLSKFVSQPQNFPNFLTKGITYMLPKSENINNPSQYRPITCLPTIYKILTSYLTDLIYTHLDEKNILSEQQKGCRRKHMGCKEQLVIDSVILKQIQTRKRNLHTCYIDYQKAFDSVPHSWLIKVLNIYKINPIIISFLENIMTFWNTNLLINLKGKKIVIPGISIKRGIFQGDSLSPLWFCLALNPLSKMLIRSKFGIKVKGNTRESSTISHLLFMDDIKLFSNSEQNLEKMIEVVKNFSDDIKMTFGLDKCRTIHIEKGKIVDGDESIFRNFQITSMKRDEVYKYLGYPQSNRLDHTSIKNDIRIKFQTRIRKILKCNLSAKNLVKAINTWAIPLLTYSFGIIKWSNTDLDNLERLIRTTLTKFNCHHPNSAIERVNLPRNLGGRGIVKITSLKHNQVEMLRTFFHRKAHSSEMHKIICKADRNITPLNLYDENANIFINPNQELLDSWSNKILHAKHFNYLNQTYVDKFSSNKWLSIGELSAEIEGFMLAIQDRVINTKNYRKHIIKDTNQIDDLCRKCLAFPETIEHIISGCSILAPSEYTFRHNQVLKIIHQNLVIKHNLIDCRNIVPYYEYEPNSFLENEFYKIYYDKTILTDRTISHNRPDIVLHDKIKKITYIIDVAIPNSCNIQKSVNEKIRKYTDLGNEIKRIWHSQTIKILPFVISATGIIPSSLIKNLGVLDLSKNLYIKMQKSVILNTCRITKDFLNIYVEGSVGFIGPVRSSTEPNPLI

SEQ ID NO: 817 - protein, 813 aa, Hesperophylax magnus
MRDFWTKIWSKDIKHNESTPWIENEELNFSGIEQMSFSNISVELLTKIIKNTHNWKATGCDWIHNFWYKRLTTLHPLLAKNLSKFVSQPQNFPNFLTKGITYMLPKSENINNPFQYRPITCLPTIYKILTSCLTDLIYTHLDEKNILSEQQKGCRRKHMGCKEQLVIDSVILKQIQTRKRNLHTCYIDNQKAFDSVPHSLLIKILNIYKINPIIINFLENIMSFWNTNLLINLKGKKIVIPGISIKKGIFQGDSLSPLWFCLALNPLSKMLIKSKFGIKVKGNTGESSTISHLLFMDDIKLFSNSEQNLEKMIEVVKNFSDDIKMTFGLDKCRTIHIEKGKIVDGDESIFRNFQITSMKRDEVYKYLGYPQSNRLDHTSIKNDIRIKFQTRIRKILKCNLSAKNLVKAINTWAIPLLTYSFGIIKWSNTDLDNLERLIRTTLTKFNCHHPNSAIERVNLPRNLEGRGIVKITSLKHNQVEMLRTFFHRKAHSSEMHKIICTADRNITPLNLYDENANIFINPNQELLDSWSNKILHAKHFYYYLNQTYVDKFSSNKWLSIGELSAEIEGFMLAIQDRVINTKNYRKHIIKDTNQIDDLCRKCLAFPETIEHIISGCSILAPSEYTFRHNQVLKIIHQNLVIKHNLIDCRNIVPYYEYEPNSFLENEFYKIYYDKTILTDRTISHNRPDIVLHDKIKKITYIIDVAIPNSCNIQKSVNEKIRKYTDLGNEIKRIWHSQTIKILPFVISATGIIPSSLIKNLGVLDLSKNLYIKMQKSVILNTCRITKDFLNIYVEGSVGFIGPVRSSTEPNPLI

SEQ ID NO: 818 - protein, 1206 aa, Hesperophylax magnus
MTMSFATNVDEQGIIMSSVQMNMDSLRPQKTKAGIPRQRMKWTNDVNMFIVRSYFYVTKVETDMLLYRKKLHLLFSQNYPIAQVSEQRLADQKRAIFKNNLISVVTLEQIKREVADRLQRGNNLEQINTSNNVISDALNVDSLDNILVEMSNDITVDSNNLDVIYNLREINIANLNFVDENIVELANLLHNNINRYIDVEPTVRPKLPKLHTSKKLSKLIFELNNIILPKIIFDEISFLDLHTIVYASAITVCNKLGIKLSSSDDRSYSYSKPEWQIRLENDVVFLRSNIARVIEYKNGNRSRKILRHVDEIGRKFGYNIDSHNNENIINDLLDLLQQKLGVKASRLKRYNYTYNKKNNNRLFQKNVKIFYSKLDDKQNIISNNNIPLPSESDMRDFWTKIWSKDIKHNESTPWIENEELNFSGIEQMSFSNISVELLTKIIKNTHNWKATGCDWIHNFWYKRLTTLHPLLAKNLSKFVSQPQNFPNFLTKGITYMLPKSENINNPSQYRPITCLPTIYKILTSCLTDLIYTHLDEKNILSEQQKGCRRKHMGCKEQLVIDSVILKQIQTRKRNLHTCYIDNQKAFDSVPHSLLIKILNIYKINPIIINFLENIMSFWNTNLLINLKGKKIVIPGISIKKGIFQGDSLSPLWFCLALNPLSKMLIKSKFGIKVKGNTGESSTISHLLFMDDIKLFSNSEQNLEKMIEVVKNFSDDIKMTFGLDKCRTIHIEKGKIVDGDESIFRNFQITSMKRDEVYKYLGYPQSNRLDHTSIKNDIRIKFQTRIRKILKCNLSAKNLVKAINTWAIPLLTYSFGIIKWSNTDLDNLERLIRTTLTKFNCHHPNSAIERVNLPRNLEGRGIVKITSLKHNQVEMLRTFFHRKAHSSEMHKIICTADRNITPLNLYDENANIFINPNQELLDSWSNKILHAKHFYYYLNQTYVDKFSSNKWLSIGELSAEIEGFMLAIQDRVINTKNYRKHIIKDTNQIDDLCRKCLAFPETIEHIISGCSILAPSEYTFRHNQVLKIIHQNLVIKHNLIDCRNIVPYYEYEPNSFLENEFYKIYYDKTILTDRTISHNRPDIVLHDKIKKITYIIDVAIPNSCNIQKSVNEKIRKYTDLGNEIKRIWHSQTIKILPFVISATGIIPSSLIKNLGVLDLSKNLYIKMQKSVILNTCRITKDFLNIYVEGSVGFIGPVRSSTEPNPLI

SEQ ID NO: 819 - protein, 1207 aa, Hesperophylax magnus
MTTMSFATNVDEQGIIMSSVQMNMDSLRPQKTKAGIPRQRMKWTNDVNMFIVRSYFYVTKVETDMLLYRKKLHLLFSQNYPIAQVSEQRLADQKRAIFKNNLISVVTLEQIKREVADRLQRGNNLEQINTSNNVISDALNVDSLDNILVEMSNDITVDSNNLDVIYNLREINIANLNFVDENIVELANLLHNNINRYIDVEPTVRPKLPKLHTSKKLSKLIFELNNIILPKIIFDEISFLDLHTIVYASAITVCNKLGIKLSSSDDRSYSYSKPEWQIRLENDVVFLRSNIARVIEYKNGNRSRKILRHVDEIGRKFGYNIDSHNNENIINDLLDLLKQKLGVKASRLKRYNYTYNKKNNNRLFQKNVKIFYSKLDDKQNIISNNNIPLPSESDMRDFWTKIWSKDIKHNESTPWIENEELNFSGIEQMSFSNISVELLTKIIKNTHNWKATGCDWIHNFWYKRLTTLHPLLAKNLSKFVSQPQNFPNFLTKGITYMLPKSENINNPSQYRPITCLPTIYKILTSCLTDLIYTHLDEKNILSEQQKGCRRKHMGCKEQLVIDSVILKQIQTRKRNLHTCYIDNQKAFDSVPHSLLIKILNIYKINPIIINFLENIMSFWNTNLLINLKGKKIVIPGISIKKGIFQGDSLSPLWFCLALNPLSKMLIKSKFGIKVKGNTGESSTISHLLFMDDIKLFSNSEQNLEKMIEVVKNFSDDIKMTFGLDKCRTIHIEKGKIVDGDESIFRNFQITSMKRDEVYKYLGYPQSNRLDHTSIKNDIRIKFQTRIRKILKCNLSAKNLVKAINTWAIPLLTYSFGIIKWSNTDLDNLERLIRTTLTKFNCHHPNSAIERVNLPRNLEGRGIVKITSLKHNQVEMLRTFFHRKAHSSEMHKIICTADRNITPLNLYDENANIFINPNQELLDSWSNKILHAKHFYYYLNQTYVDKFSSNKWLSIGELSAEIEGFMLAIQDRVINTKNYRKHIIKDTNQIDDLCRKCLAFPETIEHIISGCSILAPSEYTFRHNQVLKIIHQNLVIKHNLIDCRNIVPYYEYEPNSFLENEFYKIYYDKTILTDRTISHNRPDIVLHDKIKKITYIIDVAIPNSCNIQKSVNEKIRKYTDLGNEIKRIWHSQTIKILPFVISATGIIPSSLIKNLGVLDLSKNLYIKMQKSVILNTCRITKDFLNIYVEGSVGFIGPVRSSTEPNPLI

SEQ ID NO: 820 - protein, 1218 aa, Pterostichus madidus
MVLTRKQKARCTEGAHLPSYEDVANPLYSNNGRINTDNDNGNEIRNEAQNTRMATLQYEEGHHNELTQRGPSQTEASTSGSNSTKQKQPWSKEELIELMWCHYYVKLTGKHYKDTLKIWRERNPNSRPNLTANTIQNQRRFIEQNNKVAAEEVQEIINNIKITLNKNMQAEHPQTQEDQTRAQVQLQVQQEEQLTNNEHTEIIDGDRLELRIDEKINKYLEIPFEQRPKLPKLKPNPNINKHLKEGNLALLNLLIEKDSTNMLLINTTIYCTAYVLTEIINNITIEDAEAKQIRGHRKLGWQRRIQTKVDKLRADLSKLTEVEKGNKLRSSKCRRYIEETYLTDKTKNIKEVIEQLKQRVMATAQRLRRYKIRQQQFLDNRLYTQNSKMFYRKLREDKVLNQEGPEINQIEEYWKGIYENRVEHKKDASWLKQLQNETTLNMKWEKITVEEVTKIIKKTNNWKAAGIDNIPNYWLKNLTTAHEYIATSYNKLVEDPQKIPEWLAAGKTYLLPKDGNLKDPKNYRPITCLNTMYKILTAVISNRISLHLEEHNIIPAEQRGCAKGYQGCRDHLIYAKALTEDCKKHKKNLNLAWIDYQKAYDSVPHSWLLEILRMNGISDTIISLIQNLMLTWRTTMHIRIASDFLQTKEININRGIYQGDSLSPLLFCLALAPLSKLIRKASIGYKLKEASTPITHQLYMDDLKLTCKSETELRKVLQVVREFSEDIKMKFGLNKCATATFQRGRLIWTENIKINEDENIQSLNPGKTYKYLGVEEGDGIDHAGMKIKIKKEYISRIRKIMKTELTCKNKFQAIGTLAVPVIRYSLGIVDWTLEEIKQLDRKTRKILTMNGQLHPREDIERLYTPRRMGGRGLQQLEGVFYTTMYSMSYYIRQKAPQDLILRNIKAYDDHLHPNKSIQKKAKKIESKIYSSVQRTGGNIDEVEENNVRTPYNFKKQIIKRTYESYRNKPMHGQKVRNMEKIAFDPIESYKWLTQGRTKGETESLLVATQEQAITTRYIATKIHGTGNNKRCRICKKEDETIHHIISGCEELAKIEYIRRHNKVCNQIHFNLCRHYKCPVTTDKWYNHQPDKVSISEDNKTTILYDTPIQTDRTILANRPDIIVRTRDRTYIIEISIPADENIISKDANKQLKYKDISIEINRMWRTKTEIIPIIIGATGYVDHEFKANVEKLPGQHISSELQRTALYGTAHIIRKVLS

SEQ ID NO: 821 - protein, 1166 aa, Pterostichus madidus
MATLQYEEGHHNELTQRGPSQTEASTSGSNSTKQKQPWSKEELIELMWCHYYVKLTGKHYKDTLKIWRERNPNSRPNLTANTIQNQRRFIEQNNKVAAEEVQEIINNIKITLNKNMQAEHLQTQEDQTRAQVQLQVQQEEQLTNNEHTEIIDGDRLELRIDEKINKYLEIPLEQRPKLPKLKPNPNINKHLKEGNLALLNLLIEKDSTNMLLINTTIYCTAYVLTEIINNITIEDAEAKQIRGHRKLGWQRRIQTKVDKLRADLSKLTEVEKGNKLRSSKYRRYIEETYLTDKTKNIKEVIEQLKQRVMATAQRLRRYKIRQQQFLDNRLYTQNSKMFYRKLREDKVLNQEGPEINQIEEYWKGIYENRVEHKKDASWLKQLQNETTLNMKWEKITVEEVTKIIKKTNNWKAAGIDNIPNYWLKNLTTAHEYIATSYNKLVEDPQKIPEWLAAGKTYLLPKDGNLKDPKNYRPITCLNTMYKILTAVISNRISLHLEEHNIIPAEQRGCAKGYQGCRDHLIYAKALTEDCKKHKKNLNLAWIDYQKAYDSVPHSWLLEILRMNGISDTIISLIQNLMLTWRTTMHIRIASDFLQTKEININRGIYQGDSLSPLLFCLALAPLSKLIRKASIGYKLKEASTPITHQLYMDDLKLTCKSETELRKVLQVVREFSEDIKMKFGLNKCATATFQRGRLIWTENIKINEDENIQSLNPGKTYKYLGVEEGDGIDHAGMKIKIKKEYISRIRKIMKTELTCKNKFQAIGTLAVPVIRYSLGIVDWTLEEIKQLDRKTRKILTMNGQLHPREDIERLYTPRRMGGRGLQQLEGVFYTTMYSMSYYIRQKAPQDLILRNIKAYDDHLHPNKSIQKKAKKIESKIYSSVQRTGGNIDEVEENNVRTPYNFKKQIIKRTYESYRNKPMHGQKVRNMEKIAFDPIESYKWLTQGRTKGETESLLVATQEQAITTRYIATKIHGTGNNKRCRICKKEDETIHHIISGCEELAKIEYIRRHNKVCNQIHFNLCRHYKCPVTTDKWYNHQPDKVSISEDNKTTILYDTPIQTDRTILANRPDIIVRTRDRTYIIEISIPADENIISKDANKQLKYKDISIEINRMWRTKTEIIPIIIGATGYVDHEFKANVEKLPGQHISSELQRTALYGTAHIIRKVLS

SEQ ID NO: 822 - protein, 1120 aa, Pterostichus madidus
MWCHYYVKLTGKHYKDTLKIWREINPNSRPNLTANTIQNQRRFIEQNNKVAAEEVQEIINNIKITLNKNMQAEHPQTQEDQTRAQIQLQVQQEEQLTNNEHTAIIDGDRLELRIDEKINKYLEIPFEKRPKLPKLKPNPNINKHLKEGNLALLNLLIEKDSTNMLLINTTIYCTAYVLTEIINNITIEDAEAKQIRGHRKLGWQRRIQTKVDKLRADLSKLTEVEKGNKLRSSKCRRYIEETYLTDKTKNIKEVIEQLKQRVMATAQRLRRYKTRQQQFLDNRLYTQNSKMFYRKLREDKVLNQKGPEINQIEEYWKGIYENRVEHKKDASWLEQLQNETTLNMKWEKITVEEVTKIIKKTNNWKAAGIDNIPNYWLKNLTTAHEYIATSYNKLVEDPQKIPEWLAAGKTYLLPKDGNLKDPKNYRPITCLNTMYKILTAVISNIISLHLEEHNIIPAEQRGCAKGYQGCRDHLIYAKALTEDCKKHKKNLNLAWIDYQKAYDSVPHSWLLEILRMNGISDTIISLIQNLMLTWKTTMHIRIASDFLQTKEININRGIYQGDSLSPLLFCLALAPLSKLIRKASIGYKLKEASTPITHQLYMDDLKLTCKSETELRKVLQVVREFSEDIKMKFGLNKCATATFQRGRLIWTENIKINEDENIQSLNPGKTYKYLGVEEGDGIDHAGMKMKIKKEYISRIRKIMKTELTCKNKFQAIGTLAVPVIRYSLGIVDWTLEEIKQLDRKTRKILTMNGQLHPREDIERLYTPRRMGGRGLQQLEGVFYTTMYSMSYYIRQKAPQDLILRNIKAYDDHLHPNKSIQKKAKKIESKIYSSVQRTAGNIDEVEESNVRTPYNFKKQIIKRTYESYRNKPMHGQKVRNMEKIAFDPIESYKWLTQGRTKGETESLLVATQEQAITTRYIATKIHGTGNNKRCRICKKEDETIHHIISGCEELAKIEYIRRHNKVCNQIHFNLCRHYKCPVTTDKWYNHQPDKVCISEDNTTTILYDTPIQTDRTILANRPDIIVRTRDRTYIIEISIPADENIISKDANKQLKYKDISIEINRMWKPKTEIIPIIIGATGYVDHEFKANVEKLPGQHISSELQRTALYGTAHIIRKVLS

SEQ ID NO: 823 - protein, 830 aa, Pterostichus madidus
MFYRKLREDKVLNQEGPEINQIEEYWKGIYENRVEHKKDASWLKQLQNETTLNMKWEKITVEEVTKIIKKTNNWKAAGIDNIPNYWLKNLTTAHEYIATSYNKLVEDPQKIPEWLAAGKTYLLPKDGNLKDPKNYRPITCLNTMYKILTAVISNRISLHLEEHNIIPAEQRGCAKGYQGCRDHLIYAKALTEDCKKHKKNLNLAWIDYQKAYDSVPHSWLLEILRMNGISDTIISLIQNLMLTWRTTMHIRIASDFLQTKEININRGIYQGDSLSPLLFCLALAPLSKLIRKASIGYKLKEASTPITHQLYMDDLKLTCKSETELRKVLQVVREFSEDIKMKFGLNKCATATFQRGRLIWTENIKINEDENIQSLNPGKTYKYLGVEEGDGIDHAGMKIKIKKEYISRIRKIMKTELTCKNKFQAIGTLAVPVIRYSLGIVDWTLEEIKQLDRKTRKILTMNGQLHPREDIERLYTPRRMGGRGLQQLEGVFYTTMYSMSYYIRQKAPQDLILRNIKAYDDHLHPNKSIQKKAKKIESKIYSSVQRTGGNIDEVEENNVRTPYNFKKQIIKRTYESYRNKPMHGQKVRNMEKIAFDPIESYKWLTQGRTKGETESLLVATQEQAITTRYIATKIHGTGNNKRCRICKKEDETIHHIISGCEELAKIEYIRRHNKVCNQIHFNLCRHYKCPVTTDKWYNHQPDKVSISEDNKTTILYDTPIQTDRTILANRPDIIVRTRDRTYIIEISIPADENIISKDANKQLKYKDISIEINRMWRTKTEIIPIIIGATGYVDHEFKANVEKLPGQHISSELQRTALYGTAHIIRKVLS

SEQ ID NO: 824 - protein, 1218 aa, Pterostichus madidus
MVLTRKQKARCTEGAHLPSYEDVANPLYSNNGRINTDNDNGNEIRNEAQNTRMATLQYEEGHHNELTQRGPSQTEASTSGSNSTKQKQPWSKEELIELMWCHYYVKLTGKHYKDTLKIWRERNPNSRPNLTANTIQNQRRFIEQNNKVAAEEVQEIINNIKITLNKNMQAEHPQTQEDQTRAQVQLQVQQEEQLTNNEHTEIIDGDRLELRIDEKINKYLEIPFEQRPKLPKLKPNPNINKHLKEGNLALLNLLIEKDSTNMLLINTTIYCTAYVLTEIINNITIEDAEAKKIRGHRKLGWQRRIQTKVDKLRADLSKLTEVEKGNKLRSSKCRRYIEETYLTDKTKNIKEVIEQLKQRVMATAQRLRRYKIRQQQFLDNRLYTQNSKMFYRKLREDKVLNQEGPEINQIEEYWKGIYENRVEHKKDASWLKQLQNETTLNMKWEKITVEEVTKIIKKTNNWKAAGIDNIPNYWLKNLTTAHEYIATSYNKLVEDPQKIPEWLAAGKTYLLPKDGNLKDPKNYRPITCLNTMYKILTAVISNRISLHLEEHNIIPAEQRGCAKGYQGCRDHLIYAKALTEDCKKHKKNLNLAWIDYQKAYDSVPHSWLLEILRMNGISDTIISLIQNLMLTWRTTMHIRIASDFLQTKEININRGIYQGDSLSPLLFCLALAPLSKLIRKASIGYKLKEASTPITHQLYMDDLKLTCKSETELRKVLQVVREFSEDIKMKFGLNKCATATFQRGRLIWTENIKINEDENIESLNPGKTYKYLGVEEGDGIDHAGMKIKIKKEYISRIRKIMKTELTCKNKFQAIGTLAVPVIRYSLGIVDWTLEEIKQLDRKTRKILTMNGQLHPREDIERLYTPRRMGGRGLQQLEGVFYTTMYSMSYYIRQKAPQDLILRNIKAYDDHLHPNKSIQKKAKKIESKIYSSVQRTGGNIDEVEENNVRTPYNFKKQIIKRTYESYRNKPMHGQKVRNMEKIAFDPIESYKWLTQGRTKGETESLLVATQEQAITTRYIATKIHGTGNNKRCRICKKEDETIHHIISGCEELAKIEYIRRHNKVCNQIHFNLCRHYKCPVTTDKWYNHQPDKVSISEDNKTTILYDTPIQTDRTILANRPDIIVRTRDRTYIIEISIPADENIISKDANKQLKYKDISIEINRMWRTKTEIIPIIIGATGYVDHEFKANVEKLPGQHISSELQRTALYGTAHIIRKVLS

SEQ ID NO: 825 - protein, 957 aa, Pterostichus madidus
MLLINTTIYCTAYVLTEIINNITIEDAEAKQIRGHRKLGWQRRIQTKVDKLRADLSKLTEVEKGNKLRSSKCRRYIEETYLTDKTKNIKEVIEQLKQRVMATAQRLRRYKIRQQQFLDNRLYTQNSKMFYRKLREDKVLNQEGPEINQIEEYWKGIYENRVEHKKDASWLKQLQNETTLNMKWEKITVEEVTKIIKKTNNWKAAGIDNIPNYWLKNLTTAHEYIATSYNKLVEDPQKIPEWLAAGKTYLLPKDGNLKDPKNYRPITCLNTMYKILTAVISNRISLHLEEHNIIPAEQRGCAKGYQGCRDHLIYAKALTEDCKKHKKNLNLAWIDYQKAYDSVPHSWLLEILRMNGISDTIISLIQNLMLTWRTTMHIRIASDFLQTKEININRGIYQGDSLSPLLFCLALAPLSKLIRKASIGYKLKEASTPITHQLYMDDLKLTCKSETELRKVLQVVREFSEDIKMKFGLNKCATATFQRGRLIWTENIKINEDENIQSLNPGKTYKYLGVEEGDGIDHAGMKIKIKKEYISRIRKIMKTELTCKNKFQAIGTLAVPVIRYSLGIVDWTLEEIKQLDRKTRKILTMNGQLHPREDIERLYTPRRMGGRGLQQLEGVFYTTMYSMSYYIRQKAPQDLILRNIKAYDDHLHPNKSIQKKAKKIESKIYSSVQRTGGNIDEVEENNVRTPYNFKKQIIKRTYESYRNKPMHGQKVRNMEKIAFDPIESYKWLTQGRTKGETESLLVATQEQAITTRYIATKIHGTGNNKRCRICKKEDETIHHIISGCEELAKIEYIRRHNKVCNQIHFNLCRHYKCPVTTDKWYNHQPDKVSISEDNKTTILYDTPIQTDRTILANRPDIIVRTRDRTYIIEISIPADENIISKDANKQLKYKDISIEINRMWRTKTEIIPIIIGATGYVDHEFKANVEKLPGQHISSELQRTALYGTAHIIRKVLS

SEQ ID NO: 826 - protein, 858 aa, Pterostichus madidus
MATAQRLRRYKIRQQQFLDNRLYTQNSKMFYRKLREDKVLNQEGPEINQIEEYWKGIYENRVEHKKDASWLKQLQNETTLNMKWEKITVEEVTKIIKKTNNWKAAGIDNIPNYWLKNLTTAHEYIATSYNKLVEDPQKIPEWLAAGKTYLLPKDGNLKDPKNYRPITCLNTMYKILTAVISNRISLHLEEHNIIPAEQRGCAKGYQGCRDHLIYAKALTEDCKKHKKNLNLAWIDYQKAYDSVPHSWLLEILRMNGISDTIISLIQNLMLTWRTTMHIRIASDFLQTKEINITRGIYQGDSLSPLLFCLALAPLSKLIRKASIGYKLKEASTPITHQLYMDDLKLTCKSETELRKVLQVVREFSEDIKMKFGLNKCATATFQRGRLIWTENIKINEDENIQSLNPGKTYKYLGVEEGDGIDHAGMKIKIKKEYISRIRKIMKTELTCKNKFQAIGTLAVPVIRYSLGIVDWTLEEIKQLDRKTRKILTMNGQLHPREDIERLYTPRRMGGRGLQQLEGVFYTTMYSMSYYIRQKAPQDLILRNIKAYDDHLHPNKSIQKKAKKIESKIYSSVQRTGGNIDEVEENNVRTPYNFKKQIIKRTYESYRNKPMHGQKVRNMEKIAFDPIESYKWLTQGRTKGETESLLVATQEQAITTRYIATKIHGTGNNKRCRICKKEDETIHHIISGCEELAKIEYIRRHNKVCNQIHFNLCRHYKCPVTTDKWYNHQPDKVSISEDNKTTILYDTPIQTDRTILANRPDIIVRTRDRTYIIEISIPADENIISKDANKQLKYKDISIEINRMWRTKTEIIPIIIGATGYVDHEFKANVEKLPGQHISSELQRTALYGTAHIIRKVLS

SEQ ID NO: 827 - protein, 1199 aa, Apoderus coryli
MSQRRNERMRQPGMPQGTSGANAGRGSMRSVGGRLLNRRAPIAQETTANSNNVEIPPADPQPAANVREDNPPPIAPGRSRRMRWSTNLNKDVMRYYFIATSLETDFTDYRDRLKNMFAAEHPEHNDITAQRLSDQRRAIQRNNLLTQIEIQYILDRVREELNIPHTPNQSFEDDNVYGTHTPSDSPRGSPFNNIDIEIPQEPHQEDEILNTYHANLLKYLGMDPNVRPPIQKLRFNKNTGTLINRANSILEQTLNDGMNLEEVHSTIYCAAITVVSLNQKYTSPNKKNTDGYLPSWQRRLTNKINGLRRSIGKTQQYHDGNRNNRLLRTLPTDLKDIIQTINAETENKVRTYLDTLKQKLAAYSARLKRYRESYSRRRDNSLFSNNEKAFYSSLSKKYDNLNPPDLESQTNYWTSIWSQSNNHTKNTWINQEMKAQNSLQPMNEIVITQADLTAALKKIANWKAPGRDGLHSFWYKRFTACHELLVNNFNDVIRFPNNFPTFLTEGLTYLIPKTDNPDHPSLFRPITCLPTLYKILTSILCAKLEDHLELAQVMTDEQKGARRNVMGCKEQLVVDSVVMQQLRVGQRNAHIAYIDYKKAFDSVPHSWLKFVLTLYKVHPTLILFLETTMRAWRTTLSQKINNELVFSGSIPLRRGIFQGDSLSALWFCLSLNPISNTLKKTEYGVKLKNNVQDLLVSHLFYVDDLKVYAANDRQLRAMLKLVHDMSSDIGMTFGLEKCRTIKMVKGVLKESQPIEINNEVVIQGIEEPYKYLGIDQTHKIEHTTMKSKLSTEFEKRVKLIIKTKLNSKNIVKAINTYAISALTHSFGIIRWSDTDLDALNRRIRTLLTHKRMHHPNACTERVTLPRCLGGRGLKDVKAMYYEQLDNIRKYFYKNSDKPMYRAVIEADKNLTTLNLKSREYNPKTHITTNEDKIRMWSGKQLHGRFYNSVQNNYVDKSLSFMWATKGYLHPETEGFLMATQDQVIKTRNYAKYILGEDLSSDKCRKCGAVSETIDHILGSCNTLANTKYLTRHNQVAHIIHQKILIDRKMKTEIVPYYKYVPNEVEENDQFKIYWDKTIYTDHTIEHNRPDITLIDKKKHTTYLIDVSIPGTHNLQQKHTEKLNKYQALQHEIKRIWNMREVYIIPIILSSIGVIPKNLEKNLKMIQIPITVIEEMQKAAILQSLNIVRSFLAVGNAHES

SEQ ID NO: 828 - protein, 1199 aa, Apoderus coryli
MSQRRNERMRQPGMPQGTSGANAGRGSMRSVGGRLLNRRAPIAQETTANSNNVEIPPADPQPAANVREDNPPPIAPGRSRRMRWSTNLNKDVMRYYFIATSLETDFTDYRDRLKNMFAAEHPEHNDITAQRLSDQRRAIQRNNLLTQIEIQYILDRVREELNIPHTPNQSFEDDNVYGTHTPSDSPRGSPFNNIDIEIPQEPHQEDEILNTYHANLLKYLGMDPNVRPPIQKLRFNKNTGTLINRANSILEQTLNDGMNLEEVHSTIYCAAITVVSLNQKYTSPNKKNTDGYLPSWQRRLTNKINGLRRSIGKTQQYHDGNRNNRLLRTLPTDLKDIIQTINAETENKVRTYLDTLKQKLAAYSARLKRYRESYSRRRDNSLFSNNEKAFYSSLSKKYDNLNPPDLESQTNYWTSIWSQSNNHTKNTWINQEMKAQNSLQPMNEIVITQADLTAALKKIANWKAPGRDGLHSFWYKRFTACHELLVNNFNDVIRFPNNFPTFLTEGLPYLIPKTDNPDHPSLFRPITCLPTLYKILTSILCAKLEDHLELAQVMTDEQKGARRNVMGCKEQLVVDSVVMQQLRVGQRNAHIAYIDYKKAFDSVPHSWLKFVLTLYKVHPTLILFLETTMRAWRTTLSQKINNELVFSGSIPLRRGIFQGDSLSALWFCLSLNPISNTLKKTEYGVKLKNNVQDLLVSHLFYVDDLKVYAANDRQLRAMLKLVHDMSSDIGMTFGLEKCRTIKMVKGVLKESQPIEINNEVVIQGIEEPYKYLGIDQTHKIEHTTMKSKLSTEFEKRVKLIIKTKLNSKNIVKAINTYAISALTHSFGIIRWSDTDLDALNRRIRTLLTHKRMHHPNACTERVTLPRCLGGRGLKDVKAMYYEQLDNIRKYFYKNSDKPMYRAVIEADKNLTTLNLKSREYNPKTHITTNEDKIRMWSGKQLHGRFYNSVQNSYVDKSLSFMWATKGYLHPETEGFLMATQDQVIKTRNYAKYILGEDLSSDKCRKCGAVSETIDHILGSCNTLANTKYLTRHNQVAHIIHQKILIDRKMKTEIVPYYKYVPNEVEENDQFKIYWDKTIYTDHTIEHNRPDITLIDKKKHTTYLIDVSIPGTHNLQQKHTEKLNKYQALQHEIKRIWNMREVYIIPIILSSIGVIPKNLEKNLKMIQIPITVIEEMQKAAILQSLNIVRSFLAVGNAHES

SEQ ID NO: 829 - protein, 1199 aa, Apoderus coryli
MSQRRNERMRQPGMPQGTSGANAGRGSMRSVGGRLLNRRAPIAQETTANSNNVEIPPADPQPAANVREDNPPPIAPGRSRRMRWSTNLNKDVMRYYFIATSLETDFTDYRDRLKNMFAAEHPEHNDITAQRLSDQRRAIQRNNLLTQIEIQYILDRVREELNIPHTPNQSFEDDNVYGTHTPSDSPRGSPFNNIDIEIPQEPHQEDEILNTYHANLLKYLGMDPNVRPPIQKLRFNKNTGTLINRANSILEQTLNDGMNLEEVHSTIYCAAITVVSLNQKYTSPNKKNTDGYLPSWQRRLTNKINGLRRSIGKTQQYHDGNRNNRLLRTLPTDLKDIIQTINAETENKVRTYLDTLKQKLAAYSARLKRYRESYSRRRDNSLFSNNEKAFYSSLSKKYDNLNPPDLESQTNYWTSIWSQSNNHTKNTWINQEMKAQNSLQPMNEIVITQADLTAALKKIANWKAPGRDGLHSFWYKRFTACHELLVNNFNDVIRFPNNFPTFLTEGLTYLIPKTDNPDHPSLFRPITCLPTLYKILTSILCAKLEDHLELAQVMTDEQKGARRNVMGCKEQLVVDSVVMQQLRVGQRNAHIAYIDYKKAFDSVPHSWLKFVLTLYKVHPTLILFLETTMRAWRTTLSQKINNELVFSGSIPLRRGIFQGDSLSALWFCLSLNPISNTLKKTEYGVKLKNNVQDLLVSHLFYVDDLKVYAANDRQLRAMLKLVHDMSSDIGMTFGLEKCRTIKMVKGVLKESQPIEINNEVVIQGLEEPYKYLGIDQTHKIEHTTMKSKLSTEFEKRVKLIIKTKLNSINIVKAINTYAISALTHSFGIIRWSDTDLDALNRRIRTLLTHKRMHHPNACTERVTLPRCLGGRGLKDVKAMYYEQLDNIRKYFYKNSDKPMYRAVIEADKNLTTLNLKSQEYNPKTHITTNEDKIRMWSGKQLHGRFYNSVQNNYVDKSLSFMWATKGYLHPETEGFLMATQDQVIKTRNYAKYILGEDLSSDKCRKCGAVSETIDHILGSCNTLANTKYLTRHNQVAHIIHQKILIDRKMKTEIVPYYKYVPNEVEENDQFKIYWDKTIYTDHTIEHNRPDITLIDKKKHTTYLIDVSIPGTHNLQQKHTEKLNKYQALQHEIKRIWNMREVYIIPIILSSIGVIPKNLEKNLKMIQIPITVIEEMQKAAILQSLNIVRSFLAVGNAHES

SEQ ID NO: 830 - protein, 1199 aa, Apoderus coryli
MSQRRNERMRQPGMPQGTSGANAGRGSMRSVGGRLLNRRAPIAQETTANSNNVEIPPADPQPAANVREDNPPPIAPGRSRRMRWSTNLNKDVMRYYFIATSLETDFTDYRDRLKNMFAAEHPEHNDITAQRLSDQRRAIQRNNLLTQIEIQYILDRVREELNIPHTPNQSFEDDNVYGTHTPSDSPRGSPFNNIDIEIPQEPHQEDEILNTYHANLLKYLGMDPNVRPPIQKLRFNKNTGTLINRANSILEQTLNDGMNLEEVHSTIYCAAITVVSLNQKYTSPNKKNTDGYLPSWQRRLTNKINGLRRSIGKTQQYHDGNRNNRLLRTLPTDLKDIIQTINAETENKVRTYLDTLKQKLAAYSARLKRYRESYSRRRDNSLFSNNEKAFYSSLSKKYDNLNPPDLESQTNYWTSIWSQSNNHTKNTWINQEMKAQNSLQPMNEIVITQADLTAALKKIANWKAPGRDGLHSFWYKRFTACHELLVNNFNDVIRFPNNFPTFLTEGLTYLIPKTDNPDHPSLFRPITCLPTLYKILTSILCAKLEDHLELAQVMTDEQKGARRNVMGCKEQLVVDSVVMQQLRVGQRNAHIAYIDYKKAFDSVPHSWLKFVLTLYKVHPTLILFLETTMRAWRTTLSQKINNELVFSGSIPLRRGIFQGDSLSALWFCLSLNPISNTLKKTEYGVKLKNNVQDLLVSHLFYVDDLKVYAANDRQLRAMLRLVHDMSSDIGMTFGLEKCRTIKMVKGVLKESQPIEINNEVVIQGIEEPYKYLGIDQTHKIEHTTMKSKLSTEFEKRVKLIIKTKLNSKNIVKAINTYAISALTHSFGIIRWSDTDLDALNRRIRTLLTHKRMHHPNACTERVTLPRCLGGRGLKDVKAMYYEQLDNIRKYFYKNSDKPMYRAVIEADKNLTTLNLKSREYNPKTHITTNEDKIRMWSGKQLHGRFYNSVQNNYVDKSLSFMWATKGYLHPETEGFLMATQDQVIKTRNYAKYILGEDLSSDKCRKCGAVSETIDHILGSCNTLANTKYLTRHNQVAHIIHQKILIDRKMKTEIVPYYKYVPNEVEENDQFKIYWDKTIYTDHTIEHNRPDITLIDKKKHTTYLIDVSIPGTHNLQQKHTEKLNKYQALQHEIKRIWNMREVYIIPIILSSIGVIPKNLEKNLKMIQIPITVIEEMQKAAILQSLNIVRSFLAVGNAHES

SEQ ID NO: 831 - protein, 1164 aa, Apoderus coryli
MRLNFQLLMCHDLIVFIVFIFKYNNNNNNNNNNNNNNNNNTGRSRRMRWSTNLNKDVMRYYFIATSLETDFTDYRDRLKNMFAAEHPEHNDITAQRLSDQRRAIQRNNLLTQIEIQYILDRVREELNIPHTPNQSFEDDNVYGTHTPSDSPRGSPFNNIDIEIPQEPHQEDEILNTYHANLLKYLGMDPNVRPPIQKLRFNKNTGTLINRANSILEQTLNDGMNLEEVHSTIYCAAITVVSLNQKYTSPNKKNTDGYLPSWQRRLTNKINGLRRSIGKTQQYHDGNRNNRLLRTLPTDLKDIIQTINAETENKVRTYLDTLKQKLAAYSARLKRYRESYSRRRDNSLFSNNEKAFYSSLSKKYDNLNPPDLESQTNYWTSIWSQSNNHTKNTWINQEMKAQNSLQPMNEIVITQADLTAALKKIANWKAPGRDGLHSFWYKRFTACHELLVNNFNDVIRFPNNFPTFLTEGLTYLIPKTDNPDHPSLFRPITCLPTLYKILTSILCAKLEDHLELAQVMTDEQKGARRNVMGCKEQLVVDSVVMQQLRVGQRNAHIAYIDYKKAFDSVPHSWLKFVLTLYKVHPTLILFLETTMRAWRTTLSQKINNELVFSGSIPLRRGIFQGDSLSALWFCLSLNPISNTLKKTEYGVKLKNNVQDLLVSHLFYVDDLKVYAANDRQLRAMLKLVHDMSSDIGMTFGLEKCRTIKMVKGVLKESQPIEINNEVVIQGIEEPYKYLGIDQTHKIEHTTMKSKLSTEFEKRVKLIIKTKLNSKNIVKAINTYAISALTHSFGIIRWSDTDLDALNRRIRTLLTHKRMHHPNACTERVTLPRCLGGRGLKDVKAMYYEQLDNIRKYFYKNSDKPMYRAVIEADKNLTTLNLKSREYNPKTHITTNEDKIRMWSGKQLHGRFYNSVQNNYVDKSLSFMWATKGYLHPETEGFLMATQDQVIKTRNYAKYILGEDLSSDKCRKCGAVSETIDHILGSCNTLANTKYLTRHNQVAHIIHQKILIDRKMKTEIVPYYKYVPNEVEENDQFKIYWDKTIYTDHTIEHNRPDITLIDKKKHTTYLIDVSIPGTHNLQQKHTEKLNKYQALQHEIKRIWNMREVYIIPIILSSIGVIPKNLEKNLKMIQIPITVIEEMQKAAILQSLNIVRSFLAVGNAHES

SEQ ID NO: 832 - protein, 1199 aa, Apoderus coryli
MSQRRNERMRQPGMPQGTSGANAGRGSMRSVGGRLLNRRAPIAQETTANSNNVEIPPADPQPAANVREDNPPPIAPGRSRRMRWSTNLNKDVMRYYFIATSLETDFTDYRDRLKNMFAAEHPEHNDITAQRLSDQRRAIQRNNLLTQIEIQYILDRVREELNIPHTPNQSFEDDNVYGTHTPSDSPRGSPFNNIDIEIPQEPHQEDEILNTYHANLLKYLGMDPNVRPPIQKLRFNKNTGTLINRANSILEQTLNDGMNLEEVHSTIYCAAITVVSLNQKYTSPNKKNTDGYLPSWQRRLTNKINGLRRSIGKTQQYHDGNRNNRLLRTLPTDLKDIIQTINAETENKVRTYLDTLKQKLAAYSARLKRYRESYSRRRDNSLFSNNEKAFYSSLSKKYDNLNPPDLESQTNYWTSIWSQSNNHTKNTWINQEMKAQNSLQPMNEIVITQADLTAALKKIANWKAPGRDGLHSFWYKRFTACHELLVNNFNDVIRFPNNFPTFLTEGLTYLIPKTDNPDHPSLFRPITCLPTLYKILTSILCAKLEDHLELAQVMTDEQKGARRNVMGCKEQLVVDSVVMQQLRVGQRNAHIAYIDYKKAFDSVPHSWLKFVLTLYKVHPTLILFLETTMRAWRTTLSQKINNELVFSGSIPLRRGIFQGDSLSALWFCLSLNPISNTLKKTEYGVKLKNNVQDLLVSHLFYVDDLKVYAANDRQLRAMLKLVHDMSSDIGMTFGLEKCRTIKMVKGVLKESQPIEINNEVVIQGLEEPYKYLGIDQTHKIEHTTMKSKLSTEFEKRVKLIIKTKLNSKNIVKAINTYAISALTHSFGIIRWSDTDLDALNRRIRTLLTHKRMHHPNACTERVTLPRCLGGRGLKDVKAMYYEQLDNIRKYFYKNSDKPMYRAVIEADKNLTTLNLKSQEYNPKTHITTNEDKIRMWSGKQLHGRFYNSVQNNYVDKSLSFMWATKGYLHPETEGFLMATQDQVIKTRNYAKYILGEDLSSDKCRKCGAVSETIDHILGSCNTLANTKYLTRHNQVAHIIHQKILIDRKMKTEIVPYYKYVPNEVEENDQFKIYWDKTIYTDHTIEHNRPDITLIDKKKHRTYLIDVSIPGTHNLQQKHTEKLNKYQALQHEIKRIWNMREVYIIPIILSSIGVIPKNLEKNLKMIQIPITVIEEMQKAAILQSLNIVRSFLAVGNAHES

SEQ ID NO: 833 - protein, 1199 aa, Apoderus coryli
MSQRRNERMRQPGMPQGTSGANAGRGSMRSVGGRLLNRRAPIAQETTANSNNVEIPPADPQPAANVREDNPPPIAPGRSRRMRWSTNLNKDVMRYYFIATSLETDFTDYRDRLKNMFAAEHPEHNDITAQRLSDQRRAIQRNNLLTQIEIQYTLDRVREELNIPHTPNQSFEDDNVYGTHTPSDSPRGSPFNNIDIEIPQEPHQEDEILNTYHANLLKYLGMDPNVRPPIQKLRFNKNTGTLINRANSILEQTLNDGMNLEEVHSTIYCAAITVVSLNQKYTSPNKKNTDGYLPSWQRRLTNKINGLRRSIGKTQQYHDGNRNNRLLRTLPTDLKDIIQTINAETENKVRTYLDTLKQKLAAYSARLKRYRESYSRRRDNSLFSNNEKAFYSSLSKKYDNLNPPDLESQTNYWTSIWSQSNNHTKNTWINQEMKAQNSLQPMNEIVITQADLTAALKKIANWKAPGRDGLHSFWYKRFTACHELLVNNFNDVIRFPNNFPTFLTEGLTYLIPKTDNPDHPSLFRPITCLPTLYKILTSILCAKLEDHLELAQVMTDEQKGARRNVMGCKEQLVVDSVVMQQLRVGQRNAHIAYIDYKKAFDSVPHSWLKFVLTLYKVHPTLILFLETTMRAWRTTLSQKINNELVFSGSIPLRRGIFQGDSLSALWFCLSLNPISNTLKKTEYGVKLKNNVQDLLVSHLFYVDDLKVYAANDRQLRAMLKLVHDMSSDIGMTFGLEKCRTIKMVKGVLKESQPIEINNEVVIQGLEEPYKYLGIDQTHKIEHTTMKSKLSTEFEKRVKLIIKTKLNSKNIVKAINTYAISALTHSFGIIRWSDTDLDALNRRIRTLLTHKRMHHPNACTERVTLPRCLGGRGLKDVKAMYYEQLDNIRKYFYKNSDKPMYRAVIEADKNLTTLNLKSQEYNPKTHITTNEDKIRMWSGKQLHGRFYNSVQNNYVDKSLSFMWATKGYLHPETEGFLMATQDQVIKTRNYAKYILGEDLSSDKCRKCGAVSETIDHILGSCNTLANTKYLTRHNQVAHIIHQKILIDRKMKTEIVPYYKYVPNEVEENDQFKIYWDKTIYTDHTIEHNRPDITLIDKKKHTTYLIDVSIPGTHNLQQKHTEKLNKYQALQHEIKRIWNMREVYIIPIILSSIGVIPKNLEKNLKMIQIPITVIEEMQKAAILQSLNIVRSFLAVGNAHES

SEQ ID NO: 834 - protein, 767 aa, Apoderus coryli
MKAQNSLQPMNEIVITQADLTAALKKIANWKAPGRDGLHSFWYKRFTACHELLVNNFNDVIRFPNNFPTFLTEGLTYLIPKTDNPDHPSLFRPITCLPTLYKILTSILCAKLEDHLELAQVMTDEQKGARRNVMGCKEQLVVDSVVMQQLRVGQRNAHIAYIDYKKAFDSVPHSWLKFVLTLYKVHPTLILFLETTMRAWRTTLSQKINNELVFSGSIPLRRGIFQGDSLSALWFCLSLNPISNTLKKTEYGVKLKNNVQDLLVSHLFYVDDLKVYAANDRQLRAMLKLVHDMSSDIGMTFGLEKCRTIKMVKGVLKESQPIEINNEVVIQGLEEPYKYLGIDQTHKIEHTTMKSKLSTEFEKRVKLIIKTKLNSKNIVKAINTYAISALTHSFGIIRWSDTDLDALNRRIRTLLTHKRMHHPNACTERVTLPRCLGGRGLKDVKAMYYEQLDNIRKYFYKNSDKPMYRAVIEADKNLTTLNLKSREYNPKTHITTNEDKIRMWSGKQLHGRFYNSVQNNYVDKSLSFMWATKGYLHPETEGFLMATQDQVIKTRNYAKYILGEDLSSDKCRKCGAVSETIDHILGSCNTLANTKYLTRHNQVAHIIHQKILIDRKIKTEIVPYYKYVPNEVEENDQFKIYWDKTIYTDHTIEHNRPDITLIDKKKHTTYLIDVSIPGTHNLQQKHTEKLNKYQALQHEIKRIWNMREVYIIPIILSSIGVIPKNLEKNLKMIQIPITVIEEMQKAAILQSLNIVRSFLAVGNAHES

SEQ ID NO: 835 - protein, 978 aa, Apoderus coryli
MDPNVRPPIQKLRFNKNTGTLINRANSILEQTLNDGMNLEEVHSTIYCAAITVVSLNQKYTSPNKKNTDGYLPSWQRRLTNKINGLRRSIGKTQQYHDGNRNNRLLRTLPTDLKDITQTINAETENKVRTYLDTLKQKLAAYSARLKRYRESYSRRRDNSLFSNNEKAFYSSLSKKYDNLNPPDLESQTNYWTSIWSQSNNHTKNTWINQEMKAQNSLQPMNEIVITQADLTAALKKIANWKAPGRDGLHSFWYKRFTACHELLVNNFNDVIRFPNNFPTFLTEGLTYLIPKTDNPDHPSLFRPITCLPTLYKILTSILCAKLEDHLELAQVMTDEQKGARRNVMGCKEQLVVDSVVMQQLRVGQRNAHIAYIDYKKAFDSVPHSWLKFVLTLYKVHPTLILFLETTMRAWRTTLSQKINNELVFSGSIPLRRGIFQGDSLSALWFCLSLNPISNTLKKTEYGVKLKNNVQDLLVSHLFYVDDLKVYAANDRQLRAMLWLVHDMSSDIGMTFGLEKCRTIKMVKGVLKESQPIEINNEVVIQGLEEPYKYLGIDQTHKIEHTTMKSKLSTEFEKRVKLIIKTKLNSKNIVKAINTYAISALTHSFGIIRWSDTDLDALNRRIRTLLTHKRMHHPNACTERVTLPRCLGGRGLKDVKAMYYEQLDNIRKYFYKNSDKPMYRAVIEADKNLTTLNLKSREYNPKTHITTNEDKIRMWSGKQLHGRFYNSVQNNYVDKSLSFMWATKGYLHPETEGFLMATQDQVIKTRNYAKYILGEDLSSDKCRKCGAVSETIDHILGSCNTLANTKYLTRHNQVAHIIHQKILIDRKMKTDIVPYYKYVPNEVEENDHFKIYWDKTIYTDHTIEHNRPDITLIDKKKHTTYLIDVSIPGTHNLQQKHTEKLNKYQALQHEIKRIWNMREVYIIPIILSSIGVIPKNLEKNLKMIQIPITVVEEMQKAAILQSLNIVRSFLAVGNAHES

SEQ ID NO: 836 - protein, 1199 aa, Apoderus coryli
MSQRRNERMRQPGMPQGTSGANAGRGSMRSVGGRLLNRRAPIAQETTANSNNVEIPPADPQPAANVREDNPPPIAPGRSRRMRWSTNLNKDVMRYYFIATSLETDFTDYRDRLKNMFAAEHPEHNDITAQRLSDQRRAIQRNNLLTQIEIQYILDRVREELNIPHTPNQSFEDDNVYGTHTPSDSPRGSPFNNIDIEIPQEPHQEDEILNTYHANLLKYLGMDPNVRPPIQKLRFNKNTGTLINRANSILEQTLNDGMNLEEVHSTIYCAAITVVSLNQKYTSPNKKNTDGYLPSWQRRLTNKINGLRRSIGKTQQYHDGNRNNRLLRTLPTDLKDIIQTINAETENKVRTYLDTLKQKLAAYSARLKRYRESYSRRRDNSLFSNNEKAFYSSLSKKYDNLNPPDLESQTNYWTSIWSQSNNHTKNTWINQEMKAQNSLQPMNEIVITQADLTAALKKIANWKAPGRDGLHSFWYKRFTACHELLVNNFNDVIRFPNNFPTFLTEGLTYLIPKTDNPDHPSLFRPITCLPTLYKILTSILCAKLEDHLELAQVMTDEQKGARRNVMGCKEQLVVDSVVMQQLRVGQRNAHIAYIDYKKAFDSVPHSWLKFVLTLYKVHPTLILFLETTMRAWRTTLSQKINNELVFSGSIPLRRGIFQGDSLSALWFCLSLNPISNTLKKTEYGVKLKNNVQDLLVSHLFYVDDLKVYAANDRQLRAMLKLVHDMSSDIGMTFGLEKCRTIKMVKGVLKESQPIEINNEVVIQGIEEPYKYLGIDQTPKKKHTTMKSKLSTEFEKRVKLIIKTKLNSKNIVKAINTYAISALTHSFGIIRWSDTDLDALNRRIRTLLTHKRMHHPNACTERVTLPRCLGGRGLKDVKAMYYEQLDNIRKYFYKNSDKPMYRAVIEADKNLTTLNLKSREYNPKTHITTNEDKIRMWSGKQLHGRFYNSVQNNYVDKSLSFMWATKGYLHPETEGFLMATQDQVIKTRNYAKYILGEDLSSDKCRKCGAVSETIDHILGSCNTLANTKYLTRHNQVAHIIHQKILIDRKMKTEIVPYYKYVPNEVEENDQFKIYWDKTIYTDHTIEHNRPDITLIDKKKHTTYLIDVSIPGTHNLQQKHTEKLNKYQALQHEIKRIWNMREVYIIPIILSSIGVIPKNLEKNLKMIQIPITVIEEMQKAAILQSLNIVRSFLAVGNAHES

SEQ ID NO: 837 - protein, 1199 aa, Apoderus coryli
MSQRRNERMRQPGMPQGTSGANAGRGSMRSVGGRLLNMRAPIAQETTANSNNVEIPPADPQPAANVREDNPPPIAPGRSRRMRWSTNLNKDVMRYYFIATSLETDFTDYRDRLNNMFAAEHPEHNDITAQRLSDQRRAIQRNNLLTQIEIQYILDRVREELNIPHTPNQSFEDDNVYGTHTPSDSPRGSPFNNIDIEIPQEPHQEDEILNTYHANLLKYLGMDPNVRPPIQKLRFNKNTGTLINRANSILEQTLNDGMNLEEVHSTIYCAAITVVSLNQKYTSPNKKNTDGYLPSWQRRLTNKINGLRRSIGKTQQYHDGNRNNRLLRTLPTDLKDIIQTINAETENKVRTYLDTLKQKLAAYSARLKRYRESYSRRRDNSLFSNNEKAFYSSLSKKYDNLNPPDLESQTNYWTSIWSQSNNHTKNTWINQEMKAQNSLQPMNEIVITQADLTAALKKIANWKAPGRDGLHSFWYKRFTACHELLVNNFNDVIRFPNNFPTFLTEGLTYLIPKTDNPDHPSLFRPITCLPTLYKILTSILCAKLEDHLELAQVMTDEQKGARRNVMGCKEQLVVDSVVMQQLRVGQRNAHIAYIDYKKAFDSVPHSWLKFVLTLYKVHPTLILFLETTMRAWRTTLSQKINNELVFSGSIPLRRGIFQGDSLSALWFCLSLNPISNTLKKTEYGVKLKNNVQDLLVSHLFYVDDLKVYAANDRQLRAMLKLVHDMSSDIGMTFGLEKCRTIKMVKGVLKESQPIEINNEVVIQGIEEPYKYLGIDQTHKIEHTTMKSKLSTEFEKRVKLIIKTKLNSKNIVKAINTYAISALTHSFGIIRWSDTDLDALNRRIRTLLTHKRMHHPNACTERVTLPRCLGGRGLKDVKAMYYEQLDNIRKYFYKNSDKPMYRAVIEADKNLTTLNLKSREYNPKTHITTNEDKIRMWSGKQLHGRFYNSVQNNYVDKSLSFMWATKGYLHPETEGFLMATQDQVIKTRNYAKYILGEDLSSDKCRKCGAVSETIDHILGSCNTLANTKYLTRHNQVAHIIHQKILIDRKMKTEIVPYYKYVPNEVEENDQFKIYWDKTIYTDHTIEHNRPDITLIDKKKHTTYLIDVSIPGTHNLQQKHTEKLNKYQALQHEIKRIWNMREVYIIPIILSSIGVIPKNLEKNLKMIQIPITVIEEMQKAAILQSLNIVRSFLAVGNAHES

SEQ ID NO: 838 - protein, 1118 aa, Apoderus coryli
MRWSTNLNKDVMRYYFIATSLETDFTDYRDRLKNMFAAEHPEHNDITAQRLSDQRRAIQRNNLLTQIEIQYILDRVREELNIPHTPNQSFEDDNVYGTHTPSDSPRGSPFNNIDIEIPQEPHQEDEILNTYHANLLKYLGMDPNVRPPIQKLRFNKNTGTLMNRANSILEQTLNDGMNLEEVHSTIYCAAITVVSLNQKYTSPNKKNTDGYLPSWQRRLTNKINGLRRSIGKTQQYHDGNRNNRLLRTLPTDLKDIIQTINAETENKVRTYLDTLKQKLAAYSARLKRYRESYSRRRDNSLFSNNEKAFYSSLSKKYDNLNPPDLESQTNYWTSIWSQSNNHSKNTWINQEMKAQNSLQPMNEIVITQADLTAALKKIANWKAPGRDGLHSFWYKRFTACHELLVNNFNDVIRFPNNFPTFLTEGLTYLIPKTDNPDHPSLFRPITCLPTLYKILTSILCAKLEDHLELAQVMTDEQKGARRNVMGCKEQLVVDSVVMQQLRVGQRNAHIAYIDYKKAFDSVPHSWLKFVLTLYKVHPTLILFLETTMRAWRTTLSQKINNELVFSGSIPLRRGIFQGDSLSALWFCLSLNPISNTLKKTEYGVKLKNNVQDLLVSHLFYVDDLKVYAANDRQLRAMLKLVHDMSSDIGMTFGLEKCRTIKMVKGVLKESQPIEINNEVVIQGLEEPYKYLGIDQTHKIEHTTMKSKLSTEFEKRVKLIIKTKLNSKNIVKAINTYAISALTHSFGIIRWSDTDLDALNRRIRTLLTHKRMHHPNACTERVTLPRCLGGRGLKDVKAMYYEQLDNIRKYFYKNSDKPMYRAVIEADKNLTTLNLKSREYNPKTHITTNEDKIRMWSGKQLHGRFYNSVQNNYVDKSLSFMWATKGYLHPETEGFLMATQDQVIKTRNYAKYILGEDLSSDKCRKCGAVSETIDHILGSCNTLANTKYLTRHNQVAHIIHQKILIDRKIKTEIVPYYKYVPNEVEENDQFKIYWDKTIYTDHTIEHNRPDITLIDKKKHTTYLIDVSIPGTHNLQQKHTEKLNKYQALQHEIKRIWNMREVYIIPIILSSIGVIPKNLEKNLKMIQIPITVIEEMQKAAILQSLNIVRSFLAVGNAHES

SEQ ID NO: 839 - protein, 1199 aa, Apoderus coryli
MSQRRNERMRQPGMPQGTSGANAGRGSMRSVGGRLLNRRAPIAQETTANSNNVEIPPADPQPAANVREDNPPPIAPGRSRRMRWSTNLNKDVMRYYFIATSLETDFTDYRDRLKNMFAAEHPEHNDITAQRLSDQRRAIQRNNLLTQIEIQYILDRVREELNIPHTPNQSFEDDNVYGTHTPSDSPRGSPFNNIDIEIPQEPHQEDEILNTYHANLLKYLGMDPNVRPPIQKLRFNKNTGTLINRANSILEQTLNDGMNLEEVHSTIYCAAITVVSLNQKYKSPNKKNTDGYLPSWQRRLTNKINGLRRSIGKTQQYHDGNRNNRLLRTLPTDLKDIIQTINAETENKVRSYLDTLKQKLAAYSARLKRYRESYSRRRDNSLFSNNEKAFYSSLSKKYDNLNPPDLESQTNYWTSIWSQSNNHTKNTWINQEMKAQNSLQPMNEIVITQADLTAALKKIANWKAPGRDGLHSFWYKRFTACHELLVNNFNDVIRFPNNFPTFLTEGLTYLIPKTDNPDHPLLFRPITCLPTLYKILTSILCAKLEDHLELAQVMTDEQKGARRNVMGCKEQLVVDSVVMQQLRVGQRNAHIAYIDYKKAFDSVPHSWLKFVLTLYKVHPTLILFLETTMRAWRTTLSQKINNELVFSGSIPLRRGIFQGDSLSALWFCLSLNPISNTLKKTEYGVKLKNNVQDLLVSHLFYVDDLKVYAANDRQLRAMLKLVHDMSSDIGMTFGLEKCRTIKMVKGVLKESQPIEINNEVVIQGIEEPYKYLGIDQTHKIEHTTMKSKLSTEFEKRVKLIIKTKLNSKNIVKAINTYAISALTHSFGIIRWSDTDLDALNRRIRTLLTHKRMHHPNACTERVTLPRCLGGRGLKDVKAMYYEQLDNIRKYFYKNSDKPMYRAVIEADKNLTTLNLKSREYNPKTHITTNEDKIRMWSGKQLHGRFYNSVQNNYVDKSLSFMWATKGYLHPETEGFLMATQDQVIKTRNYAKYILGEDLSSDKCRKCGAVSETIDHILGSCNTLANTKYLTRHNQVAHIIHQKILIDRKMKTEIVPYYKYVPNEVEENDQFKIYWDKTIYTDHTIEHNRPDITLIDKKKHTTYLIDVSIPGTHNLQQKHTEKLNKYQALQHEIKRIWNMREVYIIPIILSSIGVIPKNLEKNLKMIQIPITVIEEMQKAAILQSLNIVRSFLAVGNAHES

SEQ ID NO: 840 - protein, 1199 aa, Apoderus coryli
MSQRRNERMRQPGMPQGTSGANARRGSMRSVGGRLLNRRAPIAQETTANSNNVEIPPADPQPAANVREDNPPPIAPGRSRRMRWSTNLNKDVMRYYFIATSLETDFTDYRDRLKNMFAAEHPEHNDITAQRLSDQRRAIQRNNLLTQIEIQYILDRVREELNIPHTPNQSFEDDNVYGTHTPSDSPRGSPFNNIDIEIPQEPHQEDEILNTYHANLLKYLGMDPNVRPPIQKLRFNKNTGTLINRANSILEQTLNDGMNLEEVHSTIYCAAITVVSLNQKYTSPNKKNTDGYLPSWQRRLTNKINGLRRSIGKTQQYHDGNRNNRLLRTLPTDLKDIIQTINAETENKVRTYLDTLKQKLAAYSARLKRYRESYSRRRDNSLFSNNEKAFYSSLSKKYDNLNPPDLESQTNYWTSIWSQSNNHTKNTWINQEMKAQNSLQPMNEIVITQADLTAALKKIANWKAPGRDGLHSFWYKRFTACHELLVNNFNDVIRFPNNFPTFLTEGLTYLIPKTDNPDHPSLFRPITCLPTLYKILTSILCAKLEDHLELAQVMTDEQKGARRNVMGCKEQLVVDSVVMQQLRVGQRNAHIAYIDYKKAFDSVPHSWLKFVLTLYKVHPTLILFLETTMRAWRTTLSQKINNELVFSGSIPLRRGIFQGDSLSALWFCLSLNPISNTLKKTEYGVKLKNNVQDLLVSHLFYVDDLKVYAANDRQLRAMLKLVHDMSSDIGMTFGLEKCRTIKMVKGVLKESQPIEINNEVVIQGIEEPYKYLGIDQTHKIEHTTMKSKLSTEFEKRVKLIIKTKLNSKNIVKAINTYAISALTHSFGIIRWSDTDLDALNRRIRTLLTHKRMHHPNACTERVTLPRCLGGRGLKDVKAMYYEQLDNIRKYFYKNSDKPMYRAVIEADKNLTTLNLKSREYNPKTHITTNEDKIRMWSGKQLHGRFYNSVQNNYVDKSLSFMWATKGYLHPETEGFLMATQDQVIKTRNYAKYILGEDLSSDKCRKCGAVSETIDHILGSCNTLANTKYLTRHNQVAHIIHQKILIDRKMKTEIVPYYKYVPNEVEENDQFKIYWDKTIYTDHTIEHNRPDITLIDKKKHTTYLIDVSIPGTHNLQQKHTEKLNKYQALQHEIKRIWNMREVYIIPIILSSIGVIPKNLEKNLKMIQIPITVIEEMQKAAILQSLNIVRSFLAVGNAHES

SEQ ID NO: 841 - protein, 1118 aa, Apoderus coryli
MRWSTNLNKDVMRYYFIATSLETDFTDYRDRLKNMFAAEHPEHNDITAQRLSDQRRAIQRNNLLTQIEIQYILDRVREELNIPHTPNQSFEDDNVYGTHTPSDSPRGSPFNNIDIEIPQEPHQEDEILNTYHANLLKYLGMDPNVRPPIQKLRFNKNTGTLINRANSILEQTLNDGMNLEEVHSTIYCAAITVVSLNQKYTSPNKKNTDGYLPSWQRRLTNKINGLRRSIGKTQQYHDGNRNNRLLRTLPTDLKDIIQTINAETENKVRTYLDTLKQKLAAYSARLKRYRESYSRRRDNSLFSNNEKAFYSSLSKKYDNLNPPDLESQTNYWTSIWSQSNNHTKNTWINQEMKAQNSLQPMNEIVITQADLTAALKKIANWKAPGRDGLHSFWYKRFTACHELLVNNFNDVIRFPNNFPTFLTEGLTYLIPKTDNPDHPSLFRPITCLPTLYKILTSILCAKLEDHLELAQVMTDEQKGARRNVMGCKEQLVVDSVVMQQLRVGQRNAHIAYIDYKKAFDSVPHSWLKFVLTLYKVHPTLILFLETTMRAWRTTLSQKINNELVFSGSIPLRRGIFQGDSLSALWFCLSLNPISNTLKKTEYGVKLKNNVQDLLVSHLFYVDDLKVYAANDRQLRAMLKLVHDMSSDIGMTFGLEKCRTIKMVKGVLKESQPIEINNEVVIQGIEEPYKYLGIDQTHKIEHTTMKSKLSTEFEKRVKLIIKTKLNSKNIVKAINTYAISALTHSFGIIRWSDTDLDALNRRIRTLLTHKRMHHPNACTERVTLPRCLGGRGLKDVKAMYYEQLDNIRKYFYKNSDKPMYRAVIEADKNLTTLNLKSREYNPKTHITTNEDKIRMWSGKQLHGRFYNSVQNNYVDKSLSFMWATKGYLHPETEGFLMATQDQVIKTRNYAKYILGEDLSSDKCRKCGAVSETIDHILGSCNTLANTKYLTRHNQVAHIIHQKILIDRKMKTEIVPYYKYVPNEVEENDQFKIYWDKTIYTDHTIEHNRPDITLIDKKKHTTYLIDVSIPGTHNLQQKHTEKLNKYQALQHEIKRIWNMREVYIIPIILSSIGVIPKNLEKNLKMIQIPITVIEEMQKAAILQSLNIVRSFLAVGNAHES

SEQ ID NO: 842 - protein, 767 aa, Apoderus coryli
MKAQNSLQPMNEIVITQADLTAALKKIANWKAPGRDGLHSFWYKRFTACHELLVNNFNDVIRFPNNFPTFLTEGLTYLIPKTDNPDHPSLFRPITCLPTLYKILTSILCAKLEDHLELAQVMTDEQKGARRNVMGCKEQLVVDSVVMQQLRVGQRNAHIAYIDYKKAFDSVPHSWLKFVLTLYKVHPTLILFLETTMRAWRTTLSQKINNELVFSGSIPLRRGIFQGDSLSALWFCLSLNPISNTLKKTEYGVKLKNNVQDLLVSHLFYVDDLKVYAANDRQLRAMLKLVHDMSSDIGMTFGLEKCRTIKMVKGVLKESQPIEINNEVVIQGLEEPYKYLGIDQTHKIEHTTMKSKLSTEFEKRVKLIIKTKLNSKNIVKAINTYAISALTHSFGIIRWSDTDLDALNRRIRTLLTHKRMHHPNACTERVTLPRCLGGRGLKDVKAMYYEQLDNIRKYFYKNSDKPMYRAVIEADKNLTTLNLKSQEYNPKTHITTNEDKIRMWSGKQLHGRFYNSVQNNYVDKSLSFMWATKGYLHPETEGFLMATQDQVIKTRNYAKYILGEDLSSDKCRKCGAVSETIDHILGSCNTLANTKYLTRHNQVAHIIHQKILIDRKMKTEIVPYYKYVPNEVEENDQFKIYWDKTIYTDHTIEHNRPDITLIDKKKHTTYLIDVSIPGTHNLQQKHTEKLDKYQALQHEIKRIWNMREVYIIPIILSSIGVIPKNLEKNLKMIQIPITVIEEMQKAAILQSLNIVRSFLAVGNAHES

SEQ ID NO: 843 - protein, 957 aa, Apoderus coryli
MNRANSILEQTLNDGMNLEEVHSTIYCAAITVVSLNQKYTSPNKKNTDGYLPSWQRRLTNKINGLRRSIGKTQQYHDGNRNNRLLRTLPTDLKDIIQTINAETENKVRTYLDTLKQKLAAYSARLKRYRESYSRRRDNSLFSNNEKAFYSSLSKKYDNLNPPDLESQTNYWTSIWSQSNNHTKNTWINQEMKAQNSLQPMNEIVITQADLTAALKKIANWKAPGRDGLHSFWYKRFTACHELLVNNFNDVIRFPNNFPTFLTEGLTYLIPKTDNPDHPSLFRPITCLPTLYKILTSILCAKLEDHLELAQVMTDEQKGARRNVMGCKEQLVVDSVVVQQLRVGQRNAHIAYIDYKKAFDSVPHSWLKFVLTLYKVHPTLILFLETTMRAWRTTLSQKINNELVFSGSIPLRRGIFQGDSLSALWFCLSLNPISNTLKKTEYGVKLKNNVQDLLVSHLFYVDDLKVYAANDRQLRAMLKLVHDMSSDIGMTFGLEKCRTIKMVKGVLKESQPIEINNEVVIQGIEEPYKYLGIDQTHKIEHTTMKSKLSTEFEKRVKLIIKTKLNSKNIVKAINTYAISALTHSFGIIRWSDTDLDALNRRIRTLLTHKRMHHPNACTERVTLPRCLGGRGLKDVKAMYYEQLDNIRKYFYKNSDKPMYRAVIEADKNLTTLNLKSREYNPKTHITTNEDKIRMWSGKQLHGRFYNSVQNNYVDKSLSFMWATKGYLHPETEGFLMATQDQVIKTRNYAKYILGEDLSSDKCRKCGAVSETIDHILGSCNTLANTKYLTRHNQVAHIIHQKILIDRKIKTEIVPYYKYVPNEVEENDQFKIYWDKTIYTDHTIEHNRPDITLIDKKKHTTYLIDVSIPGTHNLQQKHTEKLNKYQALQHEIKRIWNMREVYIIPIILSSIGVIPKNLEKNLKMIQIPITVIEEMQKAAILQSLNIVRSFLAVGNAHES

SEQ ID NO: 844 - protein, 942 aa, Apoderus coryli
MNLEEVHSTIYCAAITVVSLNQKNTSPNKKNTDGYLPSWQRRLTNKINGLRRSIGKTQQYHDGNRNNRLLRTLPTDLKDIIQTINAETENKVRTYLDTLKQKLAAYSARLKRYRESYSRRRDNSLFSNNEKAFYSSLSKKYDNLNPPDLENQTNYWTSIWSQSNNHTKNTWINQEMKAQNSLQPMNEIVITQADLTAALKKIANWKAPGRDGLHSFWYKRFTVCHELLVNNFNDVIRFHNNFPTFLTEGLTYLIPKTDNPDHPSLFRPITCLPTLYKILTSILCAKLEDHLELAQVMTDEQKGARRNVMGCKEQLVVDSVVMQQLRGGQRNAHIAYIDYKKAFDSVPHSWLKFVLTLYKVHPTLILFLETTMRAWRTTLSQKINNELVFSGSIPLRRGIFQGDSLSALWFCLSLNPISNTLKRTEYGVKLKNNVQDLLVSHLFYVDDLKVYAANDRQLRAMLKLVHDMSSDIGMTFGLENCRTIKMVKGILKESQPIEINNEVVIQGLEEPYKYLGIDQTHKIEHTTMKSKLSTEFEKRVKLIIKTKLNSKNIVKAINTYAISALTHSFGIIRWSDTDLDALNRRIRTLLTHKRMHHPNACTERVTLPRCLGGRGLKDVKAMYYEQLDNIRKYFYKNSDKPMYRAVIDADKNLTTLNLKSREYNPKTHITTNEDKIRMWSGKQLHGRFYNSVQNNYVDKSLSFIWATKGYLHPETEGFLMATQDQVIKTQNYAKYILGEDLSSDKCRKCGAVSDTIDHILGSCNTLANTKYLTRHNQVAHIIHQKILIDRKMKTEIVPYYKYVPNEVEENDHFKIYWDKTIYTDHTIEHNRPDITLIDKKKHTTYLIDVSIPGTHNLQQKHTEKLNKYQALQHEVKRIWNMREVYIIPIILSSMGVIPKNLEKNLKMIQIPITVIEEMQKAAILQSLNIVRSFLAVGNAHES

SEQ ID NO: 845 - protein, 1199 aa, Apoderus coryli
MSQRRNERMRQPGMPQGTSGANAGRGSMRSVGGRLLNRRAPIAQETTANSNNVEIPPADPQPAANVREDNPPPIAPGRSRRMRWSTNLNKDVMRYYFIATSLETDFTDYRDRLKNMFAAEHPEHNDITAQRLSDQRRAIQRNNLLTQIEIQYILDRVREELNIPHTPNQSFEDDNVYGTHTPSDSPRGSPFNNIDIEIPQEPHQEDEILNTYHANLLKYLGMDPNVRPPIQKLRFNKNTGTLMNRANSILEQTLNDGMNLEEVHSTIYCAAITVVSLNQKYTSPNKKNTDGYLPSWQRRLTNKINGLRRSIGKTQQYHDGNRNNRLLRTLPTDLKDIIQTINAETENKVRTYLDTLKQKLAAYSARLKRYRESYSRRRDNSLFSNNEKAFYSSLSKKYDNLNPPDLESQTNYWTSIWSQSNNHSKNTWINQEMKAQNSLQPMNEIVITQADLTAALKKIANWKAPGRDGLHSFWYKRFTACHELLVNNFNDVIRFPNNFPTFLTEGLTYLIPKTDNPDHPSLFRPITCLPTLYKILTSILCAKLEDHLELAQVMTDEQKGARRNVMGCKEQLVVDSVVMQQLRVGQRNAHIAYIDYKKAFDSVPHSWLKFVLTLYKVHPTLILFLETTMRAWRTTLSQKINNELVFSGSIPLRRGIFQGDSLSALWFCLSLNPISNTLKKTEYGVKLKNNVQDLLVSHLFYVDDLKVYAANDRQLRAMLKLVHDMSSDIGMTFGLEKCRTIKMVKGVLKESQPIEINNEVVIQGLEEPYKYLGIDQTHKIEHTTMKSKLSTEFEKRVKLIIKTKLNSKNIVKAINTYAISALTHSFGIIRWSDTDLDALNRRIRTLLTHKRMHHPNACTERVTLPRCLGGRGLKDVKAMYYEQLDNIRKYFYKNSDKPMYRAVIEADKNLTTLNLKSREYNPKTHITTNEDKIRMWSGKQLHGRFYNSVQNNYVDKSLSFMWATKGYLHPETEGFLMATQDQVIKTRNYAKYILGEDLSSDKCRKCGAVSETIDHILGSCNTLANTKYLTRHNQVAHIIHQKILIDRKIKTEIVPYYKYVPNEVEENDQFKIYWDKTIYTDHTIEHNRPDITLIDKKKHTTYLIDVSIPGTHNLQQKHTEKLNKYQALQHEIKRIWNMREVYIIPIILSSIGVIPKNLEKNLKMIQIPITVIEEMQKAAILQSLNIVRSFLAVGNAHES

SEQ ID NO: 846 - protein, 1195 aa, Apoderus coryli
MSQRRNERMRQPGMPQGTSGANAGRGSMRSVGGRLLNRRAPIAQETTANSNNVEIPPADPQPAANVREDNPPPIAPGRSRRMRWSTNLNKDVMRYYFIATSLETDFTDYRDRLKNMFAAEHPEHNDITAQRLSDQRRAIQRNNLLTQIEIQYILDRVREELNIPHTPNQSFEDDNVYGTHTPSDSPRGSPFNNIDIEIPQEPHQEDEILNTYHANLLKYLGMDPNVRPPIQKLRFNKNTGTLINRANSILEQTLNDGMNLEEVHSTIYCAAITVVSLNQKYTSPNKKNTDGYLPSWQRRLTNKINGLRRSIGKTQQYHDGNRNNRLLRTLPTDLKDIIQTINAETENKVRTYLDTLKQKLAAYSARLKRYRESYSRRRDNSLFSNNEKAFYSSLSKKYDNLNPPDLESQTNYWTSIWSQSNNHTKNTWINQEMKAQNSLQPMNEIVITQADLTAALKKIANWKAPGRDGLQSFWYKRFTACHELLVNNFNDVIRFPNNFPTFLTEGLTYLIPKTDNPDHPSLFRPITCLPILTSILCAKLEDHLELAQVMTDEQKGARRNVMGCKEQLVVDSVVMQQLRVGQRNAHIAYIDYKKAFDSVPHSWLKFVLTLYKVHPTLILFLETTMRAWRTTLSQKINNELVFSGSIPLRRGIFQGDSLSALWFCLSLNPISNTLKKTEYGVKLKNNVQDLLVSHLFYVDDLKVYAANDRQLRAMLKLVHDMSSDIGMTFGLEKCRTIKMVKGVLKESQPIEINNEVVIQGLEEPYKYLGIDQTHKIEHTTMKSKLSTEFEKRVKLIIKTKLNSKNIVKAINTYAISALTHSFGIIRWSDTDLDALNRRIRTLLTHKRMHHPNACTERVTLPRCLGGRGLKDVKAMYYEQLDNIRKYFYKNSDKPMYRAVIEADKNLTTLNLKSQEYNPKTHITTNEDKIRMWSGKQLHGRFYNSVQNNYVDKSLSFMWATKGYLHPETEGFLMATQDQVIKTRNYAKYILGEDLSSDKCRKWGAVSETIDHILGSCNTLANTKYLTRHNQVAHIIHQKILIDRKMKTEIVPYYKYVPNEVEENDQFKIYWDKTIYTDHTIEHNRPDITLIDKKKHTTYLIDVSIPGTHNLQQKHTEKLNKYQALQHEIKRIWNMREVYIIPIILSSIGVIPKNLEKNLKMIQIPITVIEEMQKAAILQSLNIVRSFLAVGNAHES

SEQ ID NO: 847 - protein, 1189 aa, Apoderus coryli
MSQRRNERMRQPGMPQGTSGANAGRGSMRSVGGRLLNRRAPIAQETTANSNNVEIPPADPQPAANVREDNPPPIAPGRSRRMRWSTNLNKDVMRYYFIATSLETDFTDYRDRLKNMFAAEHPEHNDITAQRLSDQRRAIQRNNLLTQIEIQYILDRVREELNIPHTPNQSFEDDNVYGTHTPSDSPRGSPFNNIDIEIPQEPHQEDEILNTYHANLLKYLGMDPNVRPPIQKLRFNKNTGTLINRANSILEQTLNDGMNLEEVHSTIYCAAITVVSLNQKYTSPNKKNTDGYLPSWQRRLTNKINGLRRSIGKTQQYHDGNRNNRLLRTLPTDLKDIIQTINAETENKVRTYLDTLKQKLAAYSARLKRYRESYSRRRDNSLFSNNEKAFYSSLSKKYDNLNPPDLESQTNYWTSIWSQSNNHTKNTWINQEMKAQNSLQPMNEIVITQADLTAALKKIANWKAPGRDGLHSFWYKRFTACHELLVNNFNDVIRFPNNFPTFLTEGLTYLIPKTDNPDHPSLFRPITCLPTLYKILTSILCAKLEDHLELAQVMTDEQKGARRNVMGCKEQLVVDSVVMQQLRVGQRNAHIAYIDYKKAFDSVPHSWLKFVLTLYKVHPTLILFLETTMRAWRTTLSQKINNELVFSGSIPLRRGIFQGDSLSALWFCLSLNPISNTLKKTEYGVKLKNNVQDLLVSHLFYVDDLKVYAANDRQLRAMLKLVHDMSSDIGMTFGLEKCRTIKMVKGVLKESQPIEINNEVVIQGIEEPYKYLGIDQTHKIEHTTMKSKLSTEFEKRVKLIIKTKLNSKNIVKAINTYAISALTHSFGIIRWSDTDLDALNRRIRTLLTHKRMHHPNACTERVTLPRCLGGRGLKDVKAMYYEQLDNIRKYFYKNSDKPMYRAVIEADKNLTTLNLKSREYNPKTHITTNEDKIRMWSGKQLHGRFYNSVQNNYVDKSLSFMWATKGYLHPETEGFLMATQDQVIKTRNYAKYILGEDLSSDKCRKCGAVSETIDHILGSCNTLANTKYLTRHNQVAHIIHQKILIDRKMKTEIVPYYKYVPNEVEENDQFKIYWDKTIYTDHTIEHNRPDITLIDKKKHTTYLIDVSIPGTHNLQQKHTEKLNKYQALQHEIKRIWNMREVYIIPIILSSIGVIPKNLEKNLKMIQIPITVIEEMQKAAILQSLNISTL

SEQ ID NO: 848 - protein, 1118 aa, Apoderus coryli
MRWSTNLNKDVMRYYFIATSLETDFTDYRDRLKNMFAAEHPEHNDITAQRLSDQRRAIQRNNLLTQIEIQYILDRVREELNIPHTPNQSFEDDNVYGTHTPSDSPRGSPFNNIDIEIPQEPHQEDEILNTYHANLLKYLGMDPNVRPPIQKLRFNKNTGTLINRANSILEQTLNDGMNLEEVHSTIYCAAITVVSLNQKYTSPNKKNTDGYLPSWQRRLTNKINGLRRSIGKTQQYHDGNRNNRLLRTLPTDLKDIIQTINAETENKVRTYLDTLKQKLAAYSARLKRYRESYSRRRDNSLFSNNEKAFYSSLSKKYDNLNPPDLESQTNYWTSIWSQSNNHTKNTWINQEMKAQNSLQPMNEIVITQADLTAALKKIANWKAPGRDGLHSFWYKRFTACHELLVNNFNDVIRFPNNFPTFLTEGLTYLIPKTDNPDHPSLFRPITCLPTLYKILTSILCAKLEDHLELAQVMTDEQKGARRNVMGCKEQLVVDSVVMQQLRVGQRNAHIAYIDYKKAFDSVPHSWLKFVLTLYKVHPTLILFLETTMRAWRTTLSQKINNELVFSGSIPLRRGIFQGDSLSALWFCLSLNPISNTLKKTEYGVKLKNNVQDLLVSHLFYVDDLKVYAANDRQLRAMLKLVHDMSSDIGMTFGLEKCRMIKMVKGVLKESQPIEINNEVVIQGIEEPYKYLGIDQTHKIEHTTMKSKLSTEFEKRVKLIIKTKLNSKNIVKAINTYAISALTHSFGIIRWSDTDLDALNRRIRTLLTHKRMHHPNACTERVTLPRCLGGRGLKDVKAMYYEQLDNIRKYFYKNSDKPMYRAVIEADKNLTTLNLKSREYNPKTHITTNEDKIRMWSGKQLHGRFYNSVQNNYVDKSLSFMWATKGYLHPETEGFLMATQDQVIKTRNYAKYILGEDLSSDKCRKCGAVSETIDHILGSCNTLANTKYLTRHNQVAHIIHQKILIDRKMKTEIVPYYKYVPNEVEENDQFKIYWDKTIYTDHTIEHNRPDITLIDKKKHTTYLIDVSIPGTHNLQQKHTEKLNKYQALQHEIKRIWNMREVYIIPIILSSIGVIPKNLEKNLKMIQIPITVIEEMQKAAILQSLNIVRSFLAVGNAHES

SEQ ID NO: 849 - protein, 1199 aa, Apoderus coryli
MSQRRNERMRQPGMPQGTSGANAGRGSMRSVGGRLLNRRAPIAQETTANSNNVEIPPADPQPAANVREDNPPPIAPGRSRRMRWSTNLNKDVMRYYFIATSLETDFTDYRDRLKNMFAAEHPEHNDITAQRLSDQRRAIQRNNLLTQIEIQYILDRVREELNIPHTPNQSFEDDNVYGTHTPSDSPRGSPFNNIDIEIPQEPHQEDEILNTYHANLLKYLGMDPNVRPPIQKLRFNKNTGTLINRANSILEQTLNDGMNLEEVHSTIYCAAITVVSLNQKYTSPNKKNTDGYLPSWQRRLTNKINGLRRSIGKTQQYHDGNRNNRLLRTLPTDLKDIIQTINAETENKVRTYLDTLKQKLAAYSARLKRYRESYSRRRDNSLFSNNEKAFYSSLSKKYDNLNPPDLESQTNYWTSIWSQSNNHTKNTWINQEMKAQNSLQPMNEIVITQADLTAALKKIANWKAPGRDGLHSFWYKRFTACHELLVNNFNDVIRFPNNFPTFLTEGLTYLIPKTDNPDHPSLFRPITCLPTLYKILTSILCAKLEDHLELAQVMTDEQKGARRNVMGCKEQLVVDSVVMQQLRVGQRNAHIAYIDYKKAFDSVPHSWLKFVLTLYKVHPTLILFLETTMRAWRTTLSQKINNELVFSRSIPLRRGIFQGDSLSALWFCLSLNPISNTLKKTEYGVKLKNNVQDLLVSHLFYVDDLKVYAANDRQLRAMLKLVHDMSSDIGMTFGLEKCRTIKMVKGVLKESQPIEINNEVVIQGIEEPYKYLGIDQTHKIEHTTMKSKLSTEFEKRVKLIIKTKLNSKNIVKAINTYAISALTHSFGIIRWSDTDLDALNRRIRTLLTHKRMHHPNACTERVTLPRCLGGRGLKDVKAMYYEQLDNIRKYFYKNSDKPMYRAVIEADKNLTTLNLKSREYNPKTHITTNEDKIRMWSGKQLHGRFYNSVQNNYVDKSLSFMWATKGYLHPETEGFLMATQDQVIKTRNYAKYILGEDLSSDKCRKCGAVSETIDHILGSCNTLANTKYLTRHNQVAHIIHQKILIDRKMKTEIVPYYKYVPNEVEENDQFKIYWDKTIYTDHTIEHNRPDITLIDKKKHTTYLIDVSIPGTHNLQQKHTEKLNKYQALQHEIKRIWNMREVYIIPIILSSIGVIPKNLEKNLKMIQIPITVIEEMQKAAILQSLNIVRSFLAVGNAHES

SEQ ID NO: 850 - protein, 1118 aa, Apoderus coryli
MRWSTNLNKDVMRYYFIATSLETDFTDYRDRLKNMFAAEHPEHNDITAQRLSDQRRAIQRNNLLTQIEIQYILDRVREELNIPHTPNQSFEDDNVYGTHTPSDSPRGSPFNNIDIEIPQEPHQEDEILNTYHANLLKYLGMDPNVRPPIQKLRFNKNTGTLINRANSILEQTLNDGMNLEEVHSTIYCAAITVVSLNQKYTSPNKKNTDGYLPSWQRRLTNKINGLRRSIGKTQQYHDGNRNNRLLRTLPTDLKDIIQTINAETENKVRTYLDTLKQKLAAYSARLKRYRESYSRRRDNSLFSNNEKAFYSSLSKKYDNLNPPDLESQTNYWTSIWSQSNNHTKNTWINQEMKAQNSLQPMNEIVITQADLTAALKKIANWKAPGRDGLHSFWYKRFTACHELLVNNFNDVIRFPNNFPTFLTEGLTYLIPKTDNPDHPSLFRPITCLPTLYKILTSILCAKLEDHLELAQVMTDEQKGARRNVMGCKEQLVVDSVVMQQLRVGQRDAHIAYIDYKKAFDSVPHSWLKFVLTLYKVHPTLILFLETTMRAWRTTLSQKINNELVFSGSIPLRRGIFQGDSLSALWFCLSLNPISNTLKKTEYGVKLKNNVQDLLVSHLFYVDDLKVYAANDRQLRAMLKLVHDMSSDIGMTFGLEKCRTIKMVKGVLKESQPIEINNEVVIQGLEEPYKYLGIDQTHKIEHTTMKSKLSTEFEKRVKLIIKTKLNSKNIVKAINTYAISALTHSFGIIRWSDTDLDALNRRIRTLLTHKRMHHPNACTERVTLPRCLGGRGLKDVKAMYYEQLDNIRKYFYKNSDKPMYRAVIEADKNLTTLNLKSREYNPKTHITTNEDKIRMWSGKQLHGRFYNSVQNNYVDKSLSFMWATKGYLHPETEGFLMATQDQVIKTRNYAKYILGEDLSSDKCRKCGAVSETIDHILGSCNTLANTKYLTRHNQVAHIIHQKILIDRKMKTEIVPYYKYVPNEVEENDQFKIYWDKTIYTDHTIEHNRPDITLIDKKKHTTYLIDVSIPGTHNLQQKHTEKLNKYQALQHEIKRIWNMREVYIIPIILSSIGVIPKNLEKNLKMIQIPITVIEEMQKAAILQSLNIVRSFLAVGNAHES

SEQ ID NO: 851 - protein, 1199 aa, Apoderus coryli
MSQRRNERMRQPGMPQGTSGANAGRGSMRSVGGRLLNRRAPIAQETTANSNNVEIPPADPQPAANVREDNPPPIAPGRSRRMRWSTNLNKDVMRYYFIATSLETDFTDYRDRLKNMFAAEHPEHNDITAQRLSDQRRAIQRNNLLTQIEIQYILDRVREELNIPHTPNQSFEDDNVYGTHTPSDSPRGSPFNNIDIEIPQEPHQEDEILNTYHANLLKYLGMDPNVRPPIQKLRFNKNTGTLINRANSILEQTLNDGMNLEEVHSTIYCAAITVVSLNQKYTSPNKKNTDGYLPSWQRRLTNKINGLRRSIGKTQQYHDGNRNNRLLRTLPTDLKDTIQTINAETENKVRTYLDTLKQKLAAYSARLKRYRESYSRRRDNSLFSNNEKAFYSSLSKKYDNLNPPDLESQTNYWTSIWSQSNNHTKNTWINQEMKAQNSLQPMNEIVITQADLTAAFKKIANWKAPGRDGLHSFWYKRFTACHELLVNNFNDVIRFPNNFPTFLTEGLTYLIPKTDNPDHPSLFRPITCLPTLYKILTSILCAKLEDHLELAQVMTDEQKGARRNVMGCKEQLVVDSVVVQQLRVGQRNAHIAYIDYKKAFDSVPHSWLKFVLTLYKVHPTLILFLETTMRAWRTTLSQKINNELVFSGSIPLRRGIFQGDSLSALWFCLSLNPISNTLKKTEYGVKLKNNVQDLLVSHLFYVDDLKVYAANDRQLRAMLKLVHDMSSDIGMTFGLEKCRTIKMVKGVLKESQPIEINNEVVIQGIEEPYKYLGIDQTHKIEHTTMKSKLSTEFEKRVKLIIKTKLNSKNIVKAINTYAISALTHSFGIIRWSDTDLDALNRRIRTLLTHKRMHHPNACTERVTLPRCLGGRGLKDVKAMYYEQLDNIRKYFYKNSDKPMYRAVIEADKNLTTLNLKSREYNPKTHITTNEDKIRMWSGKQLHGRFYNSVQNNYVDKSLSFMWATKGYLHPETEGFLMATQDQVIKTRNYAKYILGEDLSSDKCRKCGAVSETIDHILGSCNTLANTKYLTRHNQVAHIIHQKILIDRKMKTEIVPYYKYVPNEVEENDQFKIYWDKTIYTDHTIEHNRPDITLIDKKKHTTYLIDVSIPGTHNLQQKHTEKLNKYQALQHEIKRIWNMREVYIIPIILSSIGVIPKNLEKNLKMIQIPITVIEEMQKAAILQSLNIVRSFLAVGNAHES

SEQ ID NO: 852 - protein, 1199 aa, Apoderus coryli
MSQRRNERMRQPGMPQGTSGANAGRGSMRSVGGRLLNRRAPIAQETTANSNNVEIPPADPQPAANVREDNPPPIAPGRSRRMRWSTNLNKDVMRYYFIATSLETDFTDYRDRLKNMFAAEHPEHNDITAQRLSDQRRAIQRNNLLTQIEIQYILDRVREELNIPHTPNQSFEDDNVYGTHTPSDSPRGSPFNNIDIEIPQEPHQEDEILNTYHANLLKYLGMDPNVRPPIQKLRFNKNTGTLINRANSILEQTLNDGMNLEEVHSTIYCAAITVVSLNQKYTSPNKKNTDGYLPSWQRRLTNKINGLRRSIGKTQQYHDGNRNNRLLRTLPTDLKDIIQTINAETENKVRTYLDTLKQKLAAYSARLKRYRESYSRRRDNSLFSNNEKAFYSSLSKKYDNLNPPDLESQTNYWTSIWSQSNNHTKNTWINQEMKAHNSLQPMNEIVITQADLTAALKKIANWKAPGRDGLHSFWYKRFTACHELLVNNFNDVIRFPNNFPTFLTEGLTYLIPKTDNPDHPSLFRPITCLPTLYKILTSILCAKLEDHLKLAQVMTDEQKGARRNVMGCKEQLVVDSVVMQQLRVGQRNAHIAYIDYKKAFDSVPHSWLKFVLTLYKVHPTLILFLETTMRAWRTTLSQKINNELVFSGSIPLRRGIFQGDSLSALWFCLSLNPISNTLKKTEYGVKLKNNVQDLLVSHLFYVDDLKVYAANDRQLRAMLKLVHDMSSDIGMTFGLEKCRTIKMVKGVLKESQPIEINNEVVIQGIEEPYKYLGIDQTHKIEHTTMKSKLSTEFEKRVKLIIKTKLNSKNIVKAINTYAISALTHSFGIIRWSDTDLDALNRRIRTLLTHKRMHHPNACTERVTLPRCLGGRGLKDVKAMYYEQLDNIRKYFYKNSDKPMYRAVIEADKNLTTLNLKSREYNPKTHITTNEDKIRMWSGKQLHGRFYNSVQNNYVDKSLSFMWATKGYLHPETEGFLMATQDQVIKTRNYAKYILGEDLSSDKCRKCGAVSETIDHILGSCNTLANTKYLTRHNQVAHIIHQKILIDRKMKTEIVPYYKYVPNEVEENDQFKIYWDKTIYTDHTIEHNRPDITLIDKKKHTTYLIDVSIPGTHNLQQKHTEKLNKYQALQHEIKRIWNMREVYIIPIILSSIGVIPKNLEKNLKMIQIPITVIEEMQKAAILQSLNIVRSFLAVGNAHES

SEQ ID NO: 853 - protein, 1177 aa, Apoderus coryli
MIFIIMRSVGGRLLNRRAPIAQETTANSNNVEIPPADPQPAANVREDNPPPIAPGRSRRMRWSTNLNKDVMRYYFIATSLETDFTDYRDRLKNMFAAEHPEHHDITAQRLSDQRRAIQRNNLLTQIEIQYILDRVREELNIPHTPNQSFEDDNVYGTHTPSDSPRGSPFNNIDIEIPQEPHQEDEILNTYHANLLKYLGMDPNVRPPIQKLRFNKNTGTLMNRANSILEQTLNDGMNLEEVHSTIYCAAITVVSLNQKYTSPNKKNTDGYLPSWQRRLTNKINGLRRSIGKTQQYHDGNRNNRLLRTLPTDLKDIIQTINAETENKVRTYLDTLKQKLAAYSARLKRYRESYSRRRDNSLFSNNEKAFYSSLSKKYDNLNPPDLESQTNYWTSIWSQSNNHSKNTWINQEMKAQNSLQPMNEIVITQADLTAALKKIANWKAPGRDGLHSFWYKRFTACHELLVNNFNDVIRFPNNFPTFLTEGLTYLIPKTDNPDHPSLFRPITCLPTLYKILTSILCAKLEDHLELAQVMTDEQKGARRNVMGCKEQLVVDSVVMQQLRVGQRNAHIAYIDYKKAFDSVPHSWLKFVLTLYKVHPTLILFLETTMRAWRTTLSQKINNELVFSGSIPLRRGIFQGDSLSALWFCLSLNPISNTLKKTEYGVKLKNNVQDLLVSHLFYVDDLKVYAANDRQLRAMLKLVHDMSSDIGMTFGLEKCRTIKMVKGVLKESQPIEINNEVVIQGLEEPYKYLGIDQTHKIEHTTMKSKLSTEFEKRVKLIIKTKLNSKNIVKAINTYAISALTHSFGIIRWSDTDLDALNRRIRTLLTHKRMHHPNACTERVTLPRCLGGRGLKDVKAMYYEQLDNIRKYFYKNSDKPMYRAVIEADKNLTTLNLKSREYNPKTHITTNEDKIRMWSGKQLHGRFYNSVQNNYVDKSLSFMWATKGYLHPETEGFLMATQDQVIKTRNYAKYILGEDLSSDKCRKCGAVSETIDHILGSCNTLANTKYLTRHNQVAHIIHQKILIDRKIKTEIVPYYKYVPNEVEENDQFKIYWDKTIYTDHTIEHNRPDITLIDKKKHTTYLIDVSIPGTHNLQQKHTEKLNKYQALQHEIKRIWNMREVYIIPIILSSIGVIPKNLEKNLKMIQIPITVIEEMQKAAILQSLNIVRSFLAVGNAHES

SEQ ID NO: 854 - protein, 978 aa, Apoderus coryli
MDPNVRPPIQKLRFNKNTGTLINRANSILEQTLNDGMNLEEVHSTIYCAAITVVSLNQKYTSPNKKNTDGYLPSWQRRLTNKINGLRRSIGKTQQYHDGNRNNRLLRTLPTDLKDIIQTINAETENKVRTYLDTLKQKLAAYSARLKRYRESYSRRRDNSLFSNNEKAFYSSLSKKYDNLNPPDLESQTNYWTSIWSQSNNHTKNTWINQEMKAQNSLQPMNEIVITQADLTAALKKIANWKAPGRDGLHSFWYKRFTACHELLVNNFNDVIRFPNNFPTFLTEGLTYLIPKTDNPDHPSLFRPITCLPTLYKILTSILCAKLEDHLELAQVMTDEQKGARRNVMGCKEQLVVDSVVMQQLRVGQRNAHIAYIDYKKAFDSVPHSWLKFVLTLYKVHPTLILFLETTMRAWRTTLSQKINNELVFSGSIPLRRGIFQGDSLSALWFCLSLNPISNTLKKTEYGVKLKNNVQDLLVSHLFYVDDLKVYAANDRQLRAMLKLVHDMSSDIGMTFGLEKCRTIKMVKGVLKESQPIEINNEVVIQGIEEPYKYLGIDQTHKIEHTTMKSKLSTEFEKRVKLIIKTKLNSKNIVKAINTYAISALTHSFGIIRWSDTDLDALNRRIRTLLTHKRMHHPNACTERVTLPRCLGGRGLKDVKAMYYEQLDNIRKYFYKNSDKPMYRAVIEADKNLTTLNLKSREYNPKTHITTNEDKIRMWSGKQLHGRFYNSVQNNYVDKSLSFMWATKGYLHPETEGFLMATQDQVIKTRNYAKYILGEDLSSDKCRKCGAVSETIDHILGSCNTLANTKYLTRHNQVAHIIHQKILIDRKMKTEIVPYYKYVPNEVEENDQFKIYWDKTIYTDHTIEHNRPDITLIDKKKHTTYLIDVSIPGTHNLQQKHTEKLNKYQALQHEIKRIWNMREVYIIPIILSSIGVIPKNLEKNLKMIQIPITVIEEMQKAAILQSLNIVRSFLAAGNAHES

SEQ ID NO: 855 - protein, 1199 aa, Apoderus coryli
MSQRRNERMRQPGMPQGTSGANAGRGSMRSVGGRLLNRRAPIAQETTANSNNVEIPPADPQPAANVREDNPPPIAPGRSRRMRWSTNLNKDVMRYYFIATSLETDFTDYRDRLKNMFAAEHPEHNDITAQRLSDQRRAIQRNNLLTQIEIQYILDRVREELNIPHTPNQSFEDDNVYGTHTPSDSPRGSPFNNIDIEIPQEPHQEDEILNTYHANLLKYLGMDPNVRPPIQKLRFNKNTGTLMNRANSILEQTLNDGMNLEEVHSTIYCAAITVVSLNQKYTSPNKKNTDGYLPSWQRRLTNKINGLRRSIGKTQQYHDGNRNNRLLRTLPTDLKDIIQTINAETENKVRTYLDTLKQKLAAYSARLKRYRESYSRRRDNSLFSNNEKAFYSSLSKKYDNLNPPDLESQTNYWTSIWSQSNNHSKNTWINQEMKAQNSLQPMNEIVITQADLTAALKKIANWKAPGRDGLHSFWYKRFTACHELLVNNFNDVIRFPNNFPTFLTEGLTYLIPKTDNPDHPSLFRPITCLPTLYKILTSILCAKLEDHLELAQVMTDEQKGARRNVMGCKEQLVVDSVVMQQLRVGQRNAHIAYIDYKKAFDSVPHSWLKFVLTLYKVHPTLILFLETTMRAWRTTLSQKINNELVFSGSIPLRRGIFQGDSLSALWFCLSLNPISNTLKKTEYGVKLKNNVQDLLVSHLFYVDDLKVYAANDRQLKAMLKLVHDMSSDIGMTFGLEKCRTIKMVKGVLKESQPIEINNEVVIQGLEEPYKYLGIDQTHKIEHTTMKSKLSTEFEKRVKLIIKTKLNSKNIVKAINTYAISALTHSFGIIRWSDTDLDALNRRIRTLLTHKRMHHPNACTERVTLPRCLGGRGLKDVKAMYYEQLDNIRKYFYKNSDKPMYRAVIEADKNLTTLNLKSREYNPKTHITTNEDKIRMWSGKQLHGRFYNSVQNNYVDKSLSFMWATKGYLHPETEGFLMATQDQVIKTRNYAKYILGEDLSSDKCRKCGAVSETIDHILGSCNTLANTKYLTRHNQVAHIIHQKILIDRKIKTEIVPYYKYVPNEVEENDQFKIYWDKTIYTDHTIEHNRPDITLIDKKKHTTYLIDVSIPGTHNLQQKHTEKLNKYQALQHEIKRIWNMREVYIIPIILSSIGVIPKNLEKNLKMIQIPITVIEEMQKAAILQSLNIVRSFLAVGNAHES

SEQ ID NO: 856 - protein, 1199 aa, Apoderus coryli
MSQRRNERMRQPGMPQGTSGANAGRGSMRSVGGRLLNRRAPIAQETTANSNNVEIPPADPQPAANVREDNPPPIAPGRSRRMRWSTNLNKDVMRYYFIATSLETDFTDYRDRLKNMFAAEHPEHNDITAQRLSDQRRAIQRNNLLTQIEIQYILDRVREELNIPHTPNQSFEDDNVYGTHTPSDSPRGSPFNNIDIEIPQEPHQEDEILNTYHANLLKYLGMDPNVRPPIQKLRFNKNTGTLINRANSILEQTLNDGMNLEEVHSTIYCAAITVVSLSQKYTSPNKKNTDGYLPSWQRRLTNKINGLRRSIGKTQQYHDGNRNNRLLRTLPTDLKDIIQTINAETENKVRTYLDTLKQKLAAYSARLKRYRESYSRRRDNSLFSNNEKAFYSSLSKKYDNLNPPDLESQTNYWTSIWSQSNNHTKNTWINQEMKAQNSLQPMNEIVITQADLTAALKKIANWKAPGRDGLHSFWYKRFTACHELLVNNFNDVIRFPNNFPTFLTEGLTYLIPKTDNPDHPSLFRPITCLPTLYKILTSILCAKLEDHLELAQVMTDEQKGARRNVMGCKEQLVVDSVVMQQLRVGQRNAHIAYIDYKKAFDSVPHSWLKFVLTLYKVHPTLILFLETTMRAWRTTLSQKINNELVFSGSIPLRRGIFQGDSLSALWFCLSLNPISNTLKKTEYGVKLKNNVQDLLVSHLFYVDDLKVYAANDRQLRAMLKLVHDMSSDIGMTFGLEKCRTIKMVKGVLKESQPIEINNEVVIQGLEEPYKYLGIDQTHKIEHTTMKSKLSTEFEKRVKLIIKTKLNSKNIVKAINTYAISALTHSFGIIRWSDTDLDALNRRIRTLLTHKRMHHPNACTERVTLPRCLGGRGLKDVKAMYYEQLDNIRKYFYKNSDKPMYRAVIEADKNLTTLNLKSREYNPKTHITTNEDKIRMWSGKQLHGRFYNSVQNNYVDKSLSFMWATKGYLHPETEGFLMATQDQVIKTRNYAKYILGEDLSSDKCRKCGAVSETIDHILGSCNTLANTKYLTRHNQVAHIIHQKILIDRKIKTEIVPYYKYVPNEVEENDQFKIYWDKTIYTDHTIEHNRPDITLIDKKKHTTYLIDVSIPGTHNLQQKHTEKLNKYQALQHEIKRIWNMREVYIIPIILSSIGVIPKNLEKNLKMIQIPITVIEEMQKAAILQSLNIVRSFLAVGNAHES

SEQ ID NO: 857 - protein, 1199 aa, Apoderus coryli
MSQRRNERMRQPGMPQGTSGANAGRGSMRSVGGRLLNRRAPIAQETTANSNNVEIPPADPQPAANVREDNPPPIAPGRSRRMRWSTNLNKDVMRYYFIATSLETDFTDYRDRLKNMFAAEHPEHNDITAQRLSDQRRAIQRNNLLTQIEIQYILDRVREELNIPHTPNQSFEDDNVYGTHTPSDSPRGSPFNNIDIEIPQEPHQEDEILNTYHANLLKYLGMDPNVRPPIQKLRFNKNTGTLINRANSILEQTLNDGMNLEEVHSTIYCAAITVVSLNQKYTSPNKKNTDGYLPSWQRRLTSKINGLRRSIGKTQQYHDGNRNNRLLRTLPTDLKDIIQTINAETENKVRTYLDTLKQKLAAYSARLKRYRESYSRRRDNSLFSNNEKAFYSSLSKKYDNLNPPDLESQTNYWTSIWSQSNNHTKNTWINQEMKAQNSLQPMNEIVITQADLTAALKKIANWKAPGRDGLHSFWYKRFTACHELLVNNFNDVIRFPNNFPTFLTEGLTYLIPKTDNPDHPSLFRPITCLPTLYKILTSILCAKLEDHLELAQVMTDEQKGARRNVMGCKEQLVVDSVVMQQLRVGQRNAHIAYIDYKKAFDSVPHSWLKFVLTLYKVHPTLILFLETTMRAWRTTLSQKINNELVFSGSIPLRRGIFQGDSLSALWFCLSLNPISNTLKKTEYGVKLKNNVQDLLVSHLFYVDDLKVYAANDRQLRAMLKLVHDMSSDIGMTFGLEKCRTIKMVKGVLKESQPIEINNEVVIQGIEEPYKYLGIDQTHKIEHTTMKSKLSTEFEKRVKLIIKTKLNSKNIVKAINTYAISALTHSFGIIRWSDTDLDALNRRIRTLLTHKRMHHPNACTERVTLPRCLGGRGLKDVKAMYYEQLDNIRKYFYKNSDKPMYRAVIEADKNLTTLNLKSREYNPKTHITTNEDKIRMWSGKQLHGRFYNSVQNNYVDKSLSFMWATKGYLHPETEGFLMATQDQVIKTRNYAKYILGEDLSSDKCRKCGAVSETIDHILGSCNTLANTKYLTRHNQVAHIIHQKILIDRKMKTEIVPYYKYVPNEVEENDQFKIYWDKTIYTDHTIEHNRPDITLIDKKKHTTYLIDVSIPGTHNLQQKHTEKLNKYQALQHEIKRIWNMREVYIIPIILSSIGVIPKNLEKNLKMIQIPITVIEEMQKAAILQSLNIVRSFLAVGNAHES

SEQ ID NO: 858 - protein, 1199 aa, Apoderus coryli
MSQRRNERMRQPGMPQGTSGANAGRGSMRSVGGRLLNRRAPIAQETTANSNNVEIPPADPQPAANVREDNPPPIAPGRSRRMRWSTNLNKDVMRYYFIATSLETDFTDYRDRLKNMFAAEHPEHNDITAQRLSDQRRAIQRNNLLTQIEIQYILDRVREELNIPHTPNQSFEDDNVYGTHTPSDSPRGSPFNNIDIEIPQEPHQEDEILNTYHANLLKYLGMDPNVRPPIQKLRFNKNTGTLINRANSILEQTLNDGMNLEEVHSTIYCAAITVVSLNQKYTSPNKKNTDGYLPSWQRRLTNKINGLRRSIGKTQQYHDGNRNNRLLRTLPTDLKDIIQTINAETENKVRTYLDTLKQKLAAYSARLKRYRESYSRRRDNSLFSNNEKAFYSSLSKKYDNLNPPDLESQTNYWTSIWSQSNNHTKNTWINQEMKAQNSLQPMNEIVITQADLTAALKKIANWKAPGRDGLHSFWYKRFTACHELLVNNFNDVIRFPNNFPTFLTEGLTYLIPKTDNPDHPSLFRPITCLPTLYKILTSILCAKLEDHLELAQVMTDEQKGARRNVMGCKEQLVVDSVVMQQLRVGQRNAHIAYIDYKKAFDSVPHSWLKFVLTLYKVHPTLILFLETTMRAWRTTLSQKINNELVFSGSIPLRRGIFQGDSLSALWFCLSLNPISNTLKKTEYGVKLKNNVQDLLVSHLFYVDDLKVYAANDRQLRAMLKLVHDMSSDIGMAFGLEKCRTIKMVKGVLKESQPIEINNEVVIQGIEEPYKYLGIDQTHKIEHTTMKSKLSTEFEKRVKLIIKTKLNSKNIVKAINTYAISALTHSFGIIRWSDTDLDALNRRIRTLLTHKRMHHPNACTERVTLPRCLGGRGLKDVKAMYYEQLDNIRKYFYKNSDKPMYRAVIEADKNLTTLNLKSREYNPKTHITTNEDKIRMWSGKQLHGRFYNSVQNNYVDKSLSFMWATKGYLHPETEGFLMATQDQVIKTRNYAKYILGEDLSSDKCRKCGAVSETIDHILGSCNTLANTKYLTRHNQVAHIIHQKILIDRKMKTEIVPYYKYVPNEVEENDQFKIYWDKTIYTDHTIEHNRPDITLIDKKKHTTYLIDVSIPGTHNLQQKHTEKLNKYQALQHEIKRIWNMREVYIIPIILSSIGVIPKNLEKNLKMIQIPITVIEEMQKAAILQSLNIVRSFLAVGNAHES

SEQ ID NO: 859 - protein, 1118 aa, Apoderus coryli
MRWSTNLNKDVMRYYFIATSLETDFTDYRDRLKNMFAAEHPEHNDITAQRLSDQRRAIQRNNLLTQIEIQYILDRVREELNIPHTPNQSFEDDNVYGTHTPSDSPRGSPFNNIDIEIPQEPHQEDEILNTYHANLLKYLGMDPNVRPPIQKLRFNKNTGTLINRANSILEQTLNDGMNLEEVHSTIYCAAITVVSLNQKYTSPNKKNTDGYLPSWQRRLTNKINGLRRSIGKTQQYHDGNRNNRLLRTLPTDLKDIIQTINAETENKVRTYLDTLKQKLAAYSARLKRYRESYSRRRDNSLFSNNEKAFYSSLSKKYDNLNPPDLESQTNYWTSIWSQSNNHTKNTWINQEMKAQNSLQPMNEIVITQADLTAALKKIANWKAPGRDGLHSFWYKRFTACHELLVNNFNDVIRFPNNFPTFLTEGLTYLIPKTDNPDHPSLFRPITCLPTLYKILTSILCAKLEDHLELAQVMTDEQKGARRNVMGCKEQLVVDSVVMQQLRVGQRNAHIAYIDYKKAFDSVPHSWLKFVLTLYKVHPTLILFLETTMRAWRTTLSQKINNELVFSGSIPLRRGIFQGDSLSALWFCLSLNPISNTLKKTEYGVKLKNNVQDLLVSHLFYVDDLKVYAANDRQLRAMLKLVHDMSSDIGMTFGLEKCRTIKMVKGVLKESQPIEINNEVVIQGIEEPYKYLGIDQTHKIEHTTMKSKLSTEFEKRVKLIIKTKLNSKNVVKAINTYAISALTHSFGIIRWSDTDLDALNRRIRTLLTHKRIHHPNACTERVTLPRCLGGRGLKDVKAMYYEQLDNIRKYFYKNSDKPMYRAVIEADKNLTTLNLKSREYNPKTHITTNEDKIRMWSGKQLHGRFYNSVQNNYVDKSLSFMWATKGYLHPETEGFLMATQDQVIKTRNYAKYILGEDLSSDKCRKCGAVSETIDHILGSCNTLANTKYLTRHNQVAHIIHQKILIDRKMKTEIVPYYKYVPNEVEENDQFKIYWDKTIYTDHTIEHNRPDITLIDKKKHTTYLIDVSIPGTHNLQQKHTEKLNKYQALQHEIKRIWNMREVYIIPIILSSIGVIPKNLEKNLKMIQIPITVIEEMQKAAILQSLNIVRSFLAVGNAHES

SEQ ID NO: 860 - protein, 1199 aa, Apoderus coryli
MSQRRNERMRQPGMPQGTSGANAGRGSMRSVGGRLLNRRAPIAQETTANSNNVEIPPADPQPAANVREDNPPPIAPGRSRRMRWSTNLNKDVMRYYFIATSLETDFTDYRDRLKNMFAAEHPEHNDITAQRLSDQRRAIQRNNLLTQIEIQYILDRVREELNIPHTPNQSFEDDNVYGTHTPSDSPRGSPFNNIDIEIPQEPHQEDEILNTYHANLLKYLGMDPNVRPPIQKLRFNKNTGTLINRANSILEQTLNDGMNLEEVHSTIYCAAITVVSLNQKYTSPNKKNTDGYLPSWQRRLTNKINGLRRSIGKTQQYHDGNRNNRLLRTLPTDLKDIIQTINAETENKVRTYLDTLKQKLAAYSARLKRYRESYSRRRDNSLFSNNEKAFYSSLSKKYDNINPPDLESQTNYWTSIWSQSNNHTKNTWINQEMKAQNSLQPMNEIVITQADLTAALKKIANWKAPGRDGLHSFWYKRFTACHELLVNNFNDVIRFPNNFPTFLTEGLTYLIPKTDNPDHPSLFRPITCLPTLYKILTSILCAKLEDHLELAQVMTDEQKGARRNVMGCKEQLVVDSVVMQQLRVGQRNAHIAYIDYKKAFDSVPHSWLKFVLTLYKVHPTLILFLETTMRAWRTTLSQKINNELVFSGSIPLRRGIFQGDSLSALWFCLSLNPISNTLKKTEYGVKLKNNVQDLLVSHLFYVDDLKVYAANDRQLRAMLKLVHDMSSDIGMTFGLEKCRTIKMVKGVLKESQPIEINNEVVIQGIEEPYKYLGIDQTHKIEHTTMKSKLSTEFEKRVKLIIKTKLNSKNIVKAINTYAISALTHSFGIIRWSDTDLDALNRRIRTLLTHKRMHHPNACTERVTLPRCLGGRGLKDVKAMYYEQLDNIRKYFYKNSDKPMYRAVIEADKNLTTLNLKSREYNPKTHITTNEDKIRMWSGKQLHGRFYNSVQNNYVDKSLSFMWATKGYLHPETEGFLMATQDQVIKTRNYAKYILGEDLSSDKCRKCGAVSETIDHILGSCNTLANTKYLTRHNQVAHIIHQKILIDRKMKTEIVPYYKYVPNEVEENDQFKIYWDKTIYTDHTIEHNRPDITLIDKKKHTTYLIDVSIPGTHNLQQKHTEKLNKYQALQHEIKRIWNMREVYIIPIILSSIGVIPKNLEKNLKMIQIPITVIEEMQKAAILQSLNIVRSFLAVGNAHES

SEQ ID NO: 861 - protein, 1240 aa, Apoderus coryli
MSQENETKHVLLKCKKKRSHEVCFWKKIICECSLSQRRGSSINILYNNNNNNNNNNNNNNNNNAGRGSMRSVGGRLLNRRAPIAQETTANSNNVEIPPADPQPAANVREDNPPPIAPGRSRRMRWSTNLNKDVMRYYFIATSLETDFTDYRDRLKNMFAAEHPEHNDITAQRLSDQRRAIQRNNLLTQIEIQYILDRVREELNIPHTPNQSFEDDNVYGTHTPSDSPRGSPFNNIDIEIPQEPHQEDEILNTYHANLLKYLGMDPNVRPPIQKLRFNKNTGTLINRANSILEQTLNDGMNLEEVHSTIYCAAITVVSLNQKYTSPNKKNTDGYLPSWQRRLTNKINGLRRSIGKTQQYHDGNRNNRLLRTLPTDLKDIIQTINAETENKVRTYLDTLKQKLAAYSARLKRYRESYSRRRDNSLFSNNEKAFYSSLSKKYDNLNPPDLESQTNYWTSIWSQSNNHTKNTWINQEMKAQNSLQPMNEIVITQADLTAALKKIANWKAPGRDGLHSFWYKRFTACHELLVNNFNDVIRFPNNFPTFLTEGLTYLIPKTDNPDHPSLFRPITCLPTLYKILTSILCAKLEDHLELAQVMTDEQKGARRNVMGCKEQLVVDSVVMQQLRVGQRNAHIAYIDYKKAFDSVPHSWLKFVLTLYKVHPTLILFLETTMRAWRTTLSQKINNELVFSGSIPLRRGIFQGDSLSALWFCLSLNPISNTLKKTEYGVKLKNNVQDLLVSHLFYVDDLKVYAANDRQLRAMLKLVHDMSSDIGMTFGLEKCRTIKMVKGVLKESQPIEINNEVVIQGIEEPYKYLGIDQTHKIEHTTMKSKLSTEFEKRVKLIIKTKLNSKNIVKAINTYAISALTHSFGIIRWSDTDLDALNRRIRTLLTHKRMHHPNACTERVTLPRCLGGRGLKDVKAMYYEQLDNIRKYFYKNSDKPMYRAVIEADKNLTTLNLKSREYNPKTHITTNEDKIRMWSGKQLHGRFYNSVQNNYVDKSLSFMWTTKGYLHPETEGFLMATQDQVIKTRNYAKYILGEDLSSDKCRKCGAVSETIDHILGSCNTLANTKYLTRHNQVAHIIHQKILIDRKMKTEIVPYYKYVPNEVEENDQFKIYWDKTIYTDHTIEHNRPDITLIDKKKHTTYLIDVSIPGTHNLQQKHTEKLNKYQALQHEIKRIWNMREVYIIPIILSSIGVIPKNLEKNLKMIQIPITVIEEMQKAAILQSLNIVRSFLAVGNAHES

SEQ ID NO: 862 - protein, 1199 aa, Apoderus coryli
MSQRRNERMRQPGMPQGTSGANAGRGSMRSVGGRLLNRRAPIAQETTANSNNVEIPPADPQPAANVREDNPPSIAPGRSRRMRWSTNLNKDVMRYYFIATSLETDFTDYRDRLKNMFAAEHPEHNDITAQRLSDQRRAIQRNNLLTQIEIQYILDRVREELNIPHTPNQSFEDDNVYGTHTPSDSPRGSPFNNIDIEIPQEPHQEDEILNTYHANLLKYLGMDPNVRPPIQKLRFNKNTGTLINRANSILEQTLNDGMNLEEVHSTIYCAAITVVSLNQKYTSPNKKNTDGYLPSWQRRLTNKINGLRRSIGKTQQYHDGNRNNRLLRTLPTDLKDIIQTINAETENKVRTYLDTLKQKLAAYSARLKRYRESYSRRRDNSLFSNNEKAFYSSLSKKYDNLNPPDLESQTNYWTSIWSQSNNHTKNTWINQEMKAQNSLQPMNEIVITQADLTAALKKIANWKAPGRDGLHSFWYKRFTACHELLVNNFNDVIRFPNNFPTFLTEGLTYLIPKTDNPDHPSLFRPITCLPTLYKILTSILCAKLEDHLELAQVMTDEQKGARRNVMGCKEQLVVDSVVMQQLRVGQRNAHIAYIDYKKAFDSVPHSWLKFVLTLYKVHPTLILFLETTMRAWRTTLSQKINNELVFSGSIPLRRGIFQGDSLSALWFCLSLSPISNTLKKTEYGVKLKNNVQDLLVSHLFYVDDLKVYAANDRQLRAMLKLVHDMSSDIGMTFGLEKCRTIKMVKGVLKESQPIEINNEVVIQGIEEPYKYLGIDQTHKIEHTTMKSKLSTEFEKRVKLIIKTKLNSKNIVKAINTYAISALTHSFGIIRWSDTDLDALNRRIRTLLTHKRMHHPNACTERVTLPRCLGGRGLKDVKAMYYEQLDNIRKYFYKNSDKPMYRAVIEADKNLTTLNLKSREYNPKTHITTNEDKIRMWSGKQLHGRFYNSVQNNYVDKSLSFMWATKGYLHPETEGFLMATQDQVIKTRNYAKYILGEDLSSDKCRKCGAVSETIDHILGSCNTLANTKYLTRHNQVAHIIHQKILIDRKMKTEIVPYYKYVPNEVEENDQFKIYWDKTIFTDHTIEHNRPDITLIDKKKHTTYLIDVSIPGTHNLQQKHTEKLNKYQALQHEIKRIWNMREVYIIPIILSSIGVIPKNLEKNLKMIQIPITVIEEMQKAAILQSLNIVRSFLAVGNAHES

SEQ ID NO: 863 - protein, 1199 aa, Apoderus coryli
MSQRRNERMRQPGMPQGTSGANAGRGSMRSVGGRLLNRRAPIAQETTANSNNVEIPPADPQPAANVREDNPPPIAPGRSRRMRWSTNLNKDVMRYYFIATSLETDFTDYRDRLKNMFAAEHPEHNDITAQRLSDQRRAIQRNNLLTQIEIQYILDRVREELNIPHTPNQSFEDDNVYGTHTPSDSPRGSPFNNIDIEIPQEPHQEDEILNTYHANLLKYLGMDPNVRPPIQKLRFNKNTGTLINRANSILEQTLNDGMNLEEVHSTIYCAAITVVSLNQKYTSPNKKNTDGYLPSWQRRLTNKINGLRRSIGKTQQYHDGNRNNRLLRTLPTDLKDIIQTINAETENKVRTYLDTLKQKLAAYSARLKRYRESYSRRRDNSLFSNNEKAFYSSLSKKYDNLNPPDLESQTNYWTSIWSQSNNHTKNTWINQEMKAQNSLQPMNEIVITQADLTAALKKIANWKAPGRDGLHSFWYKRFTACHELLVNNFNDVIRFPNNFPTFLTEGLTYLIPKTDNPDHPSLFRPITCLPTLYKILTSILCAKLEDHLELAQVMTDEQKGARRNVMGCKEQLVVDSVVMQQLRVGQRNAHIAYIDYKKAFDSVPHSWLKFVLTLYKVHPTLILFLETTMRAWRTTLSQKINNELVFSGSIPLRRGIFQGDSLSALWFCLSLNPISNTLKKTEYGVKLKNNVQDLLVSHLFYVDDLKVYAANDRQLRAMLKLVHDMSSDIGMTFGLEKCRTIKMVKGVLKESQPIEINNEVVIQGLEEPYKYLGIDQTHKIEHTTMKSKLSTEFEKRVKLIIKTKLNSKNIVKAINTYAISALTHSFGIIRWSDTDLDALNRRIRTLLTHKRMHHPNACTERVTLPRCLGGRGLKDVKAMYYEQLDNIRKYFYKNSDKPMYRAVIEADKNLTTLNLKSQEYNPKTHITTNEDKIRMWSGKQLHGRFYNSVQNNYVDKSLSFMWATKGYLHPETEGFLMATQDQVIKTRNYAKYILGEDLSSDKCRKCGAVSETIDHILGSCNTLANTKYLTRHNQVAHIIHQKILIDRKMKTEIVPYYKYVPNEVEENDQFKIYWDKTIYTDHTIEHNRPDITLIDKKKHTTYLIDVSIPGTHNLQQKHTEKLNKYQALQHEIKRIWNMREVYIIPIILSSIGVIPKNLEKNLKMIQIPITVIEEMQKAAILQSLNIVRSFLAVGNAHES

SEQ ID NO: 864 - protein, 1199 aa, Apoderus coryli
MSQRRNERMRQPGMPQGTSGANAGRGSMRSVGGRLLNRRAPIAQETTANSNNVEIPPADPQPAANVREDNPPPIAPGRSRRMRWSTNLNKDVMRYYFIATSLETDFTDYRDRLKNMFAAEHPEHNDITAQRLSDQRRAIQRNNLLTQIEIQYILDRVREELNIPHTPNQSFEDDNVYGTHTPSDSPRGSPFNNIDIEIPQEPHQEDEILNTYHANLLKYLGMDPNVRPPIQKLRFNKNTGTLINRANSILEQTLNDGMNLEEVHSTIYCAAITVVSLNQKYTSPNKKNTDGYLPSWQRRLTNKINGLRRSIGKTQQYHDGNRNNRLLRTLPTDLKDIIQTINAETENKVRTYLDTLKQKLAAYSARLKRYRESYSRRRDNSLFSNNEKAFYSSLSKKYDNLNPPDLESQTNYWTSIWSQSNNHTKNTWINQEMKAQNSLQPMNEIVITQADLTAALKKIANWKAPGRDGLHSFWYKRFTACHELLVNNFNDVIRFPNNFPTFLTEGLTYLIPKTDNPDHPSLFRPITCLPTLYKILTSILCAKLEDHLELAQVMTDEQKGARRNVMGCKEQLVVDSVVMQQLRVGQRNAHIAYIDYKKAFDSVPHSWLKFVLTLYKVHPTLILFLETTMRAWRTTLSQKINNELVFSGSIPLRRGIFQGDSLSALWFCLSLNPISNTLKKTEYGVKLKNNVQDLLVSHLFYVDDLKVYAANDRQLRAMLKLVHDMSSDIGMTFGLEKCRTIKMVKGVLKESQPIEINNEVVIQGIEEPYKYLGIDQTHKIEHTTMKSKLSTEFEKRVKLIIKTKLNSKNIVKAINTYAISALTHSFGIIRWSDTDLDALNRRIRTLLTHKRMHHPNACTERVTLPRCLGGRGLKDVKAMYYEQLDNIRKYFYKNSDKPMYRAVIEADKNLTTLNLKSREYNPKTHITTNEDKIRMWSGKQLHGRFYNSVQNNYVDKSLSFMWATKGYLHPETEGFLMATQDKVIKTRNYAKYILGEDLSSDKCRKCGAVSETIDHILGSCNTLANTKYLTRHNQVAHIIHQKILIDRKMKTEIVPYYKYVPNEVEENDQFKIYWDKTIYTDHTIEHNRPDITLIDKKKHTTYLIDVSIPGTHNLQQKHTEKLNKYQALQHEIKRIWNMREVYIIPIILSSIGVIPKNLEKNLKMIQIPITVIEEMQKAAILQSLNIVRSFLAVGNAHES

SEQ ID NO: 865 - protein, 1199 aa, Apoderus coryli
MSQRRNERMRQPGMPQGTSGANAGRGSMRSVGGRLLNRRAPIAQETTANSNNVEIPPADPQPAANVREDNPPPIAPGRSRRMRWSTNLNKDVMRYYFIATSLETDFTDYRDRLKNMFAAEHPEHNDITAQRLSDQRRAIQRNNLLTQIEIQYILDRVREELNIPHTPNQSFEDDNVYGTHTPSDSPRGSPFNNIDIEIPQEPHQEDEILNTYHANLLKYLGMDPNVRPPIQKLRFNKNTGTLINRANSILEQTLNDGMNLEEVHSTIYCAAITVVSLNQKYTSPNKKNTDGYLPSWQRRLTNKINGLRRSIGKTQQYHDGNRNNRLLRTLPTDLKDIIQTINAETENKVRTYLDTLKQKLAAYSARLKRYRESYSRRRDNSLFSNNEKAFYSSLSKKYDNLNPPDLESQTNYWTSIWSQSNNHTKNTWINQEMKAQNSLQPMNEIVITQADLTAALKKIANWKAPGRDGLHSFWYKRFTACHELLVNNFNDVIRFPNNFPTFLTEGLTYLIPKTDNPDHPSLFRPITCLPTLYKILTSILCAKLEDHLELAQVMTDEQKGARRNVMGCKEQLVVDSVVMQQLRVGQRNAHIAYIDYKKAFDSVPHSWLKFVLTLYKVHPTLILFLETTMRAWRTTLSQKINNELVFSGSIPLRRGIFQGDSLSALWFCLSLNPISNTLKKTEYGVKLKNNVQDLLVSHLFYVDDLKVYAANDRQLRAMLKLVHDMSLDIGMTFGLEKCRTIKMVKGVLKESQPIEINNEVVIQGIEEPYKYLGIDQTHKIEHTTMKSKLSTEFEKRVKLIIKTKLNSKNIVKAINTYAISALTHSFGIIRWSDTDLDALNRRIRTLLTHKRMHHPNACTERVTLPRCLGGRGLKDVKAMYYEQLDNIRKYFYKNSDKPMYRAVIEADKNLTTLNLKSREYNPKTHITTNEDKIRMWSGKQLHGRFYNSVQNNYVDKSLSFMWATKGYLHPETEGFLMATQDQVIKTRNYAKYILGEDLSSDKCRKCGAVSETIDHILGSCNTLANTKYLTRHNQVAHIIHQKILIDRKMKTEIVPYYKYVPNEVEENDQFKIYWDKTIYTDHTIEHNRPDITLIDKKKHTTYLIDVSIPGTHNLQQKHTEKLNKYQALQHEIKRIWNMREVYIIPIILSSIGVIPKNLEKNLKMIEIPITVIEEMQKAAILQSLNIVRSFLAVGNAHES

SEQ ID NO: 866 - protein, 1199 aa, Apoderus coryli
MSQRRNERMRQPGMPQGTSGANAGRGSMRSVGGRLLNRRAPIAQETTANSNNVEIPPADPQPAANVREDNPPPIAPGRSRRMRWSTNLNKDVMRYYFIATSLETDFTDYRDRLKNMFAAEHPEHNDITAQRLSDQRRAIQRNNLLTQIEIQYILDRVREELNIPHTPNQSFEDDNVYGTHTPSDSPRGSPFNNIDIEIPQEPHQEDEILNTYHANLLKYLGMDPNVRPPIQKLRFNKNTGTLINRANSILEQTLNDGMNIEEVHSTIYCAAITVVSLNQKYTSPNKKNTDGYLPSWQRRLTNKINGLRRSIGKTQQYHDGNRNNRLLRTLPTDLKDIIQTINAETENKVRTYLDTLKQKLAAYSARLKRYRESYSRRRDNSLFSNNEKAFYSSLSKKYDNLNPPDLESQTNYWTSIWSQSNNHTKNTWINQEMKAQNSLQPMNEIVITQADLTAALKKIANWKAPGRDGLHSFWYKRFTACHELLVNNFNNVIRFPNNFPTFLTEGLTYLIPKTDNPDHPSLFRPITCLPTLYKILTSILCAKLEDHLELAQVMTDEQKGARRNVMGCKEQLVVDSVVMQQLRVGQRNAHIAYIDYKKAFDSVPHSWLKFVLTLYKVHPTLILFLETTMRAWRTTLSQKINNELVFSGSIPLRRGIFQGDSLSALWFCLSLNPISNTLKKTEYGVKLKNNVQDLLVSHLFYVDDLKVYAANDRQLRAMLKLVHDMSSDIGMTFGLEKCRTIKMVKGVLKESQPIEINNEVVIQGLEEPYKYLGIDQTHKIEHTTMKSKLSTEFEKRVKLIIKTKLNSKNIVKAINTYAISALTHSFGIIRWSDTDLDALNRRIRTLLTHKRMHHPNACTERVTLPRCLGGRGLKDVKAMYYEQLDNIRKYFYKNSDKPMYRAVIEADKNLTTLNLKSREYNPKTHITTNEDKIRMWSGKQLHGRFYNSVQNNYVDKSLSFMWATKGYLHPETEGFLMATQDQVIKTRNYAKYILGEDLSSDKCRKCGAVSETIDHILGSCNTLANTKYLTRHNQVAHIIHQKILIDRKMKTEIVPYYKYVPNEVEENDQFKIYWDKTIYTDHTIEHNRPDITLIDKKKHTTYLIDVSIPGTHNLQQKHTEKLNKYQALQHEIKRIWNMREVYIIPIILSSIGVIPKNLEKNLKMIQIPITVIEEMQKAAILQSLNIVRSFLAVGNAHES

SEQ ID NO: 867 - protein, 1098 aa, Apoderus coryli
MSQRRNERMRQPGMPQGTSGANAGRGSMRSVGGRLLNRRAPIAQETTANSNNVEIPPADPQPAANVREDNPPPIAPGRSRRMRWSTNLNKDVMRYYFIATSLETDFTDYRDRLKNMFAAEHPEHNDITAQRLSDQRRAIQRNNLLTQIEIQYILDRVREELNIPHTPNQSFEDDNVYGTHTPSDSPRGSPFNNIDIEIPQEPHQEDEILNTYHANLLKYLGMDPNVRPPIQKLRFNKNTGTLMNRANSILEQTLNDGMNLEEVHSTIYCAAITVVSLNQKYTSPNKKNTDGYLPSWQRRLTNKINGLRRSIGKTQQYHDGNRNNRLLRTLPTDLKDIIQTINAETENKVRTYLDTLKQKLAAYSARLKRYRESYSRRRDNSLFSNNEKAFYSSLSKKYDNLNPPDLESQTNYWTSIWSQSNNHSKNTWINQEMKAQNSLQPMNEIVITQADLTAALKKIANWKAPGRDGLHSFWYKRFTACHELLVNNFNDVIRFPNNFPTFLTEGLTYLIPKTDNPDHPSLFRPITCLPTLYKILTSILCAKLEDHLELAQVMTDEQKGARRNVMGCKEQLVVDSVVMQQLRVGQRNAHIAYIDYKKAFDSVPHSWLKFVLTLYKVHPTLILFLETTMRAWRTTLSQKINNELVFSGSIPLRRGIFQGDSLSALWFCLSLNPISNTLKKTEYGVKLKNNVQDLLVSHLFYVDDLKVYAANDRQLRAMLKLVHDMSSDIGMTFGLEKCRTIKMVKGVLKESQPIEINNEVVIQGLEEPYKYLGIDQTHKIEHTTMKSKLSTEFEKRVKLIIKTKLNSKNIVKAINTYAISALTHSFGIIRWSDTDLDALNRRIRTLLTHKRMHHPNACTERVTLPRCLGGRGLKDVKAMYYEQLDNIRKYFYKNSDKPMYRAVIEADKNLTTLNLKSREYNPKTHITTNEDKIRMWSGKQLHGRFYNSVQNNYVDKSLSFMWATKGYLHPETEGFLMATQDQVIKTRNYAKYILGEDLSSDKCRKCGAVSETIDHILGSCNTLANTKYLTRHNQVAHIIHQKILIDRKIKTEIVPYYKYVPNEVEENDQFKIYWDKTIYTDHTIIIIIIIIHIYFSNM

SEQ ID NO: 868 - protein, 1199 aa, Apoderus coryli
MSQRRNERMRQPGMPQGTSGANAGRGSMRSVGGRLLNRRAPIAQETTANSNNVEIPPADPQPAANVREDNPPPIAPGRSRRMRWSTNLNKDVMRYYFIATSLETDFTDYRDRLKNMFAAEHPEHNDITAQRLSDQRRAIQRNNLLTQIEIQYILDRVREELNIPHTPNQSFEDDNVYGTHTPSDSPRGSPFNNIDIEIPQEPHQEDEILNTYHANLLKYLGMDPNVRPPIQKLRFNKNTGTLMNRANSILEQTLNDGMNLEEVHSTIYCAAITVVSLNQKYTSPNKKNTDGYLPSWQRRLTNKINGLRRSIGKTQQYHDGNRNNRLLRTLPTDLKDIIQTINAETENKVRTYLDTLKQKLAAYSARLKRYRESYSRRRDNSLFSNNEKAFYSSLSKKYDNLNPPDLESQTNYWTSIWSQSNNHSKNTWINQEMKAQNSLQPMNEIVITQADLTAALKKIANWKAPGRDGLHSFWYKRFTACHELLVNNFNDVIRFPNNFPTFLTEGLTYLIPKTDNPDHPSLFRPITCLPTLYKILTSILCAKLEDHLELAQVMTDEQKGARRNVMGCKEQLVVDSVVMQQLRVGQRNAHIAYIDYKKAFDSVPHSWLKFVLTLYKVHPTPILFLETTMRAWRTTLSQKINNELVFSGSIPLRRGIFQGDSLSALWFCLSLNPISNTLKKTEYGVKLKNNVQDLLVSHLFYVDDLKVYAANDRQLRAMLKLVHDMSSDIGMTFGLEKCRTIKMVKGVLKESQPIEINNEVVIQGLEEPYKYLGIDQTHKIEHTTMKSKLSTEFEKRVKLIIKTKLNSKNIVKAINTYAISALTHSFGIIRWSDTDLDALNRRIRTLLTHKRMHHPNACTERVTLPRCLGGRGLKDVKAMYYEQLDNIRKYFYKNSDKPMYRAVIEADKNLTTLNLKSREYNPKTHITTNEDKIRMWSGKQLHGRFYNSVQNNYVDKSLSFMWATKGYLHPETEGFLMATQDQVIKTRNYAKYILGEDLSSDKCRKCGAVSETIDHILGSCNTLANTKYLTRHNQVAHIIHQKILIDRKIKTEIVPYYKYVQNEVEENDQFKIYWDKTIYTDHTIEHNRPDITLIDKKKHTTYLIDVSIPGTHNLQQKHTEKLNKYQALQHEIKRIWNMREVYIIPIILSSIGVIPKNLEKNLKMIQIPITVIEEMQKAAILQSLNIVRSFLAVGNAHES

SEQ ID NO: 869 - protein, 1194 aa, Apoderus coryli
MSQRRNERMRQPGMPQGTSGANAGRGSMRSVGGRLLNRRAPIAQETTANSNNVEIPPADPQPAANVREDNPPPIAPGRSRRMRWSTNLNKDVMRYYFIATSLETDFTDYRDRLKNMFAAEHPEHNDITAQRLSDQRRAIQRNNLLTQIEIQYILDRVREELNIPHTPNQSFEDDNVYGTHTPSDSPRGSPFNNIDIEIPQEPHQEDEILNTYHANLLKYLGMDPNVRPPIQKLRFNKNTGTLMNRANSILEQTLNDGMNLEEVHSTIYCAAITVVSLNQKYTSPNKKNTDGYLPSWQRRLTNKINGLRRSIGKTQQYHDGNRNNRLFRTLPTDLKDIIQTINAETENKVRTYLDTLKQKLAAYSARLKRYRESYSRRRDNSLFSNNEKAFYSSLSKKYDNLNPPDLESQTNYWTSIWSQSNNHSKNTWINQEMKAQNSLQPMNEIVITQADLTAALKKIANWKAPGRDGLHSFWYKRFTACHELLVNNFNDVIRFPNNFPTFLTEGLTYLIPKTDNPDHPSLFRPITCLPTLYKILTSILCAKLEDHLELAQVMTDEQKGARRNVMGCKEQLVVDSVVMQQLRVGQRNAHIAYIDYKKAFDSVPHSWLKFVLTLYKVHPTLILFLETTMRAWRTTLSQKINNELVFSGSIPLRRGIFQGDSLSALWFCLSLNPISNTLKKTEYGVKLKNNVQDLLVSHLFYVDDLKVYAANDRQLRAMLKLVHDMSSDIGMTFGLEKCRTIKMVKGVLKESQPIEINNEVVIQGLEEPYKYLGIDQTHKIEHTTMKSKLSTEFEKRVKLIIKTKLNSKNIVKAINTYAISALTHSFGIIRWSDTDLDALNRRIRTLLTHKRMHHPNACTERVTLPRCLGGRGLKDVKAMYYEQLDNIRKYFYKNSDKPMYRAVIEADKNLTTLNLKSREYNPKTHITTNEDKIRMWSGKQLHGRFYNSVQNNYVDKSLSFMWATKGYLHPETEGFLMATQDQVIKTRNYAKYILGEDLSSDKCRKCGAVSETIDHILGSCNTLANTKYLTRHNQVAHIIHQKILIDRKIKTEIVPYYKYVPNEVEENDQFKIYWDKTIYTDHTIEHNRPDITLIDKKKHTTYLIDVSIPGTHNLQQKHTEKLNKYQALQHEIKRIWNMREVYIIPIILSSIGVIPKNLEKNLKMIQIPITVIEEMQKAAILQSLNLTLEAAKTT

SEQ ID NO: 870 - protein, 978 aa, Apoderus coryli
MDPNVRPPIQKLRFNKNTGTLINRANSILEQTLNDGMNLEEVHSTIYCAAITVVSLNQKYTSPNKKNTDGYLPSWQRRLTNKINGLRRSIGKTQQYHDGNRNNRLLRTLPTDLKDIIQTINAETENKVRTYLDTLKQKLAAYSARLKRYRESYSRRRDNSLFSNNEKAFYSSLSKKYDNLNPPDLESQTNYWTSIWSQSNNHTKNTWINQEMKAQNSLQPMNEIVITQADLTAALKKIANWKAPGRDGLHSFWYKRFTACHELLVNNFNDVIRFPNNFPTFLTEGLTYLIPKTDNPDHPSLFRPITCLPTLYKILTSILCAKLEDHLELAQVMTDEQKGARRNVMGCKEQLVVDSVVMQQLRVGQRNAHIAYIDYKKAFDSVPHSWLKFVLTLYKVHPTLILFLETTMRAWRTTLSQKINNELVFSGSIPLRRGIFQGDSLSALWFCLSLNPISNTLKKTEYGVKLKNNVQDLLVSHLFYVDDLKVYAANDRQLRAMLKLVHDMSSDIGMTFGLEKCRTIKMVKGVLKESQPIEINNEVVIQGIEEPYKYLGIDQTHKIEHTTMKSKLSTEFEKRVKLIIKTKLNSKNIVKAINTYAISALTHSFGIIRWSDTDLDALNRRIRTLLTHKRMHHPNACTERVTLPRCLGGRGLKDVKAMYYEQLDNIRKYFYKNSDKPMYRAVIEADKNLTTLNLKSREYNPKTHITTNEDKIRMWSGKQLHGRFYNSVQNNYVDKSLSFMWATKGYLHPETEGFLMATQDQVIKTRNYAKYILGEDLSSDKCRKCGAVSETIDHILGSCNTLANTKYLTRHNQVAHIIHQKILIDRKMKTEIVPYYKYVPNEVEENDQFKIYWDKTIYTDHTIEHNRPDITLIDKKKHTTYLIDVSIPGTHNLQQKHTEKLNKYQALQHEIKRIWNMREVYIIPIILSSIGVIPKNLEKNLKMIQIPITVIEEMQKAAILQSLNIVRSFLAVGNAHES

SEQ ID NO: 871 - protein, 1199 aa, Apoderus coryli
MSQRRNERMRQPGMPQGTSGANAGRGSMRSVGGRLLNRRAPIAQETTANSNNVEIPPADPQPAANVREDNPPPIAPGRSRRMRWSTNLNKDVMRYYFIATSLETDFTDYRDRLKNMFAAEHPEHNDITAQRLSDQRRAIQRNNLLTQIEIQYILDRVREELNIPHTPNQSFEDDNVYGTHTPSDSPRGSPFNNIDIEIPQEPHQEDEILNTYHANLLKYLGMDPNVRPPIQKLRFNKNTGTLMNRANSILEQTLNDGMNLEEVHSTIYCAAITVVSLNQKYTSPNKKNTDGYLPSWQRRLTNKINGLRRSIGKTQQYHDGNRNNRLLRTLPTDLKDIIQTINAETENKVRTYLDTLKQKLAAYSARLKRYRESYSRRRDNSLFSNNEKAFYSSLSKKYDNLNPPDLESQTNYWTSIWSQSNNHSKNTWINQEMKAQNSLQPMNEIVITQADLTAALKKIANWKAPGRDGLHSFWYKRFTACHELLVNNFNDVIRFPNNFPTFLTEGLTYLIPKTDNPDHPSLFRPITCLPTLYKILTSILCAKLEDHLELAQVMTDEQKGARRNVMGCKEQLVVDSVVMQQLRVGQRNAHIAYIDYKKAFDSVPHSWLKFVLTLYKVHPTLILFLETTMRAWRTTLSQKINNELVFSGSIPLRRGIFQGDSLSALWFCLSLNPISNTLKKTEYGVKLKNNVQDLLVSHLFYVDDLKVYAANDRQLRAMLKLVHDMSSDIGMTFGLEKCRTIKMVKGVLKESQPIEINNEVVIQGLEEPYKYLGIDQTHKIEHTTMKSKLSTEFEKRVKLIIKTKLNSKNIVKAINTYAISALTHSFGIIRWSDTDLDALNRRIRTLLTHKRMHHPNACTERVTLPRCLGGRGLKDVKAMYYEQLDNIRKYFYKNSDKPMYRAVIEADKNLTTLNLKSREYNPKTHITTNEDKIRMWSGKQLHGRFYNSVQNNYVDKSLSFMWATKGYLHPETEGFLMATQDQVIKTRNYAKYILGEDLSSDKCRKCGAVSETIDHILGSCNTLANTKYLTRHNQVAHIIHQKILIDRKIKTEIVPYYKYVPNEVEENDQFKIYWDKTIYTDHTIEHNRPDITLIDKKKHTTYLIDVSIPGTHNLQQKHTEKLNKYQALQHEIKRIWNMREVYIIPIILSSIGVIPKNLEKNLKMIQIPITVIEEMQKAAILQSLNIVRSFLAVGNAHEF

SEQ ID NO: 872 - protein, 1199 aa, Apoderus coryli
MSQRRNERMRQPGMPQGTSGANAGRGSMRSVGGRLLNRRAPIAQETTANSNNVEIPPADPQPAANVREDNPPPIAPGRSRRMRWSTNLNKDVMRYYFIATSLETDFTDYRDRLKNMFAAEHPEHNDITAQRLSDQRRAIQRNNLLTQIEIQYILDRVREELNIPHTPNQSFEDDNVYGTHTPSDSPRGSPFNNIDIEIPQEPHQEDEILNTYHANLLKYLGMDPNVRPPIQKLRFNKNTGTLINRANSILEQTLNDGMNLEEVHSTIYCAAITVVSLNQKYTSPNKKNTDGYLPSWQRRLTNKINGLRRSIGKTQQYHDGNRNNRLLRTLPTDLKDIIQTINAETENKVRTYLDTLKQKLAAYSARLKRYRESYSRRRDNSLFSNNEKAFYSSLSKKYDNLNPPDLESQTNYWTSIWSQSNNHTKNTWINQEMKAQNSLQPMNEIVITQADLTAALKKIANWKAPGRDGLHSFWYKRFTACHELLVNNFNDVIRFPNNFPTFLTEGLTYLIPKTDNPDHPSLFRPITCLPTLYKILTSILCAKLEDHLELTQVMTDEQKGARRNVMGCKEQLVVDSVVMQQLRVGQRNAHIAYIDYKKAFDSVPHSWLKFVLTLYKVHPTLILFLETTMRAWRTTLSQKINNELVFSGSIPLRRGIFQGDSLSALWFCLSLNPISNTLKKTEYGVKLKNNVQDLLVSHLFYVDDLKVYAANDRQLRAMLKLVHDMSSDIGMTFGLEKCRTIKMVKGVLKESQPIEINNEVVIQGIEEPYKYLGIDQTHKIEHTTMKSKLSTEFEKRVKLIIKTKLNSKNIVKAINTYAISALTHSFGIIRWSDTDLDALNRRIRTLLTHKRMHHPNACTERVTLPRCLGGRGLKDVKAMYYEQLDNIRKYFYKNSDKPMYRAVIEADKNLTTLNLKSREYNPKTHITTNEDKIRMWSGKQLHGRFYNSVQNNYVDKSLSFMWATKGYLHPETEGFLMATQDQVIKTRNYAKYILGEDLSSDKCRKCGAVSETIDHILGSCNTLANTKYLTRHNQVAHIIHQKILIDRKMKTEIVPYYKYVPNEVEENDQFKIYWDKTIYTDHTIEHNRPDITLIDKKKHTTYLIDVSIPGTHNLQQKHTEKLNKYQALQHEIKRIWNMREVYIIPIILSSIGVIPKNLEKNLKMIQIPITVIEEMQKAAILQSLNIVRSFLAVGNAHES

SEQ ID NO: 873 - protein, 1199 aa, Apoderus coryli
MSQRRNERMRQPGMPQGTSGANAGRGSMRSVGGRLLNRRAPIAQETTANSNNVEIPPADPQPAANVREDNPPPIAPGRSRRMRWSTNLNKDVMRYYFIATSLETDFTDYRDRLKNMFAAEHPEHNDITAQRLSDQRRAIQRNNLLTQIEIQYILDRVREELNIPHTPNQSFEDDNVYGTHTPSDSPRGSPFNNIDIEIPQEPHQEDEILNTYHANLLKYLGMDPNVRPPIQKLRFNKNTGTLINRANSILEQTLNDGMNLEEVHSTIYCAAITVVSLNQKYTSPNKKNTDGYLPSWQRRLTNKINGLRRSIGKTQQYHDGNRNNRLLRTLPTDLKDIIQTINAETENKVRTYLDTLKQKLAAYSARLKRYRESYSRRRDNSLFSNNEKAFYSSLSKKYDNLNPPDLESQTNYWTSIWSQSNNHTKNTWINQEMKAQNSLQPMNEIVITQADLTAALKKIANWKAPGRDGLHSFWYKRFTACHELLVNNFNDVIRFPNNFPTFLTEGLTYLIPKTDNPDHPSLFRPITCLPTLYKILTSILCAKLEDHLELAQVMTDEQKGARRNVMGCKEQLVVDSVVMQQLRVGQRNAHIAYIDYKKAFDSVPHSWLKFVLTLYKVHPTLILFLETTMRAWRTTLSQKINNELVFSGSIPLRRGIFQGDSLSALWFCLSLNPISNTLKKTEYGVKLKNNVQDLLVSHLFYVDDLKVYAANDRQLRAMLRLVHDMSSDIGMTFGLEKCRTIKMVKGVLKESQHIEINNEVVIQGIEEPYKYLGIDQTHKIEHTTMKSKLSTEFEKRVKLIIKTKLNSKNIVKAINTYAISALTHSFGIIRWSDTDLDALNRRIRTLLTHKRMHHPNACTERVTLPRCLGGRGLKDVKAMYYEQLDNIRKYFYKNSDKPMYRAVIEADKNLTTLNLKSREYNPKTHITTNEDKIRMWSGKQLHGRFYNSVQNNYVDKSLSFMWATKGYLHPETEGFLMATQDQVIKTRNYAKYILGEDLSSDKCRKCGAVSETIDHILGSCNTLANTKYLTRHNQVAHIIHQKILIDRKMKTEIVPYYKYVPNEVEENDQFKIYWDKTIYTDHTIEHNRPDITLIDKKKHTTYLIDVSIPGTHNLQQKHTEKLNKYQALQHEIKRIWNMREVYIIPIILSSIGVIPKNLEKNLKMIQIPITVIEEMQKAAILQSLNIVRSFLAVGNAHES

SEQ ID NO: 874 - protein, 1199 aa, Apoderus coryli
MSQRRNERMRQPGMPQGTSGANAGRGSMRSVGGRLLNRRAPIAQETTANSNNVEIPPADPQPAANVREDNPPPIAPGRSRRMRWSTNLNKDVMRYYFIATSLETDFTDYRDRLKNMFAAEHPEHNDITAQRLSDQRRAIQRNNLLTQIEIQYILDRVREELNIPHTPNQSFEDDNVYGTHTPSDSPRGSPFNNIDIEIPQEPHQEDEILNTYHANLLKYLGMDPNVRPPIQKLRFNKNTGTLINRANSILEQTLNDGMNLEEVHSTIYCAAITVVSLNQKYTSPNKKNTDGYLPSWQRRLTNKINGLRRSIGKTQQYHDGNRNNRLLRTLPTDLKDIIQTINAETENKVRTYLDTLKQKLAAYSARLKRYRESYSRRRDNSLFSNNEKAFYSSLSKKYDNLNPPDLESQTNYWTSIWSQSNNHTKNTWINQEMKAQNSLQPMNEIVITQADLTAALKKIANWKAPGRDGLHSFWYKRFTACHELLVNNFNDVIRFPNNFPTFLTEGLTYLIPKTDNPDHPSLFRPITCLPTLYKILTSILCAKLEDHLELAQVMTDEQKGARRNVMGCKEQLVVDSVVMQQLRVGQRNAHIAYIDYKKAFDSVPHSWLKFVLTLYKVHPTLILFLETTMRAWRTTLSQKINNELVFSGSIPLRRGIFQGDSLSALWFCLSLNPISNTLKKTEYGVKLKNNVQDLLVSHLFYVDDLKVYAANDRQLRAMLKLVHDMSSDIGMTFGLEKCRTIKMVKGVLKESQPIEINNEVVIQGIEEPYKYLGIDQTHKIEHTTMKSKLSTEFEKRVKLIIKTKLNSKNIVKAINTYAISALTHSFGIIRWSDTDLDALNRRIRTLLTHKRMHHPNACTERVTLPRCLGGRGLKDVKAMYYEQLDNIRKYFYKNSDKPMYRAVIEADKNLTTLNLKSREYNPKTHITTNEDKIRMWSGKQLHGRFYNSVQNNYVDKSLSFMWATKGYLHPETEGFLMATQDQVIKTRNYAKYILGEDLSSDKCRKCGAVSETIDHILGSCNTLANTKYLTRHNQVAHIIHQKILIDRKIKTEIVPYYKYVPNEVEENDQFKIYWDKTIYTDHTIEHNRPDITLIDKKKHTTYLIDVSIPGTHNLQQKHTEKLNKYQALQHEIKRIWNMREVYIIPIILSSIGVIPKNLEKNLKMIQIPITVIEEMQKAAILQSLNIVRSFLAVGNAHES

SEQ ID NO: 875 - protein, 1199 aa, Apoderus coryli
MSQRRNERMRQPGMPQGTSGANAGRGSMRSVGGRLLNRRAPIAQETTANSNNVEIPPADPQPAANVREDNPPPIAPGRSRRMRWSTNLNKDVMRYYFIATSLETDFTDYRDRLKNMFAAEHPEHNDITAQRLSDQRRAIQRNNLLTQIEIQYILDRVREELNIPHTPNQSFEDDNVYGTHTPSDSPRGSPFNNIDIEIPQEPHQEDEILNTYHANLLKYLGMDPNVRPPIQKLRFNKNTGTLMNRANSILEQTLNDGMNLEEVHSTIYCAAITVVSLNQKYTSPNKKNTDGYLPSWQRRLTNKINGLRRSIGKTQQYHDGNRNNRLLRTLPTDLKDIIQTINAETENKVRTYLDTLKQKLAAYSARLKRYRESYSRRRDNSLFSNNEKAFYSSLSKKYDNLNPPDLESQTNYWTSIWSQSNNHTKNTWINQEMKAQNSLQPMNEIVITQADLTAALKKIANWKAPGRDGLHSFWYKRFTACHELLVNNFNDVIRFPNNFPTFLTEGLTYLIPKTDNPDHPSLFRPITCLPTLYKILTSILCAKLEDHLELAQVMTDEQKGARRNVMGCKEQLVVDSVVVQQLRVGQRNAHIAYIDYKKAFDSVPHSWLKFVLTLYKVHPTLILFLETTMRAWRTTLSQKINNELVFSGSIPLRRGIFQGDSLSALWFCLSLNPISNTLKKTEYGVKLKNNVQDLLVSHLFYVDDLKVYAANDRQLRAMLKLVHDMSSDIGMTFGLEKCRTIKMVKGVLKESQPIEINNEVVIQGIEEPYKYLGIDQTHKIEHTTMKSKLSTEFEKRVKLIIKTKLNSKNIVKAINTYAISALTHSFGIIRWSDTDLDALNRRIRTLLTHKRMHHPNACTERVTLPRCLGGRGLKDVKAMYYEQLDNIRKYFYKNSDKPMYRAVIEADKNLTTLNLKSREYNPKTHITTNEDKIRMWSGKQLHGRFYNSVQNNYVDKSLSFMWATKGYLHPETEGFLMATQDQVIKTRNYAKYILGEDLSSDKCRKCGAVSETIDHILGSCNTLANTKYLTRHNQVAHIIHQKILIDRKMKTEIVPYYKYVPNEVEENDQFKIYWDKTIYTDHTIEHNRPDITLIDKKKHTTYLIDVSIPGTHNLQQKHTEKLNKYQALQHEIKRIWNMREVYIIPIILSSIGVIPKNLEKNLKMIQIPITVIEEMQKAAILQSLNIVRSFLAVGNAHES

SEQ ID NO: 876 - protein, 1199 aa, Apoderus coryli
MSQRRNERMRQPGMPQGTSGANAGRGSMRSVGGRLLNRRAPIAQETTANSNNVEIPPADPQPAANVREDNPPPIAPGRSRRMRWSTNLNKDVMRYYFIATSLETDFTDYRDRLKNMFAAEHPEHNDITAQRLSDQRRAIQRNNLLTQIEIQYILDRVREELNIPHTPNQSFEDDNVYGTHTPSDSPRGSPFNNIDIEIPQEPHQEDEILNTYHANLLKYLGMDPNVRPPIQKLRFNKNTGTLINRANSILEQTLNDGMNLEEVHSTIYCAAITVVSLNQKYTSPNKKNTDGYLPSWQRRLTNKINGLRRSIGKTQQYHDGNRNNRLLRTLPTDLKDIIQTINAETENKVRTYLDTLKQKLAAYSARLKRYRESYSRRRDNSLFSNNEKAFYSSLSKKYDNLNPPDLESQTNYWTSIWSQSNNHTKNTWINQEMKAQNSLQPMNEIVITQADLTAALKKIANWKAPGRDGLHSFWYKRFTACHELLVNNFNDVIRFPNNFPTFLTEGLTYLIPKTDNPDHPSLFRPITCLPTLYKILTSILCAKLEDHLELAQVMTDEQKGARRNVMGCKEQLVVDSVVMQQLRVGQRNAHIAYIDYKKAFDSVPHSWLKFVLTLYKVHPTLILFLETTMRAWRTTLSQKINNELVFSGSIPLRRGIFQGDSLSALWFCLSLNPISNTLKKTEYGVKLKNNVQDLLVSHLFYVDDLKVYAANDRQLRAMLKLVHDMSSDIGMTFGLEKCRTIKMVKGVLKESQPIEINNEVVIQGIEEPYKYLGIDQTHKIEHTTMKSKLSTEFEKRVKLIIKTKLNSKNIVKAINTYAISALTHSFGIIRWSDTDLDALNRRIRTLLTHKRMHHPNACTERVTLPRCLGGRGLKDVKAMYYEQLDNIRKYFYKNSDKPMYRAVIEADKNLTTLNLKSREYNPKTHITTNEDKIRMWSGKQLHGRFYNSVQNNYVDKSLSFMWATKGYLHPETEGFLMATQDQVIKTRNYAKYILGEDLSSDKCRKCGAVSETIDHILGSCNTLANTKYLTRHNQVAHIIHQKILIDRKMKTEIVPYYKYVPNEVEENDQFKIYWDKTIYTDHTIEHNRPDITLIDKKKHTTYLIDVSIPGTHNLQQKHTEKLNKYQALQHEIKRIWNMREVYIIPIILSSIGVIPKNLEKNLKMIQIPITVIEEMQKAAILQSLNIVRSFLAVGNANNK

SEQ ID NO: 877 - protein, 1070 aa, Apoderus coryli
MSQRRNERMRQPGMPQGTSGANAGRGSMRSVGGRLLNRRAPIAQETTANSNNVEIPPADPQPAANVREDNPPPIAPGRSRRMRWSTNLNKDVMRYYFIATSLETDFTDYRDRLKNMFAAEHPEHNDITAQRLSDQRRAIQRNNLLTQIEIQYILDRVREELNIPHTPNQSFEDDNVYGTHTPSDSPRGSPFNNIDIEIPQEPHQEDEILNTYHANLLKYLGMDPNVRPPIQKLRFNKNTGTLMNRANSILEQTLNDGMNLEEVHSTIYCAAITVVSLNQKYTSPNKKNTDGYLPSWQRRLTNKINGLRRSIGKTQQYHDGNRNNRLLRTLPTDLKDIIQTINAETENKVRTYLDTLKQKLAAYSARLKRYRESYSRRRDNSLFSNNEKAFYSSLSKKYDNLNPPDLESQTNYWTSIWSQSNNHSKNTWINQEMKAQNSLQPMNEIVITQADVTAALKKIANWKAPGRDGLHSFWYKRFTACHELLVNNFNDVIRFPNNFPTFLTEGLTYLIPKTDNPDHPSLFRPITCLPTLYKILTSILCAKLEDHLELAQVMTDEQKGARRNVMGCKEQLVVDSVVMQQLRVGQRNAHIAYIDYKKAFDSVPHSWLKFVLTLYKVHPTLILFLETTMRAWRTTLSQKINNELVFSGSIPLRRGIFQGDSLSALWFCLSLNPISNTLKKTEYGVKLKNNVQDLLVSHLFYVDDLKVYAANDRQLRAMLKLVHDMSSDIGMTFGLEKCRTIKMVKGVLKESQPIEINNEVVIQGLEEPYKYLGIDQTHKIEHTTMKSKLSTEFEKRVKLIIKTKLNSKNIVKAINTYAISALTHSFGIIRWSDTDLDALNRRIRTLLTHKRMHHPNACTERVTLPRCLGGRGLKDVKAMYYEQLDNIRKYFYKNSDKPMYRAVIEADKNLTTLNLKSREYNPKTHITTNEDKIRMWSGKQLHGRFYNSVQNNYVDKSLSFMWATKGYLHPETEGFLMATQDQVIKTRNYAKYILGEDLSSDKCRKCGAVSETIDHILGSCNTLANTKYLTRHNQVAHIIHQKILIDRKIKTEIVPYYKYVPNEVEENDQF

SEQ ID NO: 878 - protein, 1199 aa, Apoderus coryli
MSQRRNERMRQPGMPQGTSGANAGRGSMRSVGGRLLNRRAPIAQETTANSNNVEIPPADPQPAANVREDNPPPIAPGRSRRMRWSTNLNKDVMRYYFIATSLETDFTDYRDRLKNMFAAEHPEHNDITAQRLSDQRRAIQRNNLLTQIEIQYILDRVREELNIPHTPNQSFEDDNVYGTHTPSDSPRGSPFNNIDIEIPQEPHQEDEILNTYHANLLKYLGMDPNVRPPIQKLRFNKNTGTLINRANSILEQTLNDGMNLEEVHSTIYCAAITVVSLNQKYTSPNKKNTDGYLPSWQRRLTNKINGLRRSIGKTQQYHDGNRNNRLLRTLPTDLKDIIQTINAETENKVRTYLDTLKQKLAAYSARLKRYRESYSRRRDNSLFSNNEKAFYSSLSKKYDNLNPPDLESQTNYWTSIWSQSNNHTKNTWINQEMKAQNSLQPMNEIVITQADLTAALKKIANWKAPGRDGLHSFWYKRFTACHELLVNNFNDVIRFPNNFPTFLTEGLTYLIPKTDNPDHPSLFRPITCLPTLYKILTSILCAKLEDHLELAQVMTDEQKGARRNVMGCKEQLVVDSVVMQQLRVGQRNAHIAYIDYKKAFDSVPHSWLKFVLTLYKVHPTLILFLETTMRAWRTTLSQKINNELVFSGSIPLRRGIFQGDSLSALWFCLSLNPISNTLKKTEYGVKLKNNVQDLLVSHLFYVDDLKVYAANDRQLRAMLKLVHDMSSDIGMTFGLEKCRTIKMVKGVLKESQPIEINNEVVIQGIEEPYKYLGIDQTHKIEHTTMKSKLSTEFEKRVKLIIKTKLNSKNIVKAINTYAISALTHSFGIIRWSDTDLDALNRRIRTLLTHKRMHHPNACTERVTLPRCLGGRGLKDVKAMYYEQLDNIRKYFYKNSDKPMYRAVIEADKNLTTLNLKSREYNPKTHITTNEDKIRMWSGKQLHGRFYNSVQNNYVDKSLSFMWATKGYLHPETEGFLMATQDQVIKTRNYAKYILGEDLSSDKCRKCGAVSETIDHILGSCNTLANTKYLTRHNQVAHIIHQKILIDRKMKTQIVPYYKYVPNEVEENDQFKIYWDKTIYTDHTIEHNRPDITLIDKKKHTTYLIDVSIPGTHNLQQKHTEKLNKYQALQHEIKRIWNMREVYIIPIILSSIGVIPKNLEKNLKMIQIPITVIEEMQKAAILQSLNIVRSFLAVGNAHES

SEQ ID NO: 879 - protein, 1118 aa, Apoderus coryli
MRWSTNLNKDVMRYYFIATSLETDFTDYRDRLKNMFAAEHPEHNDITAQRLSDQRRAIQRNNLLTQIEIQYILDRVREELNIPHTPNQSFEDDNVYGTHTPSDSPRGSPFNNIDIEIPQEPHQEDEILNTYHANLLKYLGMDPNVRPPIQKLRFNKNTGTLINRANSILEQTLNDGMNLEEVHSTIYCAAITVVSLNQKYTSPNKKNTDGYLPSWQRRLTNKINGLRRSIGKTQQYHDGNRNNRLLRTLPTDLKDIIQTINAETENKVRTYLDTLKQKLAAYSARLKRYRESYSRRRDNSLFSNNEKAFYSSLSKKYDNLNPPDLESQTNYWTSIWSQSNNHTKNTWINQEMKAQNSLQPMNEIVITQADLTAALKKIANWKAPGRDGLHSFWYKRFTACHELLVNNFNDVIRFPNNFPTFLTEGLTYLIPKTDSPDHPSLFRPITCLPTLYKILTSILCAKLEDHLELAQVMTDEQKGARRNVMGCKEQLVVDSVVMQQLRVGQRNAHIAYIDYKKAFDSVPHSWLKFVLTLYKVHPTLILFLETTMRAWRTTLSQKINNELVFSGSIPLRRGIFQGDSLSALWFCLSLNPISNTLKKTEYGVKLKNNVQDLLVSHLFYVDDLKVYAANDRQLRAMLKLVHDMSSDIGMTFGLEKCRTIKMVKGVLKESQPIEINNEVVIQGIEEPYKYLGIDQTHKIEHTTMKSKLSTEFEKRVKLIIKTKLNSKNIVKAINTYAISALTHSFGIIRWSDTDLDALNRRIRTLLTHKRMHHPNACTERVTLPRCLGGRGLKDVKAMYYEQLDNIRKYFYKNSDKPMYRAVIEADKNLTTLNLKSREYNPKTHITTNEDKIRMWSGKQLHGRFYNSVQNNYVDKSLSFMWATKGYLHPETEGFLMATQDQVIKTRNYAKYILGEDLSSDKCRKCGAVSETIDHILGSCNTLANTKYLTRHNQVAHIIHQKILIDRKMKTEIVPYYKYVPNEVEENDQFKIYWDKTIYTDHTIEHNRPDITLIDKKKHTTYLIDVSIPGTHNLQQKHTEKLNKYQALQHEIKRIWNMREVYIIPIILSSIGVIPKNLEKNLKMIQIPITVIEEMQKAAILQSLNIVRSFLAVGNAHES

SEQ ID NO: 880 - protein, 1199 aa, Apoderus coryli
MSQRRNERMRQPGMPQGTSGANAGRGSMRSVGGRLLNRRAPIAQETTANSNNVEIPPADPQPAANVREDNPPPIAPGRSRRMRWSTNLNKDVMRYYFIATSLETDFTDYRDRLKNMFAAEHPEHNDITAQRLSDQRRAIQRNNLLTQIEIQYILDRVREELNIPHTPNQSFEDDNVYGTHTPSDSPRGSPFNNIDIEIPQEPHQEDEILNTYHANLLKYLGMDPNVRPPIQKLRFNKNTGTLINRANSILEQTLNDGMNLEEVHSTIYCAAITVVSLNQKYTSPNKKNTDGYLPSWQRRLTNKINGLRRSIGKTQQYHDGNRNNRLLRTLPTDLKDIIQTINAETENKVRTYLDTLKQKLAAYSARLKRYRESYSRRRDNSLFSNNEKAFYSSLSKKYDNLNPPDLESQTNYWTSIWSQSNNHTKNTWINQEMKAQNSLQPMNEIVITQADLTAALKKIANWKAPGRDGLHSFWYKRFTACHELLVNNFNDVIRFPNNFPTFLTEGLTYLIPKTDNPDHPSLFRPITCLPTLYKILTSILCAKLEDHLELAQVMTDEQKGARRNVMGCKEQLVVDSVVMQQLRVGQRNAHIAYIDYKKAFDSVPHSWLKFVLTLYKVHPTLILFLETTMRAWRTTLSQKINNELVFSGSIPLRRGIFQGDSLSALWFCLSLNPISNTLKKTEYGVKLKNNVQDLLVSHLFYVDDLKLYAANDRQLRAMLKLVHDMSSDIGMTFGLEKCRTIKMVKGVLKESQPIEINNEVVIQGIEEPYKYLGIDQTHKIEHTTMKSKLSTEFEKRVKLIIKTKLNSKNIVKAINTYAISALTHSFGIIRWSDTDLDALNRRIRTLLTHKRMHHPNACTERVTLPRCLGGRGLKDVKAMYYEQLDNIRKYFYKNSDKPMYRAVIEADKNLTTLNLKSREYNPKTHITTNEDKIRMWSGKQLHGRFYNSVQNNYVDKSLSFMWATKGYLHPETEGFLMATQDQVIKTRNYAKYILGEDLSSDKCRKCGAVSETIDHILGSCNTLANTKYLTRHNQVAHIIHQKILIDRKMKTEIVPYYKYVPNEVEENDQFKIYWDKTIYTDHTIEHNRPDITLIDKKKHTTYLIDVSIPGTHNLQQKHTEKLNKYQALQHEIKRIWNMREVYIIPIILSSIGVIPKNLEKNLKMIQIPITVIEEMQKAAILQSLNIVRSFLAVGNAHES

SEQ ID NO: 881 - protein, 1118 aa, Apoderus coryli
MRWSTNLNKDVMRYYFIATSLETDFTDYRDRLKNMFAAEHPEHNDITAQRLSDQRRAIQRNNLLTQIEIQYILDRVREELNIPHTPNQSFEDDNVYGTHTPSDSPRGSPFNNIDIEIPQEPHQEDEILNTYHANLLKYLGMDPNVRPPIQKLRFNKNTGTLINRANSILEQTLNDGMNLEEVHSTIYCAAITVVSLNQKYTSPNKKNTDGYLPSWQRRLTNKINGLRRSIGKTQQYHDGNRNNRLLRTLPTDLKDIIQTINAETENKVRTYLDTLKQKLAAYSARLKRYRESYSRRRDNSLFSNNEKAFYSSLSKKYDNLNPPDLESQTNYWTSIWSQSNNHTKNTWINQEMKAQNSLQPMNEIVITQADLTAALKKIANWKAPGRDGLHSFWYKRFTACHELLVNNFNDVIRFPNNFPTFLTEGLTYLIPKTDNPDHPSLFRPITCLPTLYKILTSILCAKLEDHLELAQVMTDEQKGARRNVMGCKEQLVVDSVVMQQLRVGQRNAHIAYIDYKKAFDSVPHSWLKFVLTLYKVHPTLILFLETTMRAWRTTLSQKINNELVFSGSIPLRRGIFQGDSLSALWFCLSLNPISNTLKKTEYGVKLKNNVQDLLVSHLFYVDDLKVYAANDRQLRAMLKLVHDMSSDIGMTFGLEKCRTIKMVKGVLKESQPIEINNEVVIQGIEEPYKYLGIDQTHKIEHTTMKSKLSTEFEKRVKLIIKTKLNSKNIVKAINTYAISALTHSFGIIRWSDTDLDALNRRIRTLLTHKRMHHPNACTERVTLPRCLGGRGLKDVKAMYYEQLDNIRKYFYKNSDKPMYRAVIEADKNLTTLNLKSREYNPKTHITTNEDKIRMWSGKQLHGRFYNSVQNNYVDKSLSFMWATKGYLHPETEGFLMATQDQVIKTRNYAKYILGEDLSSDKCRKCGAVSETIDHILGSCNTLANTKYLTRHNQVAHIIHQKILIDRKMKTEIVPYYKYVPNEVEENDQFKIYWDKTIYTDHTIEHNRPDITLIDKKKHTTYLIDVSIPGTHNLQQKHTEKLNKYQALQHEIKRIWNMREVYIIPIILSSIGVIPKNLEKNLKMIEIPITVIEEMQKAAILQSLNIVRSFLAVGNAHES

SEQ ID NO: 882 - protein, 1153 aa, Apoderus coryli
MSQRRNERMRQPGMPQGTSGANAGRGSMRSVGGRLLNRRAPIAQETTANSNNVEIPPADPQPAANVREDNPPPIAPGRSRRMRWSTNLNKDVMRYYFIATSLETDFTDYRDRLKNMFAAEHPEHNDITAQRLSDQRRAIQRNNLLTQIEIQYILDRVREELNIPHTPNQSFEDDNVYGTHTPSDSPRGSPFNNIDIEIPQEPHQEDEILNTYHANLLKYLGMDPNVRPPIQKLRFNKNTGTLINRANSILEQTLNDGMNLEEVHSTIYCAAITVVSLNQKYTSPNKKNTDGYLPSWQRRLTNKINGLRRSIGKTQQYHDGNRNNRLLRTLPTDLKDIIQTINAETENKVRTYLDTLKQKLAAYSARLKRYRESYSRRRDNSLFSNNEKAFYSSLSKKYDNLNPPDLESQTNYWTSIWSQSNNHTKNTWINQEMKAQNSLQPMNEIVITQADLTAALKKIANWKAPGRDGLHSFWYKRFTACHELLVNNFNDVIRFPNNFPTFLTEGLTYLIPKTDNPDHPSLFRPITCLPTLYKILTSILCAKLEDHLELAQVMTDEQKGARRNVMGCKEQLVVDSVVMQQLRVGQRNAHIAYIDYKKAFDSVPHSWLKFVLTLYKVHPTLILFLETTMRAWRTTLSQKINNELVFSGSIPLRRGIFQGDSLSALWFCLSLNPISNTLKKTEYGVKLKNNVQDLLVSHLFYVDDLKVYAANDRQLRAMLKLVHDMSSDIGMTFGLEKCRTIKMVKGVLKESQPIEINNEVVIQGIEEPYKYLGIDQTHKIEHTTMKSKLSTEFEKRVKLIIKTKLNSKNIVKAINTYAISALTHSFGIIRWSDTDLDALNRRIRTLLTHKRMHHPNACTERVTLPRCLGGRGLKDVKAMYYEQLDNIRKYFYKNSDKPMYRAVIEADKNLTTLNLKSREYNPKTHITTNEDKIRMWSGKQLHGRFYNSVQNNYVDKSLSFMWATKGYLHPETEGFLMATQDQVIKTRNYAKYILGEDLSSDKCRKCGAVSETIDHILGSCNTLANTKYLTRHNQVAHIIHQKILIDRKMKTEIVPYYKYVPNEVEENDQFKIYWDKTIYTDHTIEHNRPDITLIDKKKHTTYLIDVSIPGTHNLQQKHTEKLNKYQALQHEIKRIWNMREVCIIPNNNNNNNK

SEQ ID NO: 883 - protein, 929 aa, Pammene fasciana
MNTRSRTQATLQQNVSSTPPPAPCSPVSSLSSPGDEFASAPNTDRSDGEQEPSPPPPRQTIQREQTPIPTGSEPARLSAPPPPMNHENPTYCPLCPTNRSFKGQRGLNIHLSLFHGTNRTNTDFMTIRNATDVPQVSQTTNCLSDLPTLKSNIPVLRHIPKGARCLASDKLCTIIDDCLQTNSADDWFRLLSFSYSALKVPDATERRSLTSKVKNNINDLHLYFQAPQSTIKPTSLYRAIETKVHDGDLRGAVRLLLSDSSLAPSNEVTLQALREKHPPPSRSVALPPEPSIASPFLSVTSLEVAKAIASFYNGSASGLDGLRPQHLKELISSSAGNNGPRLLESLTKLCNFLLRGMLNIEVRPFLYGASLCALSKKDGGIRPIAVGSIFRRLTAKLCCRAIRESMSVYLQPRQMGFGTLLGCEAAIHSTRHFAVGHDTSDDVIIKLDIKNAFNSVERDTILNEVLEQTPTLFPFIYQCYASSSNLFYRSTAIKSQVGAQQGDPLGPLIFCLAIHKIISKIEAPLNIWYLDDGVIGGSPEVVIKDLKALIPAFKTIGLEINPTKCELFNCGGISANTFSAFEAVLPGLRQITKSSFTLLGAPIFAEGVSSILQAKRQALSAARWHLAHLSSHVSLILLRNCFALPRMVYTLRTSPTWLFEQDQKAIDETLKLTVETLLNVSLNETQWRQATLPVRHGGLGVRQVQDIGLVAFLASTHGCSDLVARILDIDNSNDLQIPFANEALSKWATLCPTDDRPEDLTVQRAWDDILCKLTSSNLQHEASGADLARLKAISKPESGAWLHALPSPQLGTLLDNNSLRIAVALRLGSRVCNAHRCTCGAMVEENGHHGLSCQRCAGRFPRHHSLNDIIRRAMISVNVPCLLEPPGLSRSDGKRPDGLTLIPWRRGRCLIWDATCVSTFAASHLRHTL

SEQ ID NO: 884 - protein, 956 aa, Apotomis turbidana
MNSPPKVSCPYCPGLPKLYVQSRGLNVHISRVHRDLVSQNRETPDLPNRADTRSTPVTDSNNASTPQGSRNFNDLPSLKANIRVLRHIPKGARSLAAGKLCAVIEDCLHTNSVDDWFKLLSFSFSSLRVPEVGGCKSLTSKVKSNLEDASLYCPEERSSSKRPSVYRNIEAKVHDGDLRGAVRLLMSDSSLAPANADTIRALKEKHPAPSAVQVLPQEPNITSPYLTVSPLDVAEAISSFYNGSAAGPDGLRPQHLKELISASAGCNGPRLLESITRLCNFLLRGMLNMEVRPFLYGASLCALSKKDGGIRPIAVGSVFRRLVAKLCCRSVREAMSCYLQPNQVGFGTALGCEAAIHSTRLFAKEHMGSNKILVKIDIKNAFNSIDRGTLLNEVLEQTPSLYPFIYQCYASPSNLFYSENLIQSQVGAQQGDPLGPLLFCLGIQKVISELKAPLNIWYLDDGILGGSPEVVLQDLKALIPALKAMGLEINPAKCELYSCSDLVTNYLGDLQTLLPGITQTDKSSFNLLGAPIFLEGVRSTLELKRLKRLSSVQEHLEHLSGHVSLTLLRNCFALPRMVYVLRTSPTWMFVSELEAIDATLKLILESVLNVSLDEVQWRQAVLPIRFGGLGVRRVQDIGLVAFLASVHGSADLVTRILSLNGSNIRLPFVSEAFEKWGMSCPTDDRPDNLVAQRGWDDILCKLSYSRLLDDASGADLARLNAVAKPESGAWLHALPSPQLGTLLDNDSLRIAVALRLGTKVCEPHRCICGVMVEENGHHGLSCQRCAGRFSRHHSINEIVRRAMVSVNIPCVLEPPGLSRTDGKRPDGLTLVPWQRGRCLLWDATCVSTFAPSHLRQTARLAGSAAETAAKMKHAKYAALESMYDFVPVAVETAGPWGSEARELFRDLGRRLRERGNDPRSGSWLVQQVSIAIQRGNAASIMGTFGPNMALRGDLRD

SEQ ID NO: 885 - protein, 955 aa, Apotomis turbidana
MNSPPKVSCPYCPGLPKLYVQSRGLNVHISRVHRDLVSQNRETPDLPNRADTRSTPVTDSNNASTPQGSRNFNDLPSLKANIRVLRHIPKGARSLAAGKLCAVIEDCLHTNSVDDWFKLLSFSFSSLRVPEVGGCKSLTSKVKSNLEDASLYCPEERSSSKRPSVYRNIEAKVHDGDLRGAVRLLMSDSSLAPANADTIRALKEKHPAPSAVQVLPQEPNITSPYLTVSPLDVAEAISSFYNGSAAGPDGLRPQHLKELISASAGCNGPRLLESITRLCNFLLRGMLNMEVRPFLYGASLCALSKKDGGIRPIAVGSVFRRLVAKLCCRSVREAMSCYLQPNQVGFGTALGCEAAIHSTRLFAKEHMGSNKILVKIDIKNAFNSIDRGTLLNEVLEQTPSLYPFIYQCYASPSNLFYSENLIQSQVGAQQGDPLGPLLFCLGIQKVISELKAPLNIWYLDDGILGGSPEVVLQDLKALIPALKAMGLEINPAKCELYSCSDLVTNYLGDLQTLLPGITQTDKSSFNLLGAPIFLEGVRSTLELKRQALSSVQEHLEHLSGHVSLTLLRNCFALPRMVYVLRTSPTWMFVSELEAIDATLKLILESVLNVSLDEVQWRQAVLPIRFGGLGVRRVQDIGLVAFLASVHGSADLVTRILSLNGSNIRLPFVSEAFEKWGMSCPTDDRPDNLVAQRGWDDILCKLSYSRLLDDASGADLARLNAVAKPESGAWLHALPSPQLGTLLDNDSLRIAVALRLGTKVCEPHRCICGVMVEENGHHGLSCQRCAGRFSRHHSINEIVRRAMVSVNIPCVLEPPGLSRTDGKRPDGLTLVPWQRGRCLLWDATCVSTFAPSHLRQTARLAGSAAETAAKMKHAKYAALESMYDFVPVAVETAGPWGSEARELFRDLGRRLRERGNDPRSGSWLVQQVSIAIQRGNAASIMGTFGPNMALRGDLRD

SEQ ID NO: 886 - protein, 956 aa, Hedya salicella
MNSPPKVSCPYCPGLPKLYVQSRGLNVHISKVHRDVVSQSRDTSVLPNHTDAPPVLTVTSDNGSQGTQTGRNLNDLPSLKAKIRVLRHIPKGARSLAAGKLCTVIEDCLHTNSVDDWFRLLSFSYSALRVPDAEGCKSLTSKVKLNIENGSLYFPEDQASTKPPSVYRTIEAKVHDGDLRGAVRLLLSDSSLAPVNEDTMTVLRDKHPAPSALQVLPPEPNIASSFLTVTQLDVANAIASFYNGSAAGLDGLRPQHLKELISTSAGNNGHRLLDSITKLCNFLLRGMLNIEVRPFLYGASLCALSKKDGGIRPIAVGSIFRRLAAKLCCRSVRDVMSCYLQPIQVGFGTALGCEAAIHSTRSFAIQHEMSNFIIVKIDIKNAFNSVDRGTILNEVLEQTPSLYPFVYQCYASSSNLFYSTNVIRSQVGAQQGDPLGPLLFCLAIQKVISGLKAPLNVWYLDDGIIGGSPEVVLKDLKTLIPALKLVGLEINPAKCELFVCGGLLFNTLRDFESLLPGVTQIDRSSFNLLGAPIFLEGVRSTLQLKRQALSSVREHLEHLSGHVSLTLLRNCFSLPRMVYFLRTSPTWMFEQDLQSLDGILKLTLESVLNVHLDEIQWRQAALPIRHGGLGVRRVQDIGLVAFLASAYGSADLVARILSLDGSDIRLPFVSEAFERWALLCPTDDRPDNLTVQRGWDDILCKLSYSRLLDGASGADLARLKAVAKPESGAWLHALPSPQLGTLLDNDSLRIAVALRLGGKVCEAHRCICGVMVEENGHHGLSCQRCAGRFPRHHSINEIVRRAMVSVNIPCVLEPPGLSRTDGKRPDGLTLVPWRRGRCLLWDATCVSTFAASHLRQSVRSAGSAAETAAKLKHAKYSALESIYDFVPVAVETAGPWGDEARELFKQLGRRLRERGNDPRSGSWLVQQVSIAIQRGNAASIMGTFGPGMALREIWIA

SEQ ID NO: 887 - protein, 955 aa, Apotomis turbidana
MNSPPKVSCPYCPGLPKLYVQSRGLNVHISRVHRDLVSQNRETPDLPNRADTRSTPVTDSNNASTPQGSRNFNDLPSLKANIRVLRHIPKGARSLAAGKLCAVIEDCLHTNSVDDWFKLLSFSFSSLRVPEVGGCKSLTSKVKSNLEDASLYCPEERSSSKRPSVYRNIEAKVHDGDLRGAVRLLMSDSSLAPANADTIRALKEKHPAPSAVQVLPQEPNITSPYLTVSPLDVAEAISSFYNGSAAGPDGLRPQHLKELISASAGCNGPRLLESITRLCNFLLRGMLNMEVRPFLYGASLCALSKKDGGIRPIAVGSVFRRLVAKLCCRSVREAMSCYLQPNQVGFGTALGCEAAIHSTRLFAKEHMGSNKILVKIDIKNAFNSIDRGTLLNEVLEQTPSLYPFIYQCYASPSNLFYSENLIQSQVGAQQGDPLGPLLFCLGIQKVISELKAPLNIWYLDDGILGGSPEVVLQDLKALIPALKAMGLEINPAKCELYSCSDLVTNYLGDLQTLLPGITQTDKSSFNLLGAPIFLEGVRSTLELKRQALSSVQEHLEHLSGHVSLTLLRNCFALPRMVYVLRTSPTWMFVSELEAIDATLKLILESVLNVSLDEVQWRQAVLPIRFGGLGVRRVQDIGLVAFLASVHGSADLVTRILSLNGSNIRLPFVSEAFEKWGMSCPTDDRPDNLEAQRGWDDILCKLSYSRLLDDASGADLARLNAVAKPESGAWLHALPSPQLGTLLDNDSLRIAVALRLGTKVCEPHRCICGVMVEENGHHGLSCQRCAGRFSRHHSINEIVRRAMVSVNIPCVLEPPGLSRTDGKRPDGLTLVPWQRGRCLLWDATCVSTFAPSHLRQTARLAGSAAETAAKMKHAKYAALESMYDFVPVAVETAGPWGSEARELFRDLGRRLRERGNDPRSGSWLVQQVSIAIQRGNAASIMGTFGPNMALRGDLRD

SEQ ID NO: 888 - protein, 956 aa, Hedya salicella
MNSPPKVSCPYCPGLPKLYVQSRGLNVHISKVHRDVVSQSRDTSVLPNHTDAPPVLTVTSDNGSQGTQTGRNLNDLPSLKAKIRVLRHIPKGARSLAAGKLCTVIEDCLHTNSVDDWFRLLSFSYSALRVPDAEGCKSLTSKVKLNIENGSLYFPEDQASTKPPSVYRTIEAKVHDGDLRGAVRLLLSDSSLAPVNEDTMTVLRDKHPAPSALQVLPPEPNIASSFLTVTQLDVANAIASFYNGSAAGLDGLRPQHLKELISTSAGNNGHRLLDSITKLCNFLLRGMLNIEVRPFLYGASLCALSKKDGGIRPIAVGSIFRRLAAKLCCRSVRDVMSCYLQPIQVGFGTALGCEAAIHSTRSFAIQHEMSNFIIVKIDIKNAFNSVDRGTILNEVLEQTPSLYPFVYQCYASSSNLFYSTNVIRSQVGAQQGDPLGPLLFCLAIQKVISGLKAPLNVWYLDDGIIGGSPEVVLKDLKTLIPALKLVGLEINPAKCELFVCGGLLFNTLRDFESLLPGVTQIDRSSFNLLGAPIFLEGVRSTLQLKRQALSSVREHLEHLSGHVSLTLLRNCFSLPRMVYFLRTSPTWMFEQDLQSLDGILKLTLESVLNVHLDEIQWRQAALPIRHGGLGVRRVQDIGLVAFLASAYGSADLVARILSLDGSDIRLPFVSEAFERWALLCPTDDRPDNLTVQRGWDDILCKLSYSRLLDGASGADLARLKAVAKPESGAWLHALPSPQLGTLLDNDSLRIAVALRLGGKVCEAHRCICGVMVEENGHHGLSCQRCAGRFPRHHSINEIVRRAMVSVNIPCVLEPPGLSRTDGKRPDGLTLVPWRRGRCLLWDATCVSTFAASHLRQSVRSAGSAAETAAKLKHAKYSALESIYDFVPVAVETAGPWGDEARELFKQLGRRLRERGNDPRSGSWLVQQVSIAIQRGNAASIMGTFGPGMALRENWIA

SEQ ID NO: 889 - protein, 956 aa, Hedya salicella
MNSPPKVSCPYCPGLPKLYVQSRGLNVHISKVHRDVVSQSRDTSVLSNHTDAPPVLTVTSDNGSQGTQTGRNLNDLPSLKAKIRVLRHIPKGARSLAAGKLCTVIEDCLHTNSVDDWFRLLSFSYSALRVPDAEGCKSLTSKVKLNIENGSLYFPEDQASTKPPSVYRTFEAKVHDGDLRGAVRLLLSDSSLAPVNEDTMTVLRDKHPAPSAFQVLPPEPNIASSFLTVSQLDVANAIASFYNGSAAGLDGLRPQHLKELISTSAGNNGHRLLDSITKLCNFLLRGMLNIEVKPFLYGASLCALSKKDGGIRPIAVGSIFRRLAAKLCCRSVRDVMSCYLQPIQVGFGTALGCEAAIHSTRSFAIQHETSNFIIVKIDIKNAFNSVDRGTILNEVLEQTPSLYPFVYQCYASSSNLFYATNVIRSQVGAQQGDPLGPLLFCLAIQKVISGLKAPLNVWYLDDGIIGGSPEVVLKDLKTLIPALKLVGLEINPAKCELFVCGGLLFNTLRDFESLLPGVTQIDRSSFNLLGAPIFLEGVRSTLQLKRQALSSVREHLEHLSGHVSLTLLRNCFSLPRMVYFLRTSPTWMFEQDLQSIDGILKLTLESVLNVHLDEIQWRQAALPIRHGGLGVRRVQDIGLVAFLASAYGSADLVARILSLDGSDIRLPFVSEAFERWALLCPTDDRPDNRTVQRGWDDILCKLSYSRLLDGASGADLARLKAVAKPESGAWLHALPSPQLGTLLDNDSLRIAVALRLGGKVCEAHRCICGVMVEENGHHGLSCQRCAGRFPRHHSINEIVRRAMVSVNIPCVLEPPGLSRTDGKRPDGLTLVPWRRGRCLLWDATCVSTFAASHLRQSVRSAGSAAETAAKLKHAKYSALESIYDFVPVAVETAGPWGDEARELFKQLGRRLRERGNDPRSGSWLVQQVSIAIQRGNAASIMGTFGPGMALRENWIA

SEQ ID NO: 890 - protein, 958 aa, Hedya salicella
MNSPPKVSCPYCPGLPKLYVQSRGLNVHISKVHRDVVSQSRDTSVLSNHTDAPPVLTVTSDNGSQGTQTGRNLNDLPSLKAKIRVLRHIRVPKGARSLAAGKLCTVIEDCLHTNSVDDWFRLLSFSYSALRVPDAEGCKSLTSKVKLNIENGSLYFPEDQASTKPPSVYRTIEAKVHDGDLRGAVRLLLSDFSLAPVNEDTMTVLRDKHPAPSAFQVLPPEPNIASSFLTVSQLDVANAIASFYNGSAAGLDGLRPQHLKELISTSAGNNGHRLLDSITKLCNFLLRGMLNIEVKPFLYGASLCALSKKDGGIRPIAVGGIFRRLAAKLCCRSVRDVMSCYLQPIQVGFGTALGCEAAIHSTRSFAIQHETSNFIIVKIDIKNAFNSVDRGTILNEVLELTPSLYPFVYQCYASSSNLCYSTNVIRSQVGAQQGDPLGPLLFCLAIQKVISGLKAPLNVWYLDDGIIGGSPEVVLKDLKTLIPALKLVGLEINPAKCELFVCGGLLFNTLRDFESLLPGVTQIDRSSFNLLGAPIFLEGVRSTLQLKRQALSSVREHLEHLSGHVSLTLLRNCFSLPRMVYFLRTSPTWMFEQDLQSLDGILKLTLESVLNVHLDEIQWRQAALPIRHGGLGVRRVQDIGLVAFLASAYGSADLVARILSLDGSDIRLPFVSEAFERWALLCPTDDRPDNRTVQRGWDDILCKLSYSRLLDGASGADLARLKAVAKPESGAWLHALPSPQLGTLLDNDSLRIAVALRLGGKVCEAHRCICGVMVEENGHHGLSCQRCAGRFPRHHSINEIVRRAMVSVNIPCVLEPPGLSRTDGKRPDGLTLVPWRRGRCLLWDATCVSTFAASHLRQSVRSAGSAAETAAKLKHAKYSALESIYDFVPVAVETAGPWGDEARELFKQLGRRLRERGNDPRSGSWLVQQVSIAIQRGNAASIMGTFGPGMALRENWIA

SEQ ID NO: 891 - protein, 770 aa, Apotomis turbidana
MSDSSLAPANADTIRALKEKHPAPSAVQVLPQEPNITSPYLTVSPLDVAEAISSFYNGSAAGPDGLRPQHLKELISASAGCNGPRLLESITRLCNFLLRGMLNMEVRPFLYGASLCALSKKDGGIRPIAVGSVFRRLVAKLCCRSVREAMSCYLQPNQVGFGTALGCEAAIHSTRLFAKEHMGSNKILVKIDIKNAFNSIDRGTLLNEVLEQTPSLYPFIYQCYASPSNLFYSENLIQSQVGAQQGDPLGPLLFCLGIQKVISELKAPLNIWYLDDGILGGSPEVVLQDLKALIPALKAMGLEINPAKCELYSCSDLVTNYLGDLQTLLPGITQTDKSSFNLLGAPIFLEGVRSTLELKRQALSSVQEHLEHLSGHVSLTLLRNCFALPRMVYVLRTSPTWMFVSELEAIDATLKLILESVLNVSLDEVQWRQAVLPIRFGGLGVRRVQDIGLVAFLASVHGSADLVTRILSLNGSNIRLPFVSEAFEKWGMSCPTDDRPDNLVAQRGWDDILCKLSYSRLLDDASGADLARLNAVAKPESGAWLHALPSPQLGTLLDNDSLRIAVALRLGTKVCEPHRCICGVMVEENGHHGLSCQRCAGRFSRHHSINEIVRRAMVSVNIPCVLEPPGLSRTDGKRPDGLTLVPWQRGRCLLWDATCVSTFAPSHLRQTARLAGSAAETAAKMKHAKYAALESMYDFVPVAVETAGPWGSEARELFRDLGRRLRERGNDPRSGSWLVQQVSIAIQRGNAASIMGTFGPNMALRGDLRD

SEQ ID NO: 892 - protein, 956 aa, Hedya salicella
MNSPPKVSCPYCPGLPKLYVQSRGLNVHISKVHRDVVSQSRDTSVLPNHTDAPPVLTVTSDNGSQGTQTGRNLNDLPSLKAKIRVLRHIPKGARSLAAGKLCTVIEDCLHTNSVDDWFRLLSFSYSALRVPDAEGCKSLTSKVKLNIENGSLYFPEDQASTKPPSVYRTIEAKVHDGDLRGAVRLLLSDSSLAPVNEDTMTVLRDKHPAPSALQVLPPEPNIASSFLTVTQLDVANAIASFYNGSAAGLDGLRPQHLKELISTSAGNNGHRLLDSITKLCNFLLRGMLNIEVRPFLYGASLCALSKKDGGIRPIAVGSIFRRLAAKLCCRSVRDVMSCYLQPIQVGFGTALGCEAAIHSTRSFAIQHEMSNFIIVKIDIKNAFNSVDRGTILNEVLEQTPSLYPFVYQCYASSSNLFYSTNVIRSQVGAQQGDPLGPLLFCLAIQKVISGLKAPLNVWYLDDGIIGGSPEVVLKDLKTLIPALKLVGLEINPAKCELFVCGGLLFNTLRDFESLLPGVTQIDRSSFNLLGAPIFLEGVRSTLQLKRQALSSVREHLEHLSGHVSLTLLRNCFSLPWMVYFLRTSPTWMFEQDLQSLDGILKLTLESVLNVHLDEIQWRQAALPIRHGGLGVRRVQDIGLVAFLASAYGSADLVARILSLDGSDIRLPFVSEAFERWALLCPTDDRPDNLTVQRGWDDILCKLSYSRLLDGASVADLARLKAVAKPESGAWLHALPSPQLGTLLDNDSLRIAVALRLGGKVCEAHRCICGVMVEENGHHGLSCQRCAGRFPRHHSINEIVRRAMVSVNIPCVLEPPGLSRTDGKRPDGLTLVPWRRGRCLLWDATCVSTFAASHLRQSVRSAGSAAETAAKLKHAKYSALESIYDFVPVAVETAGPWGDEARELFKQLGRRLRERGNDPRSGSWLVQQVSIAIQRGNAASIMGTFGPGMALRENWIA

SEQ ID NO: 893 - protein, 956 aa, Hedya salicella
MNSPPKVSCPYCPGLPKLYVQSRGLNVHISKVHRDVVSQSRDTSVLPNHTDAPPVLTVTSDNGSQGTQTGRNLNDLPSLKAKIRVLRHIPKGARSLAAGKLCTVIEDCLHTNSVDDWFRLLSFSYSALRVPDAEGCKSLTSKVKLNIENGSLYFPEDQASTKPPSVYRTIEAKVHDGDLRGAVRLLLSDSSLAPVNEDTMTVLRDKHPAPSALQVLPPEPNIASSFLTVTQLDVANAIASFYNGSAAGLDGLRPQHLKELISTSAGNNGHRLLDSITKLCNFLLRGMLNIEVRPFLYGASLCALSKKDGGIRPIAVGSIFRRLAAKLCCRSVRDVMSCYLQPIQVGFGTALGCEAAIHSTRSFAIQHEMSNFIIVKIDIKNAFNSVDRGTILNEVLEQTPSLYPFVYQCYASSSNLFYSTNVIRSQVGAQQGDPLGPLLFCLAIQKVISGLKAPLNVWYLDDGIIGGSPEVVLKDLKTLIPALKLVGLEINPAKCELFVCGGLLFNTLRDFESLLPGVTQIDRSSFNLLGAPIFLEGVRSTLQLKRQALSSVREHLEHLSGHVSLTLLRNCFSLPRMVYFLRTSPTWMFEQDLQSLDGILKLTLESVLNVHLDEIQWRQAALPIRHGGLGVRRVQDIGLVAFLASAYGSADLVARILSLDGSDIRLPFVSVAFERWALLCPTDDRPDNLTVQRGWDDILCKLSYSRLLDGASGADLARLKAVAKPESGAWLHALPSPQLGTLLDNDSLRIAVALRLGGKVCEAHRCICGVMVEENGHHGLSCQRCAGRFPRHHSINEIVRRAMVSVNIPCVLEPPGLSRTDGKRPDGLTLVPWRRGRCLLWDATCVSTFAASHLRQSVRSAGSAAETAAKLKHAKYSALESIYDFVPVAVETAGPWGDEARELFKQLGRRLRERGNDPRSGSWLVQQVSIAIQRGNAASIMGTFGPGMALRENWIA

SEQ ID NO: 894 - protein, 956 aa, Hedya salicella
MNSPPKVSCPYCPGLPKLYVQSRGLNVHISKVHRDVVSQSRDTSVLPNHTDAPPVLTVTSDNGSQGTQTGRNLNDLPSLKAKIRVLRHIPKGARSLAAGKLCTVIEDCLHTNSVDDWFRLLSFSYSALRVPDAEGCKSLTSKVKLNLENGSLYFPEDQASTKPPSVYRTIEAKVHDGDLRGAVRLLLSDSSLAPVNEDTMTVLRDKHPAPSALQVLPPEPNIASSFLTVTQLDVANAIASFYNGSAAGLDGLRPQHLKELISTSAGNNGHRLLDSITKLCNFLLRGMLNIEVRPFLYGASLCALSKKDGGIRPIAVGSIFRRLAAKLCCRSVRDVMSCYLQPIQVGFGTALGCEAAIHSTRSFAIQHEMSNFIIVKIDIKNAFNSVDRGTILNEVLEQTPSLYPFVYQCYASSSNLFYSTNVIRSQVGAQQGDPLGPLLFCLAIQKVISGLKAPLNVWYLDDGIIGGSPEVVLKDLKTLIPALKLVGLEINPAKCELFVCGGLLFNTLRDFESLLPGVTQIDRSSFNLLGAPIFLEGVRSTLQLKRQALSSVREHLEHLSGHVSLTLLRNCFSLPRMVYFLRTSPTWMFEQDLQSLDGILKLTLESVLNVHLDEIQWRQAALPIRHGGLGVRRVQDIGLVAFLASAYGSADLVARILSLDGSDIRLPFVSEAFERWALLCPTDDRPDNLTVQRGWDDILCKLSYSRLLDGASGADLARLKAVAKPESGAWLHALPSPQLGTLLDNDSLRIAVALRLGGKVCEAHRCICGVMVEENGHHGLSCQRCAGRFPRHHSINEIVRRAMVSVNIPCVLEPPGLSRTDGKRPDGLTLVPWRRGRCLLWDATCVSTFAASHLRQSVRSAGSAAETAAKLKHAKYSALESIYDFVPVAVETAGPWGDEARELFKQLGRRLRERGNDPRSGSWLVQQVSIAIQRGNAASIMGTFGPGMALRENWIA

SEQ ID NO: 895 - protein, 955 aa, Apotomis turbidana
MNSPPKVSCPYCPGLPKLYVQSRGLNVHISRVHRDLVSQNRETPDLPNRADTRSTPVTDSNNASTPQGSRNFNDLPSLKANIRVLRHIPKGARSLAAGKLCAVIEDCLHTNSVDDWFKLLSFSFSSLRVPEVGGCKSLTSKVKSNLEDASLYCPEERSSSKRPSVYRNIEAKVHDGDLRGAVRLLMSDSSLAPANADTIRALKEKHPAPSAVQVLPQEPNITSPYLTVSPLDVAEAISSFYNGSAAGPDGLRPQHLKELISASAGCNGPRLLESITRLCNFLLRGMLNMEVRPFLYGASLCALSKKDGGIRPIAVGSVFRRLVAKLCCRSVREAMSCYLQPNQVGFGTALGCEAAIHSTRLFAKEHMGSNKILVKIDIKNAFNSIDRGTLLNEVLEQTPSLYPFIYQCYASPSNLFYSENLIQSQVGAQQGDPLGPLLFCLGIQKVISELKAPLNIWYLDDGILGGSPEVVLQDLKALIPALKAMGLEINPAKCELYSCSDLVTNYLGYLQTLLPGITQTDKSSFNLLGAPIFLEGVRSTLELKRQALSSVQEHLEHLSGHVSLTLLRNCFALPRMVYVLRTSPTWMFVSELEAIDATLKLILESVLNVSLDEVQWRQAVLPIRFGGLGVRRVQDIGLVAFLASVHGSADLVTRILSLNGSNIRLPFVSEAFEKWGMSCPTDDRPDNLVAQRGWDDILCKLSYSRLLDDASGADLARLNAVAKPESGAWLHALPSPQLGTLLDNDSLRIAVALRLGTKVCEPHRCICGVMVEENGHHGLSCQRCAGRFSRHHSINEIVRRAMVSVNIPCVLEPPGLSRTDGKRPDGLTLVPWQRGRCLLWDATCVSTFAPSHLRQTARLAGSAAETAAKMKHAKYAALESMYDFVPVAVETAGPWGSEARELFRDLGRRLRERGNDPRSGSWLVQQVSIAIQRGNAASIMGTFGPNMALRGDLRD

SEQ ID NO: 896 - protein, 956 aa, Hedya salicella
MNSPPKVSCPYCPGLPKLYVQSRGLNVHISKVHRDVVSQSRDTSVLPNHTDAPPVLTVTSDNGSQGTQTGRNLNDLPSLKAKIRVLRHIPKGARSLAAGKLCTVIEDCLHTNSVDDWFRLLSFSYSALRVPDAEGCKSLTSKVKLNIENGSLYFPEDQASTKPPSVYRTIEAKVHDGDLRGAVRLLLSDSSLAPVNEDTMTVLRDKHPAPSALQVLPPEPNIASSFLTVTQLDVANAIASFYNGSAAGLDGLRPQHLKELISTSAGNNGHRLLDSITKLCNFLLRGMLNIEVRPFLYGASLCALSKKDGGIRPIAVGSIFRRLAAKLCCRSVRDVMSCYLQPIQVGFGTALGCEAAIHSTRSFAIQHEMSNFIIVKIDIKNAFNSVDRGTILNEVLEQTPSLYPFVYQCYASSSNLFYSTNVIRSQVGAQQGDPLGPLLFCLAIQKVISGLKAPLNVWYLDDGIIGGSPEVVLKDLKTLIPALKLVGLEINPAKCELFVCGGLLFNTLRDFESLLPGVTQIDRSSFNLLGAPIFLEGVRSTLQLKRQALSSVREHLEHLSGHVSLTLLRNCFSLPRMVYFLRTSPTWMFEQDLQSLDGILKLTLESVLNVHLDEIQWRQAALPIRHGGLGVRRVQDIGLFAFLASAYGSADLVARILSLDGSDIRLPFVSEAFERWALLCPTDDRPDNLTVQRGWDDILCKLSYSRLLDGASGADLARLKAVAKPESGAWLHALPSPQLGTLLDNDSLRIAVALRLGGKVCEAHRCICGVMVEENGHHGLSCQRCAGRFPRHHSINEIVRRAMVSVNIPCVLEPPGLSRTDGKRPDGLTLVPWRRGRCLLWDATCVSTFAASHLRQSVRSAGSAAETAAKLKHAKYSALESIYDFVPVAVETAGPWGDEARELFKQLGRRLRERGNDPRSGSWLVQQVSIAIQRGNAASIMGTFGPGMALRENWIA

SEQ ID NO: 897 - protein, 956 aa, Craniophora ligustri
MNSPPKVSCPYCPGLPRLYVQSRGLNVHISRVHRDVASQNRDALDSRTDTDARSVPIRNPDTASEAPRTCRSFVDLPSLKANVRVLRHIPKGARNLAAGKLCTIVEDCLRTNSAEDWFKLLSFSYLALKVPDVGGSKSLTSKVKSNIDGANAYFPELKVPSKPASLYRSIETKVHDGDLRGAVRLLLSDSSLAPMNDHTLRALKDKHPAPSRQVVFPPEPNITSPFLTVSPLDVSNAIASFYNGSAAGLDGLRPQHLRELISPSAGSNGCRLLGSIAKLCNFLLRGLLNVEVRPFLYGASLCALSKKDGGIRPIAIGCIFRRLVAKLCCQSAKERMSSYLQPKQLGFGTAKGCEAAIHSTRSFAFRNEASNFIILKIDIKNAFNSVERDTILNEVLEQTPSLYPFIYQCYASPSNLFFSDSILKSQVGAQQGDPLGPLLFCLAIQKIISNLKAPLNVWYLDDGILGGSPEVLFQDLDKLIPALKAIGLEVNPAKCEVFSCSGSVTNSLEMLESLLPGITQIDRSCLNLLGAPIFPEGVSSVLQLKRQALLAAQEHLAHLSGHVALTLLRNCFGMPRMVYVLRTSPTWLFEQDSISLDDTLKLTLKSVLNVELDEAQWCQAALPIRHGGLGIRRVRDIGLVAFLASAHGSADLVARILSLDGNNIRLPFVSEALEKWAILCPNDDRPDSLVVQRDWDDILCKLSYSRLLNDASGVSLARLKAVTKPESGAWLHALPSPQLGTLLDNDSLRIAVALRLGGKVCEAHRCICGVMVEENGHHGLSCQRCAGRFPRHHSINEIVRRAMVSVNVPCVLEPLGLCRTDGKRPDGLTLVPWRRGRCLLWDATCVSTFAASHMKQTVRSAGAAAENAAKLKHAKYSALESVYDFVPVAVETAGPWGDEARELFKELGRRLREKGNDPRSGSWLVQQVSIAIQRGNAAGVMGTFGSGGAQSEYLTC

SEQ ID NO: 898 - protein, 957 aa, Hyposmocoma kahamanoa
MSSPCKVRCPYCPGSPKLYVQSRGLSVHISRAHRDVAHRRVDDSSVPGTGSGARTVTPAPALSEVTQAAQSTFGLHNLPSLKKQIRVLRHIPKGARNLAAGRLCYLIDECLRSNGVDDWFNLLSFPFSALRVPGDEGRKSLTSKVKNNVLNEILNFPGTQSTHKPHSTYRTIEAKVYDGDLRGAVRLLLSDSSLAPANDNTLRALEDKHPSPSRPLNFPPEPSLTSPSLSVTPTDVAMALGSFYNGSAAGLDGLRPQHLKELTSPSAGDNGPRLLKLLSDLCNFLLRAMLNLEVAPYLYGASLCALSKKDDGIRPIAVGGMYRRLVAKLCCRSVRDIMSTHLQPRQVGFGTPLGCEAAIHATRSFAMGHEGTDTVVVKIDIRNAFNSVERDIILSEILENVPSLYPFVYQCYSVPSNLYYGENSILSQVGAQQGDPLGPLLFCLAIQKIISSLDSPLNVWYLDDGTIGGSPEVVLQDLKRLGVALKAVGLEINPNKCELFNCGFINADVLENLMVLLPGIKQLDRSSVSLLGVPIFPEGVSSALQTKRLALLAAREHLSHMSAHVALVLLRNCLGMPRMTYILRTSPTWLFERDVALVDDVLRVTLEIVLNISLTLPQWYQAALPIRHGGLGVRRVQDVGFVAFLASSYGSADLVARILAQNGSGIRIPFQAEALTWWSSLCPSDEHPDNPSLQRNWDDVLCKRRYSSLLEGASGADVARLRAVAKSESGAWLHALPSPQLRTLLDNTSLRIAVALRLGSKVCEPHRCVCGAMVREDGHHGLSCQRCAGRFPRHHAINDIVRRAMVSANVPCVLEPPGLSRIDGKRPDGLTLVPWRKGRCLLWDATCVSTFAASHIRQTSQMAGSAAESAAKLKHAKYSALEPVYDFVPVAVETAGPWGSEARDLFKELGRRLRDRGCDHRSGSWLVQQVSIAVHRGNAASIMGTFAPGTIQGGISF

SEQ ID NO: 899 - protein, 1066 aa, Cydia splendana
MLTRLRKKAATNARPSSLPSPGPASPKSLHGISSSGDEFASATDTDESCNEHDPPQPLRSPLGSPPPSLPQPSLPPSLPLLLPPVPPQSQPPSPPMSLPQPPPPPSLQRVLPPQPACHGPTGQLTPTTLDNSTRCPLCPQNRSFKGQRGLNIHLRRHHGTSGISGTNPTQTGILDVVPLSQHTRNRLDDLPILKSNVPVLRHIPKGARCLAADKLCSIIDNCLHTNSVDDWISLLSFSYSALRVPDATERRSLTSKVKNNINNIQIYFPSTATAKPASLYRTIETKVHDGDLRGAVRLLLSDSALAPSNKNTLLALKQKHPPPSRLVTLPSEPNIASPFLSVTPSDVTTAILSFYNGSASGLDGLRPQHLKELISPAAGNNGPRLLEALAKLCNFLLRGMLNMEVRPFLYGASLCALSKKDGGIRPIAVGSIFRRLTAKLCCRAVRETMSGYLQPRQLGFGTILGCEAAIHATRHFATEHHTTNDIIIKIDIKNAFNSVERDVILNEVLDKIPRLYPFIYQCYASPSNLFYSGERFQSQVGAQQGDPLGPLLFCLAIHKMISAVKAPLNVWYLDDGVIGGSPDVVIENLKTLIPALKTIGLEINPSKCEFFTCGDITFETLTDLETVLPGMRQIVKSSFQLLGAPIFSEGVSSVLQSKRQALSGVREHLVNLSGHVSLILLRNCFALPRTVYTLRTSPTWLFEQDQQTLDDTLKLILETVLNVSLSVDQWRQASLPVRYGGLGIRRVQDIGLVAFLASIHSSADLVGRILAIESTNICIPFASDALAKWATLCPSNEHPDSPAVQRGWDDILCRLRHANLQAGASGTDLARLKAASKPESGAWLHALPSPQLGTLLDNDSLRIAVALRLGCKVCNPHRCICGVMVEENGHHGLSCQRCAGRFPRHHSLNEIVRRAMLSVGVPCLLEPPGLSRTDGKRPDGLTLVPWQRGRCLIWDATCVSTFAASHVGHTAKSAGSAAETAAKNKHQKYFALGANYDFVPVAVETAGPWGREARDLFREIGKRLREKGNDPRSESWLVQQVSIAIQRSNAASVMGTFGPGMAQNGF

SEQ ID NO: 900 - protein, 956 aa, Craniophora ligustri
MNSPPKVSCPYCPGLPRLYVQSRGLNVHISRVHRDVASQNRDALDSRTDTDARSVPIRNPDTASEAPRTCRSFVDLPSLKANVRVLRHIPKGARNLAAGKLCTIVEDCLRTNSAEDWFKLLSFSYFALKVPDVGGSKSLTSKVKSNIDGANAYFPELKVPSKPASLYRSIETKVHDGDLRGAVRLLLSDSSLAPMNDHTLRALKDKHPAPSRQVVFPPEPNITSPFLTVSPLDVSNAIASFYNGSAAGLDGLRPQHLRELISPSAGSNGCRLLGSIAKLCNFLLRGLLNVEVRPFLYGASLCALSKKDGGIRPIAIGCIFRRLVAKLCCQSAKERMSSYLQPKQLGFGTAKGCEAAIHSTRSFAFRNEASNFIILKIDIKNAFNSVERDTILNEVLEQTPSLYPFIYQCYASPSNLFFSDSILKSQVGAQQGDPLGPLLFCLAIQKIISNLKAPLNVWYLDDGILGGSPEVLFQDLDKLIPALKAIGLEVNPAKCEVFSCSGSVTNSLEMLESLLPGITQIDRSCLNLLGAPIFPEGVSSVLQLKRQALLAAQEHLAHLSGHVALTLLRNCFGMPRMVYVLRTSPTWLFEQDSISLDDTLKLTLKSVLNVELDEAQWCQAALPIRHGGLGIRRVRDIGLVAFLASAHGSADLVARILSLDGNNIRLPFVSEALEKWAILCPNDDRPDSLVVQRDWDDILCKLSYSRLLNDASGVSLARLKAVTKPESGAWLHALPSPQLGTLLDNDSLRIAVALRLGGKVCEAHRCICGVMVEENGHHGLSCQRCAGRFPRHHSINEIVRRAMVSVNVPCVLEPLGLCRTDGKRPDGLTLVPWRGGRCLLWDATCVSTFAASHMKQTVRSAGAAAENAAKLKHAKYSALESVYDFVPVAVETAGPWGDEARELFKELGRRLREKGNDPRSGSWLVQQVSIAIQRGNAAGVMGTFGSGGAQSEYLTC

SEQ ID NO: 901 - protein, 957 aa, Hyposmocoma kahamanoa
MSSPCKVRCPYCPGSPKLYVQSRGLSVHISRAHRDVAHRRVDDSSVPGTGSGARTVTPAPALSEVTQAAQSTFGLHNLPSLKKQIRVLRHIPKGARNLAAGRLCYLIDECLRSNGVDDWFNLLSFPFSALRVPGDEGRKSLTSKVKNNVLNEILNFPGTQSTHKPHSTYRTIEAKVYDGDLRGAVRLLLSDSSLAPANDNTLRALEDKHPSPSRPLNFPPEPSLTSPSLSVTPTDVAMALGSFYNGSAAGLDGLRPQHLKELTSPSAGDNGPRLLKLLSDLCNFLLRGMLNLEVAPYLYGASLCALSKKDDGIRPIAVGGMYRRLVAKLCCRSVRDIMSTHLQPRQVGFGTPLGCEAAIHATRSFAMGHEGTDTVVVKIDIRNAFNSVERDIILSEILENVPSLYPFVYQCYSVPSNLFYGENSILSQVGAQQGDPLGPLLFCLAIQKIISSLDSPLNVWYLDDGTIGGSPEVVLQDLKRLGVALKAVGLEINPNKCELFNCGFINADVLQNLMVLLPGIKQLDRSSVSLLGAPIFPEGVSSALQTKRLALLAAREHLSHLSAHVALVLLRNCLGMPRMTYILRTSPTWLFERDVALVDDVLRVTLEIVLNISLTLPQWCQAALPIRHGGLGVRRVQDLGFVAFLASSYGSADLVARILAQNGSGIRIPFQAEALTWWSSLCPSDEHPDNPSLQRNWDDVLCKRRYSSLLEGASGADVARLRAVAKSESGAWLHALPSPQLGTLLDNTSLRIAVALRLGSKVCEAHRCVCGAMVGEDGHHGLSCQRCAGRFPRHHAINDIVRRAMVSANVPCVLEPPGLSRIDGKRPDGLTLVPWRKGRCLLWDATCVSTFAASHIRQTSQMAGSAAESAAKLKHAKYSALEPVYDFVPVAVETAGPWGSEARDLFKELGRRLRDRGCDHRSGSWLVQQVSIAVQRGNAASIMGTFAPGTIQGGISF

SEQ ID NO: 902 - protein, 957 aa, Hyposmocoma kahamanoa
MSSPCKVRCPYCPGSPKLYVQSRGLSVHISRAHRDVAHRRVDDSSVPGTGSGARTVTPAPALSEVTQAAQSTFGLHNLPSLKKQIRVLRHIPKGARNLAAGRLCYLIDECLRSNGVDDWFNLLSFPFSALRVPGDEGRKSLTSKVKNNVLNEILNFPGTQSTHKPHSTYRTIEAKVYDGDLRGAVRLLLSDSSLAPANDNTLRALEDKHPSPSRPLNFPPEPSLTSPSLSVTPTDVAMALGSFYNGSAAGLDGLRPQHLKELTSPSAGDNGPRLLKLLSDLCNFLLRGMLNLEVAPYLYGASLCALSKKDDGIRPIAVGGMYRRLVAKLCCRSVRDIMSTHLQPRQVGFGTPLGCEAAIHATRSFAMGHEGTDTVVVKIDIRNAFNSVERDIILSEILENVPSLYPFVYQCYSVPSNLYYGENSILSQVGAQQGDPLGPLLFCLAIQKIISSLDSPLNVWYLDDGTIGGSPEVVLQDLKRLGVALKAVGLEINPNKCELFNCGFINADVLENLMVLLPGIKQLDKSPVSLLGAPIFPEGVSSALQTKRLALLAAREHLSHLSAHVALVLLRNCLGMPRMTYILRTSPTWLFERDVALVDDVLRVTLEIVLNISLTLPQWCQAALPIRHGGLGVRRVQDVGFVAFLASSYGSADLVARILAQNGSGIRIPFQAEALTWWSSLCPSDEHPDNPSLQRNWDDVLCKRRYSSLLEGASGADVARLRAVAKSESGAWLHALPSPQLGTLLDNTSLRIAVALRLGSKVCEPHRCVCGAMVREDGHHGLSCQRCAGRFPRHHAINDFVRRAMVSANVPCVLEPPGLSRINGKRPDGLTLVPWRKGRCLLWDATCVSTFAASHIRETSQMAGSAAESAAKLKHAKYSALEPVYDFVPVAVETAGPWGSEARDLFKELGRRLRDRGCHHRSGSWLVQQVSIAVQRGNAASIMGTFAPGTIQGGISF

SEQ ID NO: 903 - protein, 956 aa, Craniophora ligustri
MNSPPKVSCPYCPGLPRLYVQSRGLNVHISRVHRDVASQNRDALDSRTDTDARSVPIRNPDTASEAPRTCRSFVDLPSLKANVRVLRHIPKGARNLAAGKLCTIVEDCLRTNSAEDWFKLLSFSYFALKVPDMGGSKSLTSKVKSNIDGANAYFPELKVPSKPASLYRSIETKVHDGDLRGAVRLLLSDSSLAPMNDHTLRALKDKHPAPSRQVVFPPEPNITSPFLTVSPLDVSNAIASFYNGSAAGLDGLRPQHLRELISPSAGSNGCRLLGSIAKLCNFLLRGLLNVEVRPFLYGASLCALSKKDGGIRPIAIGCIFRRLVAKLCCQSAKERMSSYLQPKQLGFGTAKGCEAAIHSTRSFAFRNEASNFIILKIDIKNAFNSVERDTILNEVLEQTPSLYPFIYQCYASPSNLFFSDSILKSQVGAQQGDPLGPLLFCLAIQKIISNLKAPLNVWYLDDGILGGSPEVLFQDLDKLIPALKAIGLEVNPAKCEVFSCSGSVTNSLEMLESLLPGITQIDRSCLNLLGAPIFPEGVSSVLQLKRQALLAAQEHLAHLSGHVALTLLRNCFGMPRMVYVLRTSPTWLFEQDSISLDDTLKLTLKSVLNVELDEAQWCQAALPIRHGGLGIRRVRDIGLVAFLASAHGSADLVARILSLDGNNIRLPFVSEALEKWAILCPNDDRPDSLVVQRDWDDILCKLSYSRLLNDASGVSLARLKAVTKPESGAWLHALPSPQLGTLLDNDSLRIAVALRLGGKVCEAHRCICGVMVEENGHHGLSCQRCAGRFPRHHSINEIVRRAMVSVNVPCVLEPLGLCRTDGKRPDGLTLVPWRRGRCLLWDATCVSTFAASHMKQTVRSAGAAAENAAKLKHAKYSALESVYDFVPVAVETAGPWGDEARELFKELGRRLREKGNDPRSGSWLVQQVSIAIQRGNAAGVMGTFGSGGAQSEYLTC

SEQ ID NO: 904 - protein, 824 aa, Craniophora ligustri
MGGSKSLTSKVKSNIDGANAYFPELKVPSKPASLYRSIETKVHDGDLRGAVRLLLSDSSLAPMNDHTLRALKDKHPAPSRQVVFPPEPNITSPFLTVSPLDVSNAIASFYNGSAAGLDGLRPQHLRELISPSAGSNGCRLLGSIAKLCNFLLRGLLNVEVRPFLYGASLCALSKKDGGIRPIAIGCIFRRLVAKLCCQSAKERMSSYLQPKQLGFGTAKGCEAAIHSTRSFAFRNEASNFIILKIDIKNAFNSVERDTILNEVLEQTPSLYPFIYQCYASPSNLFFSDSILKSQVGAQQGDPLGPLLFCLAIQKIISNLKAPLNVWYLDDGILGGSPEVLFQDLDKLIPALKAIGLEVNPAKCEVFSCSGSVTNSLEMLESLLPGITQIDRSCLNLLGAPIFPEGVSSVLQLKRQALLAAQEHLAHLSGHVALTLLRNCFGMPRMVYVLRTSPTWLFEQDSISLDDTLKLTLKSVLNVELDEAQWCQAALPIRHGGLGIRRVRDIGLVAFLASAHGSADLVARILSLDGNNIRLPFVSEALEKWAILCPNDDRPDSLVVQRDWDDILCKLSYSRLLNDASGVSLARLKAVTKPESGAWLHALPSPQLGTLLDNDSLRIAVALRLGGKVCEAHRCICGVMVEENGHHGLSCQRCAGRFPRHHSINEIVRRAMVSVNVPCVLEPLGLCRTDGKRPDGLTLVPWRRGRCLLWDATCVSTFAASHMKQTVRSAGAAAENAAKLKHAKYSALESVYDFVPVAVETAGPWGDEARELFKELGRRLREKGNDPRSGSWLVQQVSIAIQRGNAAGVMGTFGSGGAQSEYLTC

SEQ ID NO: 905 - protein, 956 aa, Craniophora ligustri
MNSPPKVSCPYCPGLPRLYVQSRGLNVHISRVHRDVASQNRDALDSRTDTDARSVPIRNPDTASEAPRTCRSFVDLPSLKANVRVLRHIPKGARNLAAGKLCTIVEDCLRTNSAEDWFKLLSFSYFALKVPDVGGSKSLTSKVKSNIDGANAYFPELKVPSKPASLYRSIETKVHDGDLRGAVRLLLSDSSLAPMNDHTLRALKDKHPAPSRQVVFPPEPNITSPFLTVSPLDVSNAIASFYNGSAAGLDGLRPQHLRELISPSAGSNGCRLLGSIAKLCNFLLRGLLNVEVRPFLYGASLCALSKKDGGIRPIAIGCIFRRLVAKLCCQSAKERMSSYLQPKQLGFGTAKGCEAAIHSTRSFAFRNEASNFIILKIDIKNAFNSVERDTILNEVLEQTPSLYPFIYQCYASPSNLFFSESILKSQVGAQQGDPLGPLLFCLAIQKIISNLKAPLNVWYLDDGILGGSPEVLFQDLDKLIPALKAIGLEVNPAKCEVFSCSGSVTNSLEMLESLLPGITQIDRSCLNLLGAPIFPEGVSSVLQLKRQALLAAQEHLAHLSGHVALTLLRNCFGMPRMVYVLRTSPTWLFEQDSISLDDTLKLTLKSVLNVELDEAQWCQAALPIRHGGLGIRRVRDIGLVAFLASAHGSADLVARILSLDGNNIRLPFVSEALEKWAILCPNDDRPDSLVVQRDWDDILCKLSYSRLLNDASGVSLARLKAVTKPESGAWLHALPSPQLGTLLDNDSLRIAVALRLGGKVCEAHRCICGVMVEENGHHGLSCQRCAGRFPRHHSINEIVRRAMVSVNVPCVLEPLGLCRTDGKRPDGLTLVPWRGGRCLLWDATCVSTFAASHMKQTVRSAGAAAENAAKLKHAKYSALESVYDFVPVAVETAGPWGDEARELFKELGRRLREKGNDPRSGSWLVQQVSIAIQRGNAAGVMGTFGSGGAQSEYLTC

SEQ ID NO: 906 - protein, 956 aa, Craniophora ligustri
MNSPPKVSCPYCPGLPRLYVQSRGLNVHISRVHRDVASQNRDALDSRTDTDARSVPIRNPDTASEAPRTCRSFVDLPSLKANVRVLRHIPKGARNLAAGKLCTIVEDCLRTNSAEDWFKLLSFSYFALKVPDMGGSKSLTSKVKSNIDGANAYFPELKVPSKPASLYRSIETKVHDGDLRGAVRLLLSDSSLAPMNDHTLRALKDKHPAPSRQVVFPPEPNITSPFLTVSPLDVSNAIASFYNGSAAGLDGLRPQHLRELISPSAGSNGCRLLGSIAKLCNFLLRGLLNVEVRPFLYGASLCALSKKDGGIRPIAIGCIFRRLVAKLCCQSAKERMSSYLQPKQLGFGTAKGCEAAIHSTRSFAFRNEASNFIILKIDIKNAFNSVERDTILNEVLEQTPSLYPFIYQCYASPSNLFFSDSILKSQVGAQQGDPLGPLLFCLAIQKIISNLKAPLNVWYLDDGILGGSPEVLFQDLDKLIPALKAIGLEVNPAKCEVFSCSGSVTNSLEMLESLLPGITQIDRSCLNLLGAPIFPEGVSSVLQLKRQALLAAQEHLAHLSGHVALTLLRNCFGMPRMVYVLRTSPTWLFEQDSISLDDTLKLTLKSVLNVELDEAQWCQAALPIRHGGLGIRRVRDIGLVAFLASAHGSADLVARILSLDGNNIRLPFVSEALEKWAILCPNDDRPDSLVVQRDWDDILCKLSYSRLLNDASGVSLARLKAVTKPESGAWLHALPSPQLGTLLDNDSLRIAVALRLGGKVCEAHRCICGVMVEENGHHGLSCQRCAGRFPRHHSINEIVRRAMVSVNVPCVLEPLGLCRTDGKRPDGLTLVPWRRGRCLLWDATCVSTFAASHMKQTVRSAGAAAENAAKLKHAKYSALESVYDFVPVAVETAGPWGDEARDLFKELGRRLREKGNDPRSGSWLVQRVSIAIQRGNAAGVMGTFGSGGAQSEYLTC

SEQ ID NO: 907 - protein, 1066 aa, Cydia splendana
MLTRLRKKAATNARPSSLPSPGPASPKSLHGISSSGDEFASATDTDESCNEHDPPQPLRSPLGSPPPSLPQPSLPPSPPLLLPPVPPQSQPPSPPMSLPQPPPPPSLQRVLPPQPACHGPTGQLTPTTLDNSTRCPLCPQNRSFKGQRGLNIHLRRHHGTSGISGTNPTQTGILDVVPLSQHTRNRLDDLPILKSNVPVLRHIPKGARCLAADKLCPIIDNCLHTNSVDDWISLLSFSYSALRVPDATERRSLTSKVKNNINNIQIYFPSTATAKPASLYRTIETKVHDGDLRGAVRLLLSDSALAPSNKNTLLALKQKHPPPSRLVTLPPEPNIASPFLSVTPSDVTTAILSFYNGSASGLDGLRPQHLKELISPAAGNNGPRLLEALAKLCNFLLRGMLNMEVRPFLYGASLCALSKKDGGIRPIAVGSIFRRLTAKLCCRAVRETMSGYLQPRQLGFGTILGCEASIHATRHFATEHHTTNDIIIKIDIKNAFNSVERDVILNEVLDKIPRLYPFIYQCYASPSNLFYSGERIQSQVGAQQGDPLGPLLFCLAIHKMISAVKAPLNVWYLDDGVIGGSPDVVIENLKTLIPALKTIGLEINPSKCEFFTCGDITFETLTGLETVLPGMRQIVKSSFQLLGAPIFSEGVSSVLQSKRQALLGVREHLVNLSGHVSLILLRNCFALPRTVYTLRTSPTWLFEQDLQTLDDTLKLILETVLNVSLSVDQWRQASLPVRYGGLGIRRVQDIGLVAFLASIHGSADLVGRILAIESTNICIPFASDALAKWATLCPSNEHPDSPAVQRGWDDILCRLRHANLQAGASGTDLARLKAASKPESGAWLHALPSPQLGTLLDNDSLRIAVALRLGCKVCNPHRCICGVMVEENGHHGLSCQRCAGRFPRHHSLNEIVRRAMLSVGVPCLLEPPGLSRTDGKRPDGLTLVPWQRGRCLIWDATCVSTFAASHVGHTAKSAGSAAETAAKNKHQKYFALGANYDFVPVAVETAGPWGREARELFREIGKRLREKGNDPRSESWLVQQVSIAIQRGNAASVMGTFGPGMAQNGF

SEQ ID NO: 908 - protein, 1066 aa, Cydia splendana
MLTRLRKKAATNARPSSLPSPGPASPKSLHGISSSEDEFASATDTDESCNEHDPPQPLRSPLGSPPPSLPQPSLPPSPPLLLPPVPPQSQPPSPPMSLPQPPPPPSLQRVLPPQPACHGPTGQLTPTTLDNSTRCPLCPQNRSFKGQRGLNIHLRRHHGTSGISGTNPTQTGILDVVPLSQHTRNRLDDLPILKSNVPVLRHIPKGARCLAADKLCSIIDNCLHTNSVDDWISLLSFSYSALRVPDATERRSLTSKVKNNINNIQIYFPSTATAKPASLYRTIETKVHDGDLRGAVRLLLSDSALAPSNKNTLLALKQKHPPPSRLVTLPPEPNIASPFLSVTPSDVTTAILSFYNGSASGLDGLRPQHLKELISPAAGNNGPRLLEALAKLCTFLLRGMLNMEVRPFLYGASLCALSKKDGGIRPIAVGSIFRRLTAKLCCRAVRETMSGYLQPRQLGFGTILGCEAAIHATRHFATEHHTTNDIIIKIDIKNAFNSVERDVILNEVLDKIPRLYPFIYQCYASPSNLFYSGERIQSQVGAQQGDPLGPLLFCLAIHKMISAVKAPLNVWYLDDGVIGGSPDVVIENLKTLIPALKTIGLEINPSKCEFFTCGDITFETLTDLETVLPGMRQIVKSSFQLLGAPIFSEGVSSVLQSKRQALSGVREHLVNLSGHVSLILLRNCFALPRTVYTLRTSPTWLFEQDLQTLDDTLKLILETVLNVSLSVDQWRQASLPVRYGGLGIRRVQDIGLVAFLASIHGSADLVGRILAIESTNICIPFASDALAKWATLCPSNEHPDSPAVQRGWDDILCRLRHANLQAGASGTDLARLKAASKPESGAWLHALPSPQLGTLLDNDSLRIAVALRLGCKVCNPHRCICGVMVEENGHHGLSCQRCAGRFPRHHSLNEIVRRAMLSVGVPCLLEPPGLSRTDGKRPDGLTLVPWQRGRCLIWDATCVSTFAASHVGHTAKSAGSAAETAAKNKHQKYFALGANYDFVPVAVETAGPWGREARELFREIGKRLREKGNDPRSESWLVQQVSIAIQRGNAASVMGTFGPGMAQNGF

SEQ ID NO: 909 - protein, 1066 aa, Cydia splendana
MLTRLRKKAATNARPSSLPSPGPASPKSLHGISSSGDEFASATDTDESCNEHDPPQPLRSPLGSPPPSLPQPSLPPSPPLLLPPVPPQSQPPSPPMSLPQPPPPPSLQRVLPPQPACHGPTGQLTPTTLDNSTRCPLCPQNRSFKGQRGLNIHLRRHHGTSGISGTNPTQTGILDVVPLSQHTRNRLDDLPILKSNVPVLRHIPKGARCLAAYKLCSIIDNCLHTNSVDDWISLLSFSYSALRVPDATERRSLTSKVKNNINNIQIYFPSTATAKPASLYRTIETKVHDGDLRGAVRLLLSDSALAPSNKNTLLALKQKHPPPSRLVTLPPEPNIASPFLSVTPSDVTTAILSFYNGSASGLDGLRPQHLKELISPAAGNNGPRLLEALAKLCNFLLRGMLNMEVRPFLYGASLCALSKKDGGIRPIAVGSIFRRLTAKLCCRAVRETMSGYLQPRQLGFGTILGCEAAIHATRHFATDHHTTNDIIIKIDIKNAFNSVERDVILNEVLDKIPRLYPFIYQCYASPSNLFYSGERIQSQVGAQQGDPLGPLLFCLAIHKMISAVKAPLNVWYLDDGVIGGSPDVVIENLKTLIPALKTIGLEINPSKCEFFTCGDITFETLTDLETVLPGMRQIVKSSFQLLGAPIFSEGVSSVLQSKRQALSGVREHLVNLSGHVSLILLRNCFALPRTVYTLRTSPTWLFEQDLQTLDDTLKLILETVLNVSLSVDQGRQASLPVRYGGLGIRRVQDIGLVAFLASIHGSADLVGRILAIESTNICIPFASDALAKWATLCPSNEHPDSPAVQRGWDDILCRLRHANLQAGASGTDLARLKAASKPESGAWLHALPSPQLGTLLDNDSLRIAVALRLGCKVCNPHRCICGVMVEENGHHGLSCQRCAGRFPRHHSLNEIVRRAMLSVGVPCLLEPPGLSRTDGKRPDGLTLVPWRRGRCLIWDATCVSTFAASHVGHTAKSAGSAAETAAKNKHQKYFALGANYDFVPVAVETAGPWGREARELFREIGKRLREKGNDPRSESWLVQQVSIAIQRGNAASVMGTFGPGMAQNGF

SEQ ID NO: 910 - protein, 1041 aa, Pammene fasciana
MLTRFRGKAAPNARPPPRAASPKSPKGISSSGDEFASATDTDESYNENDPRQPPPSPLASPLLLPSPQPQPPSSPTPLPQPSRPPSLQTLLPPQPTGQSTPTTLDNPTRCPLCPQNRSFKGQKGLNIHLRRIHGTSSTPVTIPTQTGILDEAPQTPHTGNRLDDLPILKAKVPVLRHIPKGARCLAADKLRSIIDNCLHTNSVDDWISLLSFSYSALRVPDATDRHSLTFKVKNNINNTHIYFPSTATAKPASIYRTIETKVHDGDLRGAVRLLLSDSAIAPSNENTLLALKQKHPPPSRLVTLPPEPSIASPSLSVTPSDVATAISSFYNGSASGLDGLRPQHLKELISPAAGNNGPRLLEALAKLCNFLLRGMLNLEVKPFLYGASLCALSKKDGGIRPIAVGSIFRRLTAKLCCRAVRETMSGYLQPRQLGFGTVLGCEAAIHATRHFATEHHTTNDIIIKIDIKNAFNSVERDTILNEVLDKIPRLYPFIYQCYASSSNLFYTGELIQSQVGAQQGDPLGPLLFCLAIHKMISAVKAPLNVWYLDDGVIGGSPDVVMENLKTLIPALKTIGLEINPSKCELFTCGDITLETLTDLETVLPGMRQIAKPSFQLLGAPIFSEGVSSVLQSKRQALSGVREHLVHLSGHVSLILLRNCFALPRTVYTLRTSPTWLFEQDLQNLDDTLKLILETVLNVSLNGDQWRQASLPVRYGGLGVRRFQDIGLVAFLASIHGSADLVGRILATDSTNIRIPFASTALAKWATLCPSNEHPESPTVQRSWDDILCRLRHANLQAGASGTDLARLKAASKPESGAWLHALPSPQLGTLLDNDSLRIAVALRLGCKVCNAHRCICGAMVEENGHHGLSCQRCAGRFPRHHSLNDIIRRAMLSVGVPCLLEPPGLSRTDGKRPDGLTLVPWQRGRCLIWDATCVSTFAASHIRHTTKLAGSAAETAAKNKRLKYSALETAYDFVPVAVETAGPWGREARELFRELGKRLREKGNDPRSESWLVQQVSIAIQRGNATSVMGTFGPGMAQNGF

SEQ ID NO: 911 - protein, 667 aa, Cydia splendana
MLNMEVRPFLYGASLCALSKKDGGIRPIAVGSIFRRLTAKLCCRAVRETMSGYLQSRQLGFGTILGCEAAIHATRHFATEHHTTNDIIIKIDIKNAFNSVERDIILNEVLDKIPRLYPFIYQCYASPSNLFYSGEPIQSQVGAQQGDPLGPLLFCLAIHKMISAVKAPLNVWYLDDGVIGGSPDVVIENLKTLIPALKTIGLEINPSKCEFFTCGDITFETLTDLETVLPGMRQIDKSSFQLLGAPIFSEGVSSVLQSKRQALSGVREHLVHLSGHVSLILLRNCFALPRTVYTLRISPTWLFEQDLQTLDDTLKLILESVLNVSLNGDQWRQASLPVRYGGIGIRRVQDIGLVAFLASVHGSADLVGRILTIENTNICLPFATDALSKWATLCPSNEHPENPAVQRGWDGILCRLRHANLQAGASITDLARLKAASKPESGAWLHALPSPQLGTLLDNDSLRIAVALRLGCKVCNAHRCICGVMVEENGHHGLSCQRCAGRFPRHHSLNEIVRRAMLSVGVPCLLEPPGLSRTDGKRPDGLTLVPWQRGRCLIWDATCVSTFAASHVGHTAKSAGSAAETAAKNKRQKYSALGATYDFVPVAVETAGPWGREARELFRELGKRLREKGNDPRSESWLVQQVSIAIQRGNAASVMGTFGPGMAQNGF

SEQ ID NO: 912 - protein, 955 aa, Apotomis turbidana
MNSPPKVSCPYCPGLPKLYVQSRGLNVHISRVHRDLVSQNRETPDLPNRADTRSTPVTDSNNASTPQGSRNFNDLPSLKANIRVLRHIPKGARSLAAGKLCAVIEDCLHTNSVDDWFKLLSFSFSSLRVPEVGGCKSLTSKVKSNLEDASLYFPEERSSSKRPSVYRNIEAKVHDGDLRGAVRLLMSDSSLAPANADTIRALKEKHPAPSAVQVLPQEPNITSPYLTVSPLDVAEAISSFYNGSAAGPDGLRPQHLKELISASAGCNGPRLLESITRLCNFLLRGMLNMEVRPFLYGASLCALSKKDGGIRPIAVGSVFRRLVAKLCCRSVREAMSCYLQPNQVGFGTALGCEAAIHSTRLFAKEHMGSNKILVKIDIKNAFNSIDRGTLLNEVLEQTPSLYPFIYQCYASPSNLFYSENLIQSQVGAQQGDPLGPLLFCLGIQKVISGLKAPLNIWYLDDGILGGSQEVVLQDLKALIPALKAMGLEINPAKCELYSCSDLVTNYLGDLQTLLPGITQTDKSSFNLLGAPIFLEGVRSTLELKRQALSSVQEHLEHLSGHVSLTLLRNCFALPRMVYVLRTSPTWMFVSELEAIDATLKLILESVLNVSLDEAQWRQAVLPIRFGGLGVRRVQDIGLVAFLASVHGSADLVARILSLDGSNIRLPFVSEAFEKWGMFCPTDDRPDNLVAQRGWDDILCKLSYSRLLDDASGADLARLNAVAKPESGAWLHALPSPQLGTLLDNDSLRIAVALRLGTKVCEPHRCICGVMVEENGHHGLSCQRCAGRFSRHHSINEIVRRAMVSVNIPCVLEPPGLSRTDGKRPDGLTLVPWQRGRCLLWDATCVSTFAPSHLRQTARLAGSAAETAAKMKHAKYAALESMYDFVPVAVETAGPWGSEARELFRDLGRRLRERGNDPRSGSWLVQQVSIAIQRGNAASIMGTFGPNMALRGDLRD

SEQ ID NO: 913 - protein, 987 aa, Pammene fasciana
MRYRENTINTGLNFRSYYKSIRFNQKPSVELLECPFCLDNKLYKGQKGLAIHTARRHATRITAPLSTASQPMPSTANAITPNSSTVLAERLSYLKKHVPVVKRIPRGARRAVADSLSNCVAKVVSENSTTAWERLLTFSYSVLHADKSSKSSLTSQIKSNSNKLPPVSQPNQRIFSNVSHPYSKIKAIENKISEGDVSGAARLLFSSDDLATQSPETFAALRDKHPVPSSPFQLPDPPTPDDTRIAMSEDAVQQAILSFPNGSAGGLDGLSPQHMKDLITTPSGDASSALLKELTALINLMLAGRVNNEIIPVLYGANLVALAKKDGGVRPIAIGCTFRRLASKLCCRRFNKPRQLGFGVKGGCEAAVHAARSFLNRSDYEVFIKIDVKNAFNSVDRGALMKEIKREFPEIYPYLWQCYGAPTKLRFGDETILSSTGCQQGDPLGPAIFSLTIQPIISKLLSKFNLWYLDDGSLGGDAATVSQDLHVIITKFSEIGLSLNFAKCEMFMPDHLPSDRKSDILTDFNAILPNISVQYKSSLTLLGSPIFDEAINPVINSKLNQFNCSSSLLFEINPHMALFIIRFCLFTPKFTYLLRCSPIWKYPAILSSIDSVVQTTLSKILNITFDTRSWSQAVLPVRFGGLGVRSSTSVALPAFLSSAFGSFSLVGIILNLPQISVAEITSLAEAEKSWCDSCPGAAAPATKHIQRAWDTPRLKVTHASLLENSPGDSESARLLAVSTTESGHWLNALPSRNIGTVLDPSTLRIAVCLRIGARICVPHTCACGKEVDWLGRHGLSCVRSAGRMYRHGTINDLVRRALATASVPSSLEPTGMARDDGKRPDGVTMVPWKLGRALVWDATCVDTFAASHIQATRSKAGAAADQAQVLKRRKYSALLKDYEFAALAVETLGPWSADMKTFMKSLSSRLIHASGDPRAGSYLSQRLSLAIQRGNAASVMGTMPQSELLDGVTGRLPYPFNIGDYNCKIII

SEQ ID NO: 914 - protein, 907 aa, Pammene fasciana
MPSTANAITPNSSTVLAERLSYLKKHVPVVKRIPRGARRAVADSLSNCVAKVVSENSTTAWERLLTFSYSVLHADKSSKSSLTSQIKSNSNKLPPVSQPDQRIFSNVSHPYSKIKAIENKISEGDVSGAARLLFSSDDLATQSPETFAALRDKHPVPSSPSQLPDPPTPDDTRIAMSEDAVQQAILSFPNGSAGRLDGLSPQHMKDLITTPSGDASSALLKELTALINLMLAGRVNNEIIPVLYGANLVALAKKDGGVRPIAIGCTFRRLASKLCCRRFNKKFTNIFKPRQLGFGVKGGCEAAVHAARSFLNRSDYEVFIKIDVKNAFNSVDRGALMKEMKREFPEIYPYLWQCYGAPTKLRFGDETILSSTGCQQGDPLGPAIFSLTIQPIISKLLSKFNLWYLDDGSLSGDAATVSQDLHVIITKFSEIGLSLNFAKCEMFMPDHLPSDRKSDILTDFNAILPNISVQYKSSLTLLGSPIFDEAINPVINSKLNQFNCSSSLLFEINPHMALFIIRFCLFTPKFTYLLRCSPIWKYPAILSSIDSVVQTTLSKILNITFDTRSWSQAVLPVRFGGLGVRSSTSVALPAFLSSAFGSFSLVGIILNLPQISVAEITSLAEAEKSWCDSCPGAAAPATKHIQRAWDTPRLKVTHASLFENSPGDSESARLLAVSTTESGHWLNALPSRNIGTVLDPSTLRIAVCLRIGARICVPHTCACGKEVDWLGRHGLSCVRSAGRMYRHGTINDLVRRALATASVPSSLEPTGMARDDGKRPDGVTMVPWKLGRALVWDATCVDTFAASHIQATRSKAGAAADQAQVLKRRKYSALLKDYEFAALAVETLGPWSADMKTFMKSLSSRLIHASGDPRAGSYLSQRLSLAIQRGNAASVMGTMPQSELLDGVFFL

SEQ ID NO: 915 - protein, 962 aa, Pammene fasciana
MSTQPTSTITASVELLECPFCLDNKLYKGQKGLAIHTARRHATRITAPLSTASQPMPSTANAITPNSSTVLAERLSYLKKHVPVVKRIPRGARRAVADSLSNCVAKVVSENSTTAWERLLTFSYSVLHADKSSKSSLTSQIKSNSNKLPPVSQPNQRIFSNVSHPYSKIKAIENKISEGDVSGAARLLFSSDDLATQSPETFAALRDKHPVPSSPSQLPDPPTPDDTRIAMSEDAVQQAILSFPNGSAGGLDGLSPQHMKDLITTPSGDASSALLKELTALINLMLAGRVNNEIIPVLYGANLVALAKKDGGVRPIAIGCTFRRLASKLCCRRFNKKFTNIFKPRQLGFGVKGGCEAAVHAARSFLNRSDYEVFIKIDVKNAFNSVDRGALMKEIKREFPEIYPYLWQCYGAPTKLRFGDETILSSTGCQQGDPLGPAIFSLTIQPIISKLLSKFNLWYLDDGSLGGDAATVSQDLHVIITKFSEIGLSLNFAKCEMFMPDHLPSDRKSDILTDFNAILPNISVQYKSSLTLLGSPIFDEAINPVINSKLNQFNCSSSLLFEINPHMALFIIRFCLFTPKFTYLLRCSPIWKYPAILSSIDSVVQTTLSKILNITFDTRSWSQAVLPVRFGGLGVRSSTSVALPAFLSSAFGSFSLVGIILNLPQISVAEITSLAEAEKSWCDSCPGAAAPATKHIQRAWDTPRLKVTHASLLENSPGDSESARLLAVSTTESGHWLNALPSRNIGTVLDPSTLRIAVCLRIGARICVPHTCACGKEVDWLGRHGLSCVRSAGRMYRHGTINDLVRRALATASVPSSLEPTGMARDDGKRPDGVTMVPWKLGRALVWDATCVDTFAASHIQATRSKAGAAADQAQVLKRRKYSALLKDYEFAALAVETLGPWSADMKTFMKSLSSRLIHASGDPRAGSYLSQRLSLAIQRGNAASVMGTMPQSELLDGVFFL

SEQ ID NO: 916 - protein, 965 aa, Pammene fasciana
MSTQPTSTITASVELLECPFCLDNKLYKGQKGLAIHSIHTARRHATRITAPLSTASQPMPSTANAITPNSSTVLAERLSYLKKHVPVVKRIPRGARRAVADSLSNCVAKVVSENSTTAWERLLTFSYSVLHADKSCKSSLTSQIKSNSNKLPPVSQPNQRIFSNVSHPYSKIKAIENKISEGDVSGAARLLFSSDDLATQSPETFAALRDKHPVPSSPSQLPDPPTPDDTRIAMSEDAVQQAILSFPNGSAGGLDGLSPQHMKDLITTPSGDASSALLKELTALINLMLAGRVNNEIIPVLYGANLVALAKKDGGVRPIAIGCTFRRLASKLCCRRFNKKFTNIFKPRQLGFGVKGGCEAAVHAARSFLNRSDYEVFIKIDVKNAFNSVDRGALMKEIKREFPEMYPYLWQCYGAPTKLRFGDETILSSTGCQQGDPLGPAIFSLTIQPIISKLLSKFNLWYLDDGSLGGDAATVSQDLRVIITKFSEIGLSLNFAKCEMFMPDHLPSDRKSDILTDFNAIFPNISVQYKSSLTLLGSPIFDEAINPVINSKLNQFNCSSSLLFEINPHMALFIIRFCLFTPKFTYLLRCSPIWKYPAILSSIDSVVQTTLSKILNITFDTRSWSQAVLPVRFGGLGVRSSTSVALPAFLSSAFGSFSLVGIILNLPQISVAEITSLAEAEKSWCDSCPGAAAPATKHIQRAWDTPRLKVTHASLLENSPGDSESARLLAVSTTESGHWLNALPSRNIGTVLDPSTLRIAVCLRIGARICVPHTCACGKEVDWLGRHGLSCVRSAGRMYRHGTINDLVRRALATASVPSSLEPTGMARDDGKRPDGVTMVPWKLGRALVWDATCVDTFAASHIQATRSKAGAAADQAQVLKRRKYSALLKDYEFAALAVETLGPWSADMKTFMKSLSSRLIHASGDPRAGSYLSQRLSLAIQRGNAASVMGTMPQSELLDGVFFL

SEQ ID NO: 917 - protein, 962 aa, Pammene fasciana
MSTQPTSTITASVELLECPFCLDNKLYKGQKGLAIHTARRHATRITAPLSTASQPMPSTANAITPNSSTVLAERLSYLKKHVPVVKRIPRGARRAVADSLSNCVAKVVSENSTTAWERLLTFSYSVLHADKSCKSSLTSQIKSNSNKLPPVSQPNQRIFSNVSHPYSKIKAIENKISEGDVSGAARLLFSSDDLATQSPETFAALRDKHPVPSSPSQLPDPPTPDDTRIAMSEDAVQQAILSFPNGSAGGLDGLSPQHMKDLITTPSGDASSALLKELTALINLMLAGRVNNEIIPVLYGANLVALAKKDGGVRPIAIGCTFRRLASKLCCRRFNKKFTNIFKPRQLGFGVKGGCEAAVHAARSFLNRSDYEVFIKIDVKNAFNSVDRGALMKEIKREFPEMYPYLWQCYGAPTKLRFGDETILSSTGCQQGDPLGPAIFSLTIQPIISKLLSKFNLWYLDDGSLGGDAATVSQDLRVIITKFSEIGLSFNFAKCEMFMPDHLPSDRKSDILTDFNAIFPNISVQYKSSLTLLGSPIFDEAINPVINSKLNQFNCSSSLLFEINPHMALFIIRFCLFTPKFTYLLRCSPIWKYPAILSSIDSVVQTTLSKILNITFDTRSWSQAVLPVRFGGLGVRSSTSVALPAFLSSAFGSFSLVGIILNLPQISVAEITSLAEAEKSWCDSCPGAAAPATKHIQRAWDTPRLKVTHASLLENSPGDSESARLLAVSTTESGHWLNALPSRNIGTVLDPSTLRIAVCLRIGARICVPHTCACGKEVDWLGRHGLSCVRSAGRMYRHGTINDLVRRALATASVPSSLEPTGMARDDGKRPDGVTMVPWKLGRALVWDATCVDTFAASHIQATRSKAGAAADQAQVLKRRKYSALLKDYEFAALAVETLGPWSADMKTFMKSLSSRLIHASGDPRAGSYLSQRLSLAIQRGNAASVMGTMPQSELLDGVFFL

SEQ ID NO: 918 - protein, 898 aa, Notocelia uddmanniana
MAIDPPLPSAVPVVRRIPRGARISVASCLADCIGKVVAENSSKAWERLLTFPYTVLHAEKSNKASLTSQIKINTASLSDLPSVPLNCFSSRSNKPPNTVNSKIRAIENKLSEGNVSGAARLLFSRDDLAVHSAETYAALREKHPVPSASSLLPDPPPADNPTVTVSEDAVQLAISLFPNGSAGGLDSLSPQHLKDLTTLSLGDTRTSLLKQLTALINLMLSGQVNAEIAPVLYGANLIALAKKDGGIRPIAVGFTYRRLASKLCCRNFSERLTKVFKPRQLGFGIKGGCEAAVHAARTFLNRPGYEVFVKIDVKNAFNSVDRGALLAEAKKVLPELYNYLWQCYGAPSKLIYHDKTISSCVGCQQGDPLGPAIFSLVIHPIISSLKSKFNLWYLDDGSLGGEASVVLHDLQTIIDKFSKIGLNLNFTKCEIFIPDHLPLDNKIDIVTNFNAVLPNISVLSNSSLTLLGSPIFEESINPVINCKLNLFKNTSDLLFHINPHMALFILRFCLFTPKFMYLLRSCPIWKFPTILSSIDSSLQATLSKILNINFDSSTRPWTQAVLPIRLGGLGVRASASVALPAFLSSAYGSLSLVGIILNLPQIIDDEVASLKDARDAWCDSCPGTDIPAARHFQRAWDYPRLKKVQASLIEGSPDDFERARLLAVSSPESGHWLHALPSRQIGTVLDPGTLRIACSLRLGARICISHTCVCGKSVDESGRHGLSCIKSAGRLYRHGTINDLVRRSLATVSVPAILEPTGLARDDGKRPDGATLVPWRLGRALVWDATCVDTFAQSHIQVTRSKAGAAADQAQVLKRRKYSSLIKDYEFAALAVETLGPWSTDMKSFMKAMGRRLVDASGDHRAGAYLSQRISLAIQRGNAASVMGSVPQTDLLDGVFFL

SEQ ID NO: 919 - protein, 971 aa, Notocelia uddmanniana
MPSLPILNPAELLYCPTCGDNKQYKGQRGLAIHTARCHGTRMAIDPPLPSATQAIPSASTQNCTVTPPAQTTLAERLGLLKANVPVVRRIPRGARISVASCLADCIGKVVAENSSKAWERLLTFPYTVLHAEKSNKASLTSQIKINTASLSDLPSVPLNCFSSRSNKPPNTVNSKIRAIENKLSEGNVSGAARLLFSRDDLAVHSAETYAALREKHPVPSASSLLPDPPPADNPTVTVSEDAVQLAISLFPNGSAGGLDSLSPQHLKDLTTLSLGDTRTSLLKQLTALINLMLSGQVNAEIAPVLYGANLIALAKKDGGIRPIAVGFTYRRLASKLCCRNFSERLTKVFKPRQLGFGIKGGCEAAVHAARTFLNRPGYEVFVKIDVKNAFNSVDRGALLAEAKKVLPELYNYLWQCYGAPSKLIYHDKTISSCVGCQQGDPLGPAIFSLVIHPIISSLKSKFNLWYLDDGSLGGEASVVLHDLQTIIDKFSKIGLNLNFTKCEIFIPDHLPLDNKIDIVTNFNAVLPNISVLSNSSLTLLGSPIFEESINPVINCKLNLFKNTSDLLFHINPHMALFILRFCLFTPKFMYLLRSCPIWKFPTILSSIDSSLQATLSKILNINFDSSTRPWTQAVLPIRLGGLGVRASASVALPAFLSSAYGSLSLVGIILNLPQIIDDEVASLKEARDAWCDSCPGTDIPAARHFQRAWDYPRLKKVQASLIEGSPDDFERARLLAVSSPESGHWLHALPSRQIGTVLDPGTLRIACSLRLGARICISHTCVCGKSVDESGRHGLSCIKSAGRLYRHGTINDLVRRSLATVSVPAILEPTGLARDDGKRPDGATLVPWRLGRALVWDATCVDTFAQSHIQVTRSKAGAAADQAQVLKRRKYSSLIKDYEFAALAVETLGPWSTDMKSFMKAMGRRLVDASGDHRAGAYLSQRISLAIQRGNAASVMGSVPQTDLLDGVFFL

SEQ ID NO: 920 - protein, 716 aa, Notocelia uddmanniana
MLTGRVNAEIIPHLYGANLVALAKRDGGIRPIAVGCTFRRLTSKLCCRKFNHKLTKIFKPRQLGFGIKGGCEAAVHAARTFLSRPDYEVFVKVDAKNAFNSVDRGALLAEVKKELPEIYGYLWQCYGAPSKLLFGVKIILSSTGCQQGDPLGPAIFSLAIHPLITALNSKFNLWYLDDGSLGGDAETVLQDLQLIIAKFANIGLSLKFTKCEIFLPDHLPSDRKIEILTNFNAILPNISVHSTSSLTLLGSPIFDEAISPVVNCKLNQFNCTSNLLHEINPHMALFIIRFCLFTPKFMYLLRCCPIWKFPSILSSIDNTLQTTLSKILNVCFDSTSWSKAVLPVRFGGLGVRSSCSVALPAFLSSAYSSLSLVGIILNNPQILDVEMASLVEARRAWCDSCPGANIPDMRHIQRVWDTPRLKAIHASLIDNSPDDSERARLLAVSAPESGHWLNALPSRNIGTVLDPGTLRIAISLRLGSKICIPHTCVCGKGVDQLGRHGLSCNRSAGRMYRHGTINDLVRRALATASIASSLEPAGMTRDDGKRPDGVTLVPWKLGRALVWDATCVDTFALSHIQVTRSQAGAAADQAQILKRRKYSSLVQSYEFAALAVETMGPWSADMKSFMKALSSRLVHASGDPKAGAYLSQRIALAVQRGNAASVLGVHAAGRTFGWSFLFVICFFFFFFYLSSIVVVMALSVFILFLYMLIVDIYVSL

SEQ ID NO: 921 - protein, 712 aa, Cydia splendana
MDGLSPQHLKDLTAMTLGDARSALLREITTLINLMLSGSVNTDIVPLLYGANLVALAKKDGGTRPIAVGCTLRRLASKLCCRQFNQRLTRIFKPRQLGFGVKGGCEAAVHAARTFLNRPDYEVFVKIDVKNAFNSVDRGALLAEVKKELPELYKYLWQCYGAPSKLLFGNDIILSSMGCQQGDPLGPAIFSLVIHPIISSLNSKFNLWYLDDGSLGGDALTVLQDLQSIIDKFSKIGLTLNFTKCEIYIPDHVPLNTKIDILTNFNAVLPNISVHSKTSLTLLGSPIFDESIAPVINCKLNLFNNTSDLLFKINPHMALFIIRFCLFTPKFMYLLRSCPIWKFPSILSSIDSSLQATLSKTLNIHLDTCSWTQAVLPIRLGGLGVRTTASSALPAFLASVYGSLSLVGIILNQSTIPDDEIANLKEAREAWCESCPCADIPVARHCQRDWDSPRLKLAHAALIEQSPDDSERARILAVSVPESGHWLKALPSRQVGTVLDPSSLRIAICLRLGSRICVPHTCICGKDVDQLGRHGLSCSRSAGRIFRHSTINDLVRRALATVSVPAVLEPVGMARDDGKRPDGATLVPWKLGRALVWDATCVDTFAQSHIQGTRIRAGAAADQAQVLKRRKYSTLINDYEFAALAVETLGPWSADMKIFIGALSARLVDTTGDPRAGAYLSQRISLAIQRGNAASVMGSMPQSDLLDGVFFL

SEQ ID NO: 922 - protein, 973 aa, Cydia splendana
MSSQPCINRWDLLYCPICDDNKQYKGPRGLAIHTSRRHGTRMVVDTPLPSASQPAPSNFARGPTATTVSSSPTDATSLAKKLGLLKTNNPVIKRIPRGARITVARSLTECVAKVVVENSFQAWERLLTFPYKVLHVDRSNKSSLTSQIKSNTFSISDSPIISQGRDINTRTPVSSLAFKVRSIENKLSEGDVGGAARLLFSCDDLATHSPETYAALREKHPVPAATSSLLDPPATDDPTIIVSEDAVQSAIWSFPNGSAGGMDGLSPQHLKDLINTPLGDTSSALVKEITGLINLMLAGLVHTEIAPLLYGANLVALAKKDGGIRPIAVGCTYRRLASKLCCKKFNDKLTHLFKPKQLGFGVKGGCEAAVHAARTFLSGPDFEIFVKIDVKNAFNSIDRGALLAAVKKELPDLYKYIWQCYGAPSKLLFGDNIISSSMGCQQGDPLGPAIFSLVIHPIISGLKSKFNIWYLDDGSLGGDAATVLDDLICIEEKFSEIGLSLNYTKCEIFFPEHLPSDIKNDYLTNFNEVLPNISVQSKSSLTLLGSPIFGEAIAPVINCKLNLFNSTSELLFKINPHIALFIIRFCLFTPKFMYLLRSCPIWKFPSILSSIDTSLQATLSKILNIQFDTRSWTQAVLPIRFGGLGVRTSASSALPAFLSSVYGSLSLIGVILNLPQILDDEVASLREAREAWCQSCPSADIPDARHIQRAWDSPRLEAVHATLIDNSPDDFDHARILAVSAPESGHWLQTLPSKAIGTVLDPSSLRIAIGLRLGSRICVSHTCACGKSVDQLGRHGLSCAKSAGRMYRHGTINDLVRRALATVSVPAVLEPVGMARDDGKRPDGATLVPWKLGRALVWDATCVDTLAQSHIGATRIQAGAAADQAQILKRRKYSTLVNDYEFAALAVETLGPWSSDMKAFMKALSARLVESTGDRRAGAYLSQRIALAVQRGNAASVMGSMPQAELLDGAFLL

SEQ ID NO: 923 - protein, 962 aa, Pammene fasciana
MSTQPLIAVSVELLECPLCLDKKLYKGQKGLAIHTARRHATRIAVDARPPYASQPTPSTANENFISNSSTILAERLGFLKKHIPVVKRIPRGARRAVANSLSECVTRVISENSPTAWERLLTFSYSVLHADKSSKTSLTSQIKFNSNNLTSASQPNVIKHSNPQPYSKIKAIENKMSEGDVSGAARLLFSNDDLATHTPETFAALRDKHPVPTTPTQPSDPATPDVTCLTASEDAVQQTILSFHNGSAGGLDGITPQHLKDLIMTPAGDAGLALLKKLTDLLNLMLAGGVNAEITPILYGANLIALAKKDGGIRPIAVGSTFRRLASKLCCRKFNKKLTNIFKPRQLGFGVKSGCEAAVHAARSYLSRPDYEVFLKIDVKNAFNSVNRSALLTEIKKELPESYAYLSQCYGAPTKLLFGDKTILSCTGCQQGDPLGPAIFSLAIQPIISKLNSKFNLWYLDDGSLGGDAATVLQDLQFVIDKFSDIDLSLNFTKCEIFIANHLPADRKTEILTNFNAILPNISVLSNSSLTLLGSPIFDEAINPVINCKLDLFNRTSSLLYEINPHMALFIIRFCLFTPKFTYLLRCCPVWKFPVILSSIDSVLQTTISKVLNIIFEPRSWSQAVLPVRFGGLGVRSSSGVALPAFLSSAYCSLSLVGKILNLSQISGAEIVSLAEAESAWCAACPGVDVPATKHVQRAWDTHILKATHASLINNSPDDSERARLLAVSASESGHWLNALPSQNIGTVLDAKALRIAVCLRTGAQICLPHTCACGKSVDQLGRHGLSCKRSAGRLYRHGTINDLVRRSLATVSVPASLEPAGMVRSDGKRPDGATLVPWKLGRPLVWDATCVDTFAQSHIQGTRSQAGAAADQAQLLKRRKYSSLLKDYEFAALAVETMGPWSADMKSFMGALSKRLVDASGDPRAGTYLCQRISLAIQRGNSASVMGSLPQGDLLEGVFFL

SEQ ID NO: 924 - protein, 972 aa, Bembecia ichneumoniformis
MPSQPCLNPPELLYCPTCGDSKQYKGRRGLAIHTSYRHGTRVAIDPPIPRTSQPAPSSSAGGSTPPPPPPPQAELSLADRLGLLKINIPIVKRIPRGARFTVARCLTECIAKVVAENSFKAWERLLTFSFTVLHAEKSIKASLTSQIKSNTFSISDLPVIPQNSDKNTHLPHNSLHMKIKSIENKLSDGNVSGAARLLFSRDGLAAHSDETYAALKEKHPVPPASSKLPDPPAPNDPFLTASEDAVIQAIASFPNGSAGGIDGLSPQHLKDLTMMSLGETRTALVKELTALINLMLSGCVHNDIVPLLYGANLVALAKKDGGIRPIAVGCTLRRLASKLSCRTFKERLTDIFKPRQLGFGIKGGCEAAVHAARTFLKLPDYQVFLKIDVQNAFNSVDRGALLAEVKKELPELFNYLWQCYGTPSKLFFGNKSILSSMGCQQGDPLGPAIFGLVIHPIISSLNSKFNVWYLDDGSLGGDAITVLQDVQSIIDKFSKIGLSLNFSKCEIFIPDHVPSNSKIDILTNFNALLPNISFLSKSSLTLLGSPIFDESVTPVINQKLNLFNDTSDLLFKINPHMALFIIRFCLFTPKFIYLLRSCPIWKFPSVLSSIDSSLQVTLSKILNINFEIRQWTQTVLPIRLGGLGFRTSESSALPAFLASVYGSLSLVSIILNNPQILDVEIANLKEARVAWFESCPGEDIPVCRHTQRAWDSPRLKAAHTSLLADSQDDFERARILAVSAPESGHWLRALPSRQLGTVLDPGSLRIAICLRLGSKMCVPHACACGKNVDQLGRHGLSCARSAGRLYRHGSINDLVRRSLATISVPAILEPTGMARDDGKRPDGATLVPWKLGKSLVWDATCVDTFAQSHIRATSKQAGAAADQAQILKRRKYSSLLKDYELAVLAVETLGPWSTDMKAFVRALSARLVDSTGDYKAGTYFCQRIALAVQRGNAASIIGSMPQADLLDGVFLL

SEQ ID NO: 925 - protein, 958 aa, Cydia splendana
MSTQPSISSVELLECPVCLDNKLYKGERGLAIHTARRHGTRIPFNPPLPSASQPTPSTVGNSNSSPFLADRLGALKRHVTVIKRIPRGARRAVANSLSECVAKVVTENSPQAWERLLTFTYSVLHADKSKKTLTTQLKNNSYNLPPPSQLNQSVFISNPRPYSKIKSIENKISEGNISGAARLLFSNDDLATHSPETFAALSDKHPVPLAPTPLPDPPTQDNIGLTVTEDAVQQSILLFPNGSAGGLDGLSPQHLKDLIGVPSGDSGSALLKELTGLMNLMLAGRVNADIVPLLYGANLVALAKKDGGIRPIAVGCTFRRLASKLCCRKYNDKLTNIFKPRQLGFGVKSGCEAAVHAARSFLSRPDYEVFLKIDVKNAFNSINRGALLTEIKENLPDLYAYLWQCYGAPTKLLFGDRTILSSTGCQQGDPLGPAIFSLAIQPIISNLNSKFNLWYLDDGSLGGDAATVLQDLKFIIDKFSDIDLSLNFTKCEIFIPNHLPSERKSEILTNFNAILPNLSVHSNSSLTLLGSPIFDEAINPVINCKLNLFNCTSNLLFEINPHMALYIIRFCLFTPKFMYLLRSCPIWKYPAILSSIDSSLQTTLSKILNVNFDLRSWTQAVLPVRFGGLGVRSSTSVALPAFLSSVYCSLSLVGKILNLPQISGAEIASLAEAETAWCGTCPGVTAPATKHVQRAWDTPGLKATHASLIQNSPDDSDRARLLAVSSYESGHWLNALPSRNIGTVLEKNTLRISVCLRIGAKICSAHTCACGKDVDQLGRHGLSCIKSAGRLYRHGTINDLARRSLATVSVPATLEPSGMARDDGKRPDGATLVPWRLGRPLVWDATCVDTFAQSHIQATRAQAGAAADQAQLLKRRKYSSLLQDYEFAALAVETMGPWSADMKTFMGDLSTRLVDASGDHRAGAYLSQRISLAIQRGNAASVMGSMPQAEVLEGVFSL

SEQ ID NO: 926 - protein, 970 aa, Notocelia uddmanniana
MFLHLSMSSQPCTGSVELLKCPLCGDNKLYKGNRGLAIHTARRHAFRVAVEPPLPSASQPAPSVATDAHSNSNTSFAVKLGSLKRNVPIIKRIPRGARRAVAVCLTECVAKVVRENSFQAWERLLTFSYSVLHANKSLKDSLTKQIKDNTFSISILPENVSNHSSVNPTQSRSYSKIKSIENKVSEGNVGAAARLLLSSDDLAAHSAETFAALWEKHPVPSAATQLPEPPSSEDVKVTVSEDAVRQALLSFPNGSAGGLDGLSPQHLKDLISTPSGDNGSALLKELSALINLMLTSRVNAEIIPLLYGANLVALAKRDGGIRPIAVGCTFRRLASKLCCRKFNHKLTKIFKPRQLGFGIKGGCEAAVHAARTFLSRPDYEVFVKVDVKNAFNSVDRGTLLAEVKKELPEIYGYLWQCYGAPSKLLFGDKIILSSTGCQQGDPLGPAIFSLAIHPLITALNSKFNLWYLDDGSLGGDAETVLQDLQLIIAKFANIGLSLNFTKCEIFLPDHLPTDRKIEILTNFNAILPNISVHSTSSLTLLGSPIFDEAISPVANCKLNQFNCTSNLLHEINPHMALFIIRLCLFTPKFMYLLRCCPIWKFPSILSSIDNTLQTTLSKILNVCFDSTSWSQAVLPVRFGGLGVLSSCSVALPAFLSSAYSSLSLVGIILNNPQILDVEMASLVEARRAWCDSCPGANIPDMRHIQRVWDAPRLKAIHASLIDNSPDDSERARLLAVSAPESGHWLNALPSRNIGTVLDPGTLRIAISLRLGSKICIPHTCVCGKGVDQLGRHGLSCNRSAGRMYRHGTINDLVRRALATASIPSSLEPAGMTRDDGKRPDGVTLVPWKLGRALVWDATCVDTFALSHIQVTRSQAGAAADQAQILKRRKYSSLVQSYEFAALAVETMGPWSADMKSFMKALSSRLVHASGDPKAGAYLSQRIALAVQSGNAASVLGSMPQAELLDGVFFL

SEQ ID NO: 927 - protein, 926 aa, Apotomis turbidana
MVFDPPLLSASQPAPTSSHVDSTGVLVSSSTEFAEKLGLWKYNLPVIKRIPRGARISVARCLTTVVAKVVAENSTQAWERLLTFPYTVLHADRANKNSLTTQIKNNTRGFTEPHINPQNVKRNRPNSQQYYKIKTIESKISEGNVSGAARLLFSSDGLATHSAETFAALRDKHPTPPASIQLPDPPSPDDDTITITEEAVQEAIFSFPNGSAGGLDALSPQHLKDLTTVTSGDAGTALLKEITALVNLMLSGRVNSEIVPVLYGANLVALAKKDGGIRPIAVGSTLRRLTSKLCCRKFHQRLGKIFKPRQLGVGVKGGCEAAVHSARSFLSRPNYEVFLKIDVKNAFNSVDRGALLVEARKELPELYEYLWQCYGAPTKLLFGDNTIPSSVGCQQGDPLGPALFSLAIHPVISNLYSKFNMLFLDDGSLGGDATTVLQDLHIIVEKFSHIGLCLNSTKCEIYLPNHLSLEKRIEIITNFNAVLPNISVLSNSSLTLLCSPIFDEAVKPIINCKLNLFNSTSDLLFEINPHMALFIIRFCLFTPKFMYLIRSCPIWKFPSILSAIDNSLRSTISKILNVNFDDRTWTQAVLPIRFGGLGVRSSTAVALPAFLSSAYSSLSLVGIILDLQQISDTKLASLAEARNAWCDSCPGADIPSSKSCQRAWDAPRLKASHTALIDNSSDDSDRARILAVSAPESGHWLRALPSHNVGTVLDPGCLRIAVCLSLGSRICIPHTCSCGKGVDQLGRHGLLCPRSAGRLYRHGAINDLVRRSLATASVPAILEPVGMARDDGKRPDGATLVPWKLGRVLVWDATCVDTFAASHIQATRSQAGAAADQAQILKRRKYSSLSKDYEFAALAVETLGPWSADMKAFMRALSPRLVRVSGDPRAGAYLSQRIALAIQRGNAASVMGTMPQADLLDGVFFL

SEQ ID NO: 928 - protein, 965 aa, Notocelia uddmanniana
MSSQPCIASVELLKCPLCVDNKFYKGNRGLAIHTARRHAIRVAVDPPLPSASQPAPTTSRDVHFNSSASFAVKLGTLKKNVQIIRRIPRGARRAVANSLAECVAKVVSENSFQAWERLFTFSFSVLHVNKSNKDSLTKQIKDNSSSVSALSDILLNSSLVNSDFNSRHYSKIKLIENKVSEGNVGGAARLLFSNDDLAAHSSETFAALREKHPVPSAPAQLPEPPSSEDAIVTVSEDAVRLALLSFPNGSAGGLDGLSPQHLKDLTTSPSGDAGSALLKELTALINLMLSGRVNAEIIPLLYGANLVALAKKDGGIRPIAIGCTFRRLASKLCCRTFNERLTKIFKPRQLVFGVKGGCEAAVHSARTFLNRPDYEVFVKIDVKNAFNSVDRGALLSEVQKHLPEAYGYLWQCYGAQSKLLFGENIISSSTGCQQGDPLGPAIFSLAINPIISNLNSKFNLWYLDDGSLGGESETVLQDLQLIIDKFADIGLSLNYTKCEIYLPNHLPQHRKIEILTNFNALLPNISVHSNTSLTLLGSPIFDEAIRPIIDCKLNLFNSTANLLFDINPHIVLFIIRFCLFTPKFMYLLRSCPMWKFPSILTSIDDSIQVTLSKILNVDFDIRQWTQAVLPIRFGGLGVRSAHSVALPAFLASIHGSLSLVSVILQHPLIPDDDLADLKVAREAWSDSCPGADIPVTKHIQRAWDSPRLKATHTSLFESSPDDSDRARLLAVSAPESGHWLRALPSRQIGTVLDQSCLRIAVCLRLGSKICVAHTCGCGKKVDQLGRHGLSCARSAGRLFRHGTINDLIRRSLVTASVPAILEPVGMVRDDGKRPDGATLVPWKLGRVLVWDATCVDTFAQSHIQGTRSQAGAAAEQAQCLKRRKYSSLLNDFEFAALAVETLGPWSDDMKSFIRALSKRLIHTSGDPRAGAYLSQRIALAIQRGNAASVMGTMPQGDLLDGVFFL

SEQ ID NO: 929 - protein, 678 aa, Notocelia uddmanniana
MLSGRVHSDIVPLIYGANLVALAKKDGGIRPIAVGCTFRRLVSKLSCRNLKERLTKIFKPRQLGFGIKGGCEAAVHAARTFLDRPDYQVFLKIDVKNAFNSVDRGALLVEVKKELPELYRYLWQCYGAPSKLFFGNKTLLSSMGCQQGDPLGPAIFGLVIHPIITSLNSKFNLWYLDDGCLGGDAATVLQDVQSIIAKFTKIGLTLNFTKCEIFIPDHVPSNTKIDILTNFNSVLPNISVHSKSSLTLLGSPIFDESITPVINCKLNLFNHTSDLLYKINSHMALFIIRFCLFTPKFMYLLRSCPVWKFPSILSSIDSSLQGTLSKSLNIDFDVRSWTQAVLPIRLGGLGVRTSASSALPAFLASVYGSLSLVGIILNLPQILDDEIANLKEARDAWCESCPGEDIPVSRHIQRDWDSPRLKAAHTSLLIDSPDDFERARILAVSAPESGHWLRALPSRQIGTVLDPSSLRIAICLRLGSKMCVPHACACGKNVDQLGRHGLSCARSAGRLFRHGTINDLVRRSLATVSLPAVLEPAGMVRDDGKRPDGATLVPWKLGKALVWDATCVDTFAQCHIQATRSKAGAAADQAQILKRRKYSSLLKDYEFAALAVETLGPWSADMKAFIRALSVRLVDSTGDPRAGAYFSQRIALAVQRGNAASIMGSMPQVDLLDGVFFL

SEQ ID NO: 930 - protein, 968 aa, Notocelia uddmanniana
MHSHSQPCQDSQELLYCPACGDNKQYKGRRGLAIHTARRHGTRMAVDPPLPSASQPTPTLSARGSNTVTTPVALAEKLGLLKANTPIIKRIPRGARISVASSLTRCVAKVVTENSLQAWEHLFTFPYTVLHADKSNKDSLTVQIKNNASKVSVLPVVPRNYHKNFSNIYQRNSRLKTIENKISEGNVSGAAQLLFSRDDLATHSAGTYAALREKHPVPSAASTLPDPPATDDPTIQVSEDAVLLAISSFPNGSAGGLDGLSPQHLKDLTTLSMGDARSALLREVTNLINLMLSGRANPEIVPLLYGANLVALAKKDGGIRPIAVGCTFRRLASKLCCRKFHQKLSNFFKPRQLGFGVKGGCEAAVHAARSFLSRPDYEVFVKVDVQNAFNSVDRGALLAAVKKELPELYHYLWQCYGASTNLLFGDKIILSSMGCQQGDPLGPAIFSLVIHPIISNLNSKFNLWYLDDGSLGGDALTVLHDLQLIINKFSDIGLSLNFTKCEIYLPNHLPSEKKIEILTNFNAVLPNISVLSNSSLTLLGSPIFEESINPVIDCKLKLFNNTSDLLFEINPHMALCIIRFCLFTPKFMYLLRSCPIWKFPSILSHIDESLQATLSKILNIHFDILQWTQAVLPIRFGGLGVRSSSSVALPAFLSSVYGSLSLVSNILNRPQLADDDIACLKEAKEAWCVSCPGVDIPVTRHSQRAWDSPRLQATHASLLANNPDDSERARILAVSSPESGHWLRALPSHQIGTVLDPNSLRIGICLRLGSRICVPHTCACGKDVDQLGRHGLSCSRSAGRFYRHGTINDLVRRSLVTVSVPASLEPVGMARDDGKRPDGVTLVPWKLGRALVWDATCVDTFAQSHIQATRSQAGAAADQAQVLKRRKYSSLLKTYEFAALAVETMGPWSSDMKAFIRALSSRLVNISGDPKAGVYLSQRISLAIQRGNAASVMGTMPQADLLEGVFFL

SEQ ID NO: 931 - protein, 967 aa, Apotomis turbidana
MSTQPLPTSVDLLTCPLCRDNKQYKGQRGLAIHTTRRHGTRMVFDPPLLSASQPAPSSSHADSTGVLVHSSTEFAEKLGLWKTNLPVIKRIPRGARISVARCLTTVVSKVVAENSPQAWERLLTFPYTVLHADRANKNSLTTQIKNNTIGFTEPHINPQNVNRNRPNSQQYYKIKSIESKISEGNVSGAARLLFSSDGLATNSAETFAALRDKHPTPPASVQLPDPPSPDDDTITITEEAVQQAIFSFPNGSAGGLDALSPQHLKDLIAVTSGDAGTALLKEITALVNLMLSGRVNSEIVPVLYGANLVALAKKDGGIRPIAVGSTLRRLTSKLCCRKFHQRLTKVFKPRQLGVGVKGGCEAAVHAARSFLSRPDYEVFLKIDVKNAFNSVDRGALLVEARKELPELYKYLWQCYGAPTKLLFGDNTIPSSVGCQQGDPLGPALFSLAIHPVISNLNSKFNMWYLDDGSLGGDATTILQDLQLIVEKFSHIGLCLNSTKCEIYLPHHLSLEKRIEIITNFNAVLPNISVLSNSSLTLLGSPIFDEAVKPIINCKLNLFNSTSDLLFEINPHMALFIIRFCLFTPKFMYLIRSCPVWKCPSILSAIDDSLRSTISKFLNVNFDDRTWTQAVLPIRFGGLGVRSSSGVALPAFLSSAYSSMSLVGIILNLEQISDTELASLAEARNAWCDTCPGAEIPSSITCQRAWDAPRLKASHTNLIENSSDDSDRARILAVSAPESGHWLRALPSHNVGTVLDPGCLRIAVCLRLGSRICIPHTCSCGKGVDQLGRHGLSCPRSAGRLYRHGAINDLVRRSLATASVPAILEPVGMARDDGKRPDGATLVPWRLGRVLVWDATCVDTFAASHIQATRSQAGAAADQAQILKRRKYSSLSKDYEFAALAVETLGPWSADMKAFMRALSPRLIRVSGDPRAGAYLSQRIALAIQRGNAASVMGTMPQADLLDGVFFL

SEQ ID NO: 932 - protein, 968 aa, Notocelia uddmanniana
MHSHSQPCQDSQELLYCPACGDNKQYKGRRGLAIHTARRHGTRMAVDPPLPSASQPTPTLSARGSNTVTTPVALAEKLGLLKANTPIIKRIPRGARISVASSLTTCVAKVVTENSLQAWEHLFTFPYTVLHADKSNKNSLTVQIKNNASKVSVLPVVPRNYHKNISNIYQRNSRLKTIENKISEGNVSGAAQLLFSRDDLATHSAGTYAALREKHPVPSAASTLPDPPATDDPTIQVSEDAVLLAISSFPNGSAGGLDGLSPQHLKDLTTLSMGDARSALLREVTKLINLMLSGRANPEIVPLLYGANLVALAKKDGGIRPIAVGCTFRRLASKLCCRKFHQKLSNFFKPRQLGFGVKGGCEAAVHAARSFLSRPDYEVFVKVDVKNAFNSVDRGALLAAVKKELPELYHYLWQSYGASTNLLFGDKIILSSMGCQQGDPLGPAIFSLVIHPIISNLNSKFNLWYLDDGSLGGDALTVLHDLQLIINKFSDIGLSLNFTKCEIYLPNHLQSEKKIEILTNFNAVLPNISVLSNSSLTLLGSPIFEESINPVIDCKLKLFNNTSDLLFEINPHMALCIIRFCLFTPKFMYLLRSCPIWKFPSILSHIDESLQATLSKILNIHFDILQWTQAVLPIRFGGLGVRSSSSVALPAFLSSVYGSLSLVSNILNRPQLADDDIACLKEAKEAWCVSCPGVDIPVTRHSQRAWDSPRLPATHASLLANSPDDSERARILAVSSPESGHWLRALPSHQIGTVLDPNSLRIGICLRLGSRICVPHTCACGKDVDLLGRHGLSCSRSAGRFYRHGTINDLVRRSLVTVSVPASLEPVGMARDDGKRPDGVTLVPWKLGRALVWDATCVDTFAQSHIQATRSQAGAAADQAQVLKRRKYSSLLKTYEFAALAVETMGPWSSDMKAFIRALSSRLVNISGDPKAGVYLSQRISLAIQRGNAASVMGTMPQADLLEGVFFL

SEQ ID NO: 933 - protein, 968 aa, Apotomis turbidana
MSTQPLPTSVDLLTCPLCGDNKQYKGQRGLAIHTTRRHGTRMVFDPPLLSASQPAPTSSHVDSTGVLVSSSTEFAEKLGLWKSNLPVIKRIPRGARISVARCLTTVVAKVVAENSTQAWERLLTFPYTVLHADRANKNSLTTQIKNNTKGFTEPHINPQNVKRNRPNSQQYYKIKTIESKISEGNVSGAARLLFSSDGLATHSAETFAALRDKHPTPPPASIQLPDPPSPDDDTITITEEAVQEAIFSFPNGSAGGLDALSPQHLKDLTTVTSGDAGTALLKEITALVNFMLSGRVNSEIVPVLYGANLVALAKQDGGIRPIAVGSTLRRLTSKLCCRKFHQRLGKIFKPRQLGVGVKGGCEAAVHSARSFLSRPDYEVFLKIDVKNAFNSVDRGALLVEARKELPELYKYLWQCYGAPTKLLFGDNTIPSSVGCQQGDPLGPALFSLAIHPVISNLNSKFNMWYLDDGSLGGDATTVLQDLQIIVENFSHIGLCLNSTKCEIYLPNHLSLEKRIEIITNFNAVLPNISVLSNSSLTLLGSPIFDEAVKPIINCKLNLFNSTSDLLFEINPHMALFIIRFCLFTPKFMYLIRSCPIWKFPSILSAIDNSLRSTISKILNVNFDDRTWTQAVLPIRFGGLGVRSSTGVALPAFLSSAYSSLSLVGIILDLQQISDTELASLAEARNAWCESCPGADIPSSKSCQRVWDAPRLKASHTALIDNSSDDSDRVRILAVSAPESGHWLRALPSHNVGTVLDPGCLRIAVCLRLGSRICIPHTCTCGKGVDQLGRHGLSCPGSAGRLYRHGAINDLVRRSLATAYVPAILEPVGMARDDGKRPDGATLVPWKLGRVLVWDATCVDTFAASHIQATRSQAGAAADQAQILKRRKYSSLSKDYEFAALAVETLGPWSADMKAFMRALSPRLVRVSGDPRAGAYLSQRIALAIQRGNAASVMGTMPQADLLEGVFFL

SEQ ID NO: 934 - protein, 965 aa, Notocelia uddmanniana
MSSQPCIASVELLKCPLCVDNKFYKGNRGLAIHTARRHAIRVAVDPPLPSASQPAPTTSRDVHFNSSASFAVKLGTLKKNVQIIRRIPRGARRAVANSLAECVAKVVSENSFQAWERLFTFSFSVLHVNKSNKDSLTKQIKDNSSSVSALSDILLNSSLVNSDFNSRHYSKIKLIENKVSEGNVGGAARLLFSNDDLAAHSSETFAALREKHPVPSAPAQLPEPPSSEDAIVTVSEDAVRLALLSFPNGSAGGLDGLSPQHLKDLTTSPSGDAGSALLKELTALINLMLSGRVNAEIIPLLYGANLVALAKKDGGIRPIAIGCTFRRLASKLCCRTFNERLTKIFKPRQLGFGVKGGCEAAVHSARTFLNRPDYEVFVKIDVKNAFNSVDRGALLSEVQKHLPEAYGYLWQCYGAQSKLLFGENIISSSTGCQQGDPLGPAIFSLAINPIISNLNSKFNLWYLDDGSLGGEAETVLQDLQLIIDKFADIGLSLNYTKCEIYLPNHLPQHRKIEILTNFNALLPNISVHSNTSLTLLGSPIFDEAIRPIIDCKLNLFNSTANLLFDINPHIALFIIRFCLFTPKFMYLLRSCPMWKFPSILTSIDDSIQVTLSKILNVDFDIRQWTQAVLPIRFGGLGVRSAHSVALPAFLASIHGSLSLVSVILQHPLIPDDDLADLKVAREAWSDSCPGADIPVTKHIQRAWDSPRLKATHTSLIESSPDDSDRARLLAVSAPESGHWLRALPSRQIGTVLDQSCLRIAVCLRLGSKICVAHTCGCGKKVDQLGRHGLSCARSAGRLFRHGTINDLIRRSLVTASVPAILEPVGMVRDDGKRPNGATLVPWKLGRVLVWDATCVDTFAQSHIQGTRSQAGAAAEQAQCLKRRKYSSLLNDFEFAALAVETLGPWSDDMKSFIRALSKRQIHTSGDPRAGAYLSQRIALAIQRGNAASVMGTMPQGDLLDGVFFL

SEQ ID NO: 935 - protein, 965 aa, Notocelia uddmanniana
MPSQPCLTSVELLECPICGDNEQYKGRRGLAIHTARQHGTRMVVDPPLPSASQPVSSLGVIDPLPTSNSSSTLTQKLGLLKANTPIIKRIPRGARISVASCLTECIAKVVAENSPAAWERLLTFSYTILHVDKNNKASLTNQIKSKTLSLSEPHTISERSHRKQNALHFSKIKCIENKLSEGNVSGAARLLFSSDDLASYSAETHTALREKHPVPSPASQLPDPPGPDDSFASVSVDAVHQAILSFPIGSAGGIDGLSPQHLKDLTTMPSGDTGAALLIQITALINLMLSGRVNTEVVPLLYGANLIALAKKNGGIRPIAVGCTFRRLASKLCCRKFHTKLTNFFKPRQMGFGVKGGCEAAVHAARSFLCRPDYEVFLKIDVRNAFNSVDRGVLLSEVKKELPDAYKYLWQCYGATTKLLFGDKVILSSMGCQQGDPLGPAIFSLAIHPIISNLKSSFNLWYLDDGSLGGDAETVLQDLHLIIDRFSDIGLSLNYTKCEIYLPSHLPSEKKIEILTNFNAVLPNISVHSNSSLSLLGSPIFDEAIKPIITCKLNLFNNTSNLLFQINPHMALFIIRFCLFTPKFMYLLRSCPIWKFPSILSAIDDSIKTTLSKVLNINFDSRSWAQAVLPIRFGGLGVRSSSSVALPAFLSSAYSSLSLVSIILNHPQIIDMEIASLAEANKAWCDSCPGVDVPETKHVQRAWDTPRLKVTHASLLNSSLDDSDRARILAVSVSESGHWLHALPSRNVGTVLDPNCLRISVCLRLGARMCLAHTCNCGRNVDQLGRHGLSCHRSAGRLYRHGTINDLIRRSLATASVPAILEPVGLARDDGKRPDGATLVPWKLGKALVWDVTGVDTFALSHIQGTRSQAGAAADQAQVNKRRKYSSLLKDYDFLALAVETLGPWSADMKNFFKALSSRLVQTTGDPRAGAYLSQRISIAIQRGNAASVMGSMPQSDLLEAVFFL

SEQ ID NO: 936 - protein, 970 aa, Notocelia uddmanniana
MTSQPCLNPPELLYCSICGDSKQYKGRRGLAIHTAYRHGTRVAIDPPIPSASQPAPSSFAGGFTAPPLPPADISLADRLGLLKTYTPIVKRIPRGARITVARCLTECVAKVVAENSVKAWERLLTFPFTVLHADKSNKASLTSQIKNNTFFISDLPAIPQISDNNTLLSHNSLNSKIKSIENKLSEGNVSGAARLLFSRDDLAAHSDETYAALKEKHPFPSASSTLPDPPALDDPCIIVSENEVIQAIASFPNGSAGGIDGLSPQHMKDLTSTLLGETRSALLKELTALLNLMLSGRVHSDIVPLIYGANLVALAKKDGGIRPIAVGCTFRRLVSKLSCRNLKERLTKIFKPRQLGFGIKGGCEAAVHAARTFLDRPDYQVFLKIDVKNAFNSVGRGALLAEVKKELPELYRYLWQCYGAPSKLFFGNKTLLSSMGCQQGDPLGPAIFGLVIHPIITSLNSKFNLWYLDDGCLGGDAATVLQDVQSIIAKFSKIGLTLNFTKCEIFIPDHVPSNTKIDILTNFNSVLPNISVHSKLSLTLLGSPIFDESITPVINCKLNLFNHTSDLLYKINPHMALFIIRFCLFTPKFMYLLRSCPVWKFPSILSSIDSSLQGTLSKSLNIDFDVRSWTQAVLPIRLGGLGVRTSASSALPAFLASVYGSLSLVGIILNLPQILDDEIANLKEARDAWCESCPGEDIPVSRHIQRDWDSPRLKAAHTSLLIDSPDDFERARILAVSAPESGHWLRALPSRQIGTVLDPSSLRIAICLRLGSKMCVPHACACGKNVDQLGRHGLSCARSAGRLFRHGTINDLVRRSLATVSLPAVLEPAGMVRDDGKRPDGATLVPWKLGKALVWDATCVDTFAQCHIQATRSKAGAAADQAQILKRRKYSSLLKDYEFAALAVETLGPWSADMKAFIRALSVRLVDSTGDPRAGAYFSQRIALAVQRGNAASIMGSMPQVDLLDGVFFL

SEQ ID NO: 937 - protein, 970 aa, Notocelia uddmanniana
MTSQPCLNPPELLYCSICGDSKQYKGRRGLAIHTAYRHGTRVAIDPPIPSASQPAPSSFAGGFTAPPLPPADISLADRLGLLKTYTPIVKRIPRGARITVARCLTECVAKVVAENSVKAWERLLTFPFTVLHADKSNKASLTSQIKNNTFFISDLPAIPQISDNNTLLSHNSLNSKIKSIENKLSEGNVSGAARLLFFRDDLAAHSDETYAALKEKHPFPSASSTLPDPPALDDPCIIVSENEVIQAIASFPNGSAGGIDGLSPQHMKDLTSTLLGETRSALLKELTALLNLMLSGRVHSDIVPLIYGANLVALAKKDGGIRPIAVGCTFRRLVSKLSCRNLKERLTKIFKPRQLGFGIKGGCEAAVHAARTFLDRPDYQVFLKIDVKNAFNSVDRGALLAEVKKELPELYRYLWQCYGAPSKLFFGNKTLLSSMGCQQGDPLGPAIFGLVIHPIITSLNSKFNLWYLDDGCLGGDAATVLQDVQSIIAKFSKIGLTLNFTKCEIFIPDHVPSNTKIDILTNFNSVLPNISVHSKSSLTLLGSPIFDESITPVINCKLNLFNHTSDLLYKINPHMALFIIRFCLFTPKFMYLLRSCPVWKFPSILSSIDSSLQGTLSKSLNIDFDVRSWTQAVLPIRLGGLGVRTSASSALPAFLASVYGSLSLVGIILNLPQILDDEIANLKEARDAWCESCPGEDIPVSRHIQRDWDSPRLKAAHTSLLIDSPDDFERARILAVSAPESGHWLRALPSRQIGTVLDPSSLRIAICLRLGSKMCVPHACACGKNVDQLGRHGLSCARSAGRLFRHGTINDLVRRSLATVSLPAVLEPAGMVRDDGKRPDGATLVPWKLGKALVWDATCVDTFAQCHIQATRSKAGAAADQAQILKRRKYSSLLKDYEFAALAVETLGPWSADMKAFIRALSVRLVDSTGDPRAGAYFSQRIALAVQRGNAASIMGSMPQVDLLDGVFFL

SEQ ID NO: 938 - protein, 965 aa, Notocelia uddmanniana
MPSQPCLTSVELLECPICGDNKQYKGRRGLAIHTARQHGTRMVVDPPLPSASQPVSSLGVIDPLPTSNSSSTLTQKLGLLKANTPIIKRIPRGARISVASCLTECIAKVVAENSPAAWERLLTFSYTILHVDKNNKASLTNQIKSKTLSLSEPHTISERSHRKQNALHFSKIKCIENKLSEGNVSGAARLLFSSDDLASYSAETHTALREKHPDPSPASQLPDPPGPDDSFASVSVDAVHQAILSFPIGSAGGIDGLSPQHLKDLTTMPSGDTGAALLMQITALINLMLSGRVNTEVVPLLYGANLIALAKKNGGIRPIAVGCTFRRLESKLCCRKFHTKLTNFFKPRQMGFGVKGGCEAAVHAARSFLCRPDYEVFLKIDVRNAFNSVDRGVLLSEVKKELPDAYKYLWQCYGAPTKLLFGDKVILSSMGCQQGDPLGPAIFSLAIHPIISNLKSSFNLWYLDDGSLGGDAETVLQDLHLIIDRFSDIGLSLNYTKCEIYLPSHLPSEKKIEILTNFNAVLPNISVHSNSSLSLLGSPIFDEAIKPIITCKLNLFNNTSNLLFQINPHMALFIIRFCLFTPKFMYLLRSCPIWKFPSILSAIDDSIKTTLSKVLNINFDSRSWAQAVLPIRFGGLGVRSSSSVALPAFLSSAYSSLSLVSIILNHPQIIDMEIASLAEANKAWCDSCPGVDVPETKHVQRAWDTPRLKVTHASLLNSSLDDSDRARILAVSVSESGHWLHALPSRNVGTVLDPNCLRISVCLRLGASMCLAHTCNCGRNVDQLGRHGLSCHRSAGRLYRHGTINDLIRRSLATASVPAILEPVGLARDDGKRPDGATLVPWKLGKALVWDVTCVDTFALSHIQGTRSQAGAAADQAQVNKRRKYSSLLKDYDFLALAVETLGPWSADMKNFFKALSSRLVQTTGDPRAGAYLSQRISIAIQRGNAASVMGSMPQSDLLEAVFFL

SEQ ID NO: 939 - protein, 681 aa, Cydia splendana
MNLMLAGRVNADIVPLLYGANLVALAKKDGGIRPIAVGCTFRRLASKLCCRKYNDKLTNIFKPRQLGFGVKSGCEAAVHAARSFLSRPDYEVFLKIDVKNAFNSINRGALLTEIKENLPDLYAYLWQCYGAPTKLLFGDRTILSSTGCQQGDPLGPAIFSLAIQPIISNLNSKFNLWYLDDGSLGGDAATVLQDLKFIIDKFSDIDLSLNFTKCEIFIPNHLPSERKSEILTNFNAILPNLSVHSNSSLTLLGSPIFDEAINPVINCKLNLFNCTSNLLFEINPHMALYIIRFCLFTPKFMYLLRSCPIWKYPAILSSIDSSLQTTLSKILNVNFDLRSWTQAVLPVRFGGLGVRSSTSVALPAFLSSVYCSLSLVGKILNLPQISGAEIASLAEAETAWCGTCPGVTAPATKHVQRAWDTPGLKATHASLIQNSPDDSDRARLLAVSSYESGHWLNALPSRNIGTVLEKNTLRISVCLRIGAKICSAHTCACGKDVDQLGRHGLSCIKSAGRLYRHGTINDLVRRSLATVSVPATLEPSGMARDDGRRPDGATLVPWRLGRPLVWDATCVDTFAQSHIQATRAQAGAAADQAQLLKRRKYSSLLQDYEFAALAVETMGPWSADMKTFMGDLSTRLVDASGDHRAGAYLSQRISLAIQRGNAASVMGSMPQAEVLEGVFSL

SEQ ID NO: 940 - protein, 957 aa, Apotomis turbidana
MPSQPIPINPSQLLSCPICGGNKQYKGQRGLAIHTGRQHGTRMVVDPPLPSASQPAQSSSARDLTATPLAETLGLLKANRPIIKRIPRAARISVARCLTECVSKVVTENSSQAWKCLLTFSFSVLHVNKTCKDSLSTQIKNNTLTVSDPPIIQHIYRQNLASKITAIENKISEGNVSGAARLLFSSDDLAAHSAETYAALKDKHPLPPTSAELPIPPTPNNDCITVTEDAVQQALWSFPNGSAGGLDGLSPQHLKDLISVPTGDAGTALLKSLTKLLNLMLAGRVNTEIIPLLYGANLVALAKKDGGIRPIAVGSTLRRLASKLCCRKFHQKLTNTFKPRQLGFGVKRGCEAAVHAARTFLNRPDYEVFIKIDVKNAFNSVDRGALLAEVQNVLPESFRYLWQCYGAPSKLLFGDKIILSSVGCQQGDPLGPAIFSLAIHPLITKLNSKFNLWYLDDGSLGGDALTVLEDLQLIINKFSDIGLSLNFTKCEIFLPEHLSPEKKIEILTNFHAVVPNISVHTKSSLTLLGSPIFDDAISPIINCKLGLFKGISDLLFEINPHMALFVIRFCLFTPKFMYLLRSSPVWKLPPILSSIDDCLQTTLSKILNINFDSRSWDQAALPIRLGGLGVRSSSSVALPAFLSSAYSSLSLVSVILNSPQLPDVEMASLVEARDAWCASCPGADIPITRAAQKAWDNPRLKATHASLLENSPNDLERARVLAVSASESGHWLHALPSRNIGTVLDPNCLRIATCLRLGARICVDHTCACGKSVDQLGRHGLSCARSAGRLYRHGTLNDLFRRSLATASVPAILEPIGMARDDGKRPDGATLVPWKLGKTLVWDATCVDTFAASHIQVTRTQAGAAADQAQILKRRKYSCLLKDHVFAALAVETLGPWSADMKSFLKALSSRLVDATGDPKAGAYLSQRISLAVQRGNAASVMGTMPQAELLEGVFFL

SEQ ID NO: 941 - protein, 941 aa, Notocelia uddmanniana
MSSQPCIASVELLKCPLCVDNKFYKGNRGLAIHTARRHAIRVAVDPPLPSASQPAPTTSRDVHFNSSASFAVKLGTLKKNVQIIRRIPRGARRAVANSLAECVAKVVSENSFQAWERLFTFSFSVLHVNKSNKDSLTKQIKDNSSSVSALSDILLNSSLVNSDFNSRHYSKIKLIENKVSEGNVGGAARLLFSNDDLAAHSSKTFAALREKHPVPSAPAQLPEPPSSEDAIVTVSEDAVRLALLSFPNGSAGGLDGLSPQHLKDLTTSPSGDAGSALLKELTALINLMLSGRVNAEIIPLLYGANLVALAKKDGGIRPIAIGCTFRRLASKLCCRTFNERLTKIFKPRQLGFGVKGGCEAAVHSARTFLNRPDYEVFVKIDVKNAFNSVDRGARLSEVQKHLPEAYGYLWQCYGAQSKLLFGENIISSSTGCQQGDPLGPAMFSLAINPIISNLNSKFNLWYLDDGSLGGEAETVLQDLQLIIDKFADIGLSLNYTKCEIYLPNHVPQHRKIEILTNFNALLPNISVHSNTSLTLLGSPIFDEAIRPIIDCKLNLFNSTANLLFDINPHIALFIIRFCLFTPKFMYLLRSCPMWKFPSILTSIDDSIQVTLSKILNVDFDIRQWTQAVLPIRFGGLGVRSAHSVALPAFLASIHGSLSLVSVILQHPLIPDDDLADLKVARDAWSDSCPGADIPVTKHIQRAWDSPRLKATHTSLIESSPDDSDRARLLAVSAPESGHWLRALPSRQIGTVLDQSCLRIAVCLRLGSKICVAHTCGCGKKVDQLGRHGLSCARSAGRLFRHGTINELIRRSLVTASVPAILEPIGMVRDDGKRPDGATLVPWKLGRVLVWDATCVDTFAQSHIQGTRSQAGAAAEQAQCLKRRKYSSLLNDFEFAALAVETLGPWSDDMKSFIIEAADPHLRRSQGWRLPLSTNCSSDTER

SEQ ID NO: 942 - protein, 698 aa, Notocelia uddmanniana
MPSGDTGAALLIQITALINLMLSGRVNTEVVPLLYGANLIALAKKNGGIRPIAVGCTFRRLASKLCCRKFHTKLTNFFKPRQMGFGVKGGCEAAVHAARSFLCRPDYEVFLKIDVRNAFNSVDRGVLLSEVKKELPDAYKYLWQCYGAPTKLLFGDKVILSSMGCQQGDPLGPAVFSLAIHPIISNLKSSFNLWYLDDGSLGGDAETVLQDLHLIIDRFSDIGLSLNYTKCEIYLPSHLPSEKKIEILTNFNAVLPNISVHSNSSLSLLGSPIFDETIKPIITCKLNLFNNTSNLLFQINPHMALFIIRFCLFTPKFMYLLRSCPIWKFPSILSAIDDSIKTTLSKVLNINFDSRSWAQAVLPIRFGGLGVRSSSSVALPAFLSSAYSSLSLVSIILNHPQIIDMEIASLAEANKAWCDSCPGVDVPETKHVQRAWDTPRLKVTHASLLNSSLDDSDRARILAVSVSESGHWLHALPSRNVGTVLDPNCLRISVCLRLGARMCLAHTCNCGRNVDQLGRHGLSCHRSAGRLYRHGTINDLIRRSLATASVPAILEPVGLARDDGKRPDGATLVPWKLGKALVWDVTCVDTFALSHIQGTRSQAGAAADQAQVNKRRKYSSLLKDYDFLALAVETLGPWSADMKNFFKALSSRLVQTTGDPRAGAYLSQRISIAIQRGNAASVMGSMPQSDLLEAVFFL

SEQ ID NO: 943 - protein, 971 aa, Pammene fasciana
MPSQPYFNPPELLYCPICKDDKQYKGRRGLAIHTAYRHGTRTAIDPPLTSASQPAPSTSTGGPTAAPSPSIEISLTERLGLLKTNVHIVKRIPRGARITVARCLTECVARVVAENSARAWERLLTFPFTVLHADKSNKASLTSQIKNNTSSISDLPDIPQICNNNNTRMPHHSLNVKIKSIENKLSEGNVSGAARLLFSRDDLAAHSAETYAALQQKHPVPSVSSSLPDPPAADDPSIVVSEDAVIQAIASFPNGSAGGIDALSPQHLKDLTTMSLGDARSDLLKEITALINIMLSGHVNPEIVPLLYGANLVALTKKDGGIRPIAVGCTFRRLASKLCCRKFSQKLLNIFKPRQLGFGVKGGCEAAVHAARTFLNRPDYDVFVKLDVQNAFNSIDRDALLAEVKKELPDLYKYIWQCYGAPSKLFFGNKIISSSMGCQQGDPLGPAIFSLVIHPIIASLNSKFNLWYLDDGSLGGDASTVLQDIQTIIDKFSKIGLTLNFTKCEIFMPDDLSIDKKGEILTNFNAVLPNISVLSKSSLTLLGSPIFDESVSSVISSKLNLFNNTSDLLFKINPHMALFIIRFCLFTPKFMYLLRSCPIWKFPATLASIDSSLQLTLTKILNINFDTKSWTQAVLPIRFGGLGVRTSASSALPAFLASAYGSLSLVGVILNLPQIIDDEIANLKEAREAWCESCPGADIPVTRQMQRAWDSPRLMAVHTSLLESSPNDSERARILAVSVPESGHWLHALPSRQIGTVLDSSTLRIAVCLRLGSSMCVPHTCACGKGVDQLGRHGLSCTRSAGRMYRHGTINDLVRRSLATVSVPAILEPAGIARDDGRRPDGATLVPWKLGRALVWDATCVDTFAQSHIQATRTKAGAAADQAQILKRRKYSFLLKDYEFAALAVETLGPWSADMKAFMRALSARLVDTTGDQKAGAYLSQRIALAVQRGNAASVIGSMPQADLLDGVFFL

SEQ ID NO: 944 - protein, 787 aa, Pammene fasciana
MSEGDVSGAARLLFSNDDLATHTPETFAALRDKHPVPTTPTQPSDPATPDVTCLTVSEDAVQQTILSFHNGSAGGLDGITPQHLKDLIMTPAGDAGLALLKKLTDLLNLMLAGGVNAEITPILYGANLIALAKKDGGIRPIAVGSTFRRLASKLCCRKFNTKLTNIFKPRQLGFGVKSGCEAAVHAARSYLSRPDYEVFLKIDVKNAFNSVNRSALLTEIKKELPESYAYLSQCYGAPTKLLFGDKTILSCTGCQQGDPLGPAIFSLAIQPIISKLNSKFNLWYLDDGSLGGDAATVLQDLQFIIDKFSDIDLSLNFTKCEIFIANHLPADRKTEILTNFNAILPNISVLSNSSLTLLGSPIFDEAINPVINCKLDLFNRTSSLLYEINPHMALFIIRFCLFTPKFTYLLRCCPVWKFPVILSSIDSVLQTTISKVLNIIFEPRSWSQAVLPVRFGGLGVRSSSGVALPAFLSSAYCSLSLVGKILNLSQISGAEIVSLAEAESAWCAACPGVDVPATKHVQRAWDTHILKATHASLINNSPDDSERARLLAVSASESGHWLNALPSQNIGTVLDAKALRIAVCLRTGAQICLPHTCACGKSVDQLGRHGLSCKRSAGRLYRHGTINDLVRRSLATVSVPASLEPAGMVRSDGKRPNGATLVPWKLGRPLVWDATCVDTFAQSHIQGTRSQAGAAADQAQLLKRRKYSSLLKDYEFAALAVETMGPWSADMKSFMGALSKRLVDASGDPRAGTYLCQRISLAIQRGNSASVMGSLPQGDLLEGVFFL

SEQ ID NO: 945 - protein, 973 aa, Cydia splendana
MSSQPCINGWDLLYCPICDDNKQYKGPRGLAIHTSRRHGTRMVVDTPLPSASQPAPSNFARGPTATTVSSSPTDATSLAKKLGLLKTNNPVIKRIPRGARITVARSLTECVAKVVVENSFQAWERLLTFPYKVLHVDRSNKSSLTSQIKSNTFSISDSPIISQGRDINTRTPVSSLAFKVRSIENKLSEGDVGGAARLLFSCDDLATHSPETYAALREKHPVPVATSSLLDPPATDDPTIIVSEDAVQSAIWSFPNGSAGGMDGLSPQHLKDLINTPLGDTSSALVKEITGLINLMLAGLVHTEIAPLLYGANLVALAKKDGGIRPIAVGCTYRRLASKLCCKKFNDKLTHLFKPKQLGFGVKGGCEAAVHAARTFLSGPDFEIFVKIDVKNAFNSIDRGALLAAVKKELPDLYKYIWQCYGAPSKLLFGDNIISSSMGCQQGDPLGPAIFSLVIHPIISGLKSKFNIWYLDDGSLGGDAATVLDDLICIEEKFSEIGLSLNYTKCEIFFPEHLPSDIKNDYLTNFNEVLPNISVQSKSSLTLLGSPIFGEAIAPVINCKLNLFNSTSELLFKINPHIALFIIRFCLFTPKFMYLLRSCPIWKFPSILSSIDTSLQATLSKILNIQFDTRSWTQAVLPIRFGGLGVRTSASSALPAFLSSVYGSLSLIGVILNLPQILDDEVASLREAREAWCQSCPSADIPDARHIQRAWDSPRLEAVHATLIDNSPDDFDHARILAVSAPESGHWLQTLPSKAIGTVLDPSSLRIAIGLRLGSRICVSHTCACGKSVDQLGRHGLSCAKSAGRMYRHGTINDLVRRALATVSVPAVLEPVGMARDDGKRPDGATLVPWKLGRALVWDATCVDTLAQSHIGATRIQAGAAADQAQILKRRKYSTLVNDYEFAALAVETLGPWSSDMKAFMKALSARLVDSTGDRRAGAYLSQRIALAVQRGNAASVMGSMPQAELLDGAFLL

SEQ ID NO: 946 - protein, 959 aa, Cydia splendana
MSTQPSISSVELLECPVCLDNKLYKGERGLAIHTARRHGTRIPFNPPLPSASQPTPSTVGNSNSSPFLADRLGALKRHVTVIKRIPRGARRAVANSLSECVAKVVTENSPQAWERLLTFTYSVLHAEKSRKTSLTTQLKNNSYNLPPPSQLNQSVFISNPRPYSKIKSIENKISEGNISGAARLLFSNDDLATHSPETFAALSDKHPVPLAPTPLPDPPTQDNIGLTVTEDAVQQSILLFPNGSAGGLDGLSPQHLKDLIGVPSGDSGSALLKELTGLMNLMLAGRVNADIVPLLYGANLVALAKKDGGIRPIAVGCTFRRLASKLCCRKYNDKLTNIFKPRQLGFGVKSGCEAAVHAARSFLSRPDYEVFLKIDVKNAFNSINRGALLTEIKENLPDLYAYLWQCYGAPTKLLFGDRTILSSTGCQQGDPLGPAIFSLAIQPIISNLNSKFNLWYLDDGSLGGDAATVLQDLKFIIDKFSDIDLSLNFTKCEIFIPNHLPSERKSEILTNFNAILPNLSVHSNSSLTLLGSPIFDEAINPVINCKLNLFNCTSNLLFEINPHMALYIIRFCLFTPKFMYLLRSCPIWKYPAILSSIDSSLQTTLSKILNVNFDLRSWTQAVLPVRFGGLGVRSSTSVALPAFLSSVYCSLSLVGKILNLPQISGAEIASLAEAETAWCGTCPGVTAPATKHVQRAWDTPGLKATHASLIQNSPDDSDRARLLAVSSYESGHWLNALPSRNIGTVLEKNTLRISVCLRIGAKICSAHTCACGKDVDQLGRYGLSCIKSAGRLYRHGTINDLVRRSLATVSVPATLEPSGMARDDGKRPDGATLVPWRLGRPLVWDATCVDTFAQSHIQATRAQAGAAADQAQLLKRRKYSSLLQDYEFAALAVETMGPWSADMKTFMGDLSTRLVDASGDHRAGAYLSQRISLAIQRGNAASVMGSMPQAEVLEGVFSL

SEQ ID NO: 947 - protein, 957 aa, Apotomis turbidana
MPSQPIPINPSQLLSCPICGGNKQYKGQRGLAIHTGRQHGTRMVVDPPLPSASQPAQSSSARDLTATPLAETLGLLKANRPIIKRIPRAARISVARCLTECVSKVVTENSSQAWKCLLTFSFSVLHVNKTCKDSLSTQINNNTLTVSDPPIIQHIYRQNLASKITAIENKISEGNVSGAARLLFSSDDLAAHSAETYAALKDKHPLPPTSAELPIPPTPNNDCITVTEDAVQQALWSFPNGSAGGLDGLSPQHLKDLISVPTGDAGTALLKSLTKLLNLMLAGRVNTEIIPLLYGANLVALAKKDGGIRPIAVGSTLRRLASKLCCRKFHQKLTNTFKPRQLGFGVKGGCEAAVHAARTFLNRPDYEVFIKIDVKNAFNSVDRGALLAEVQNVLPESFRYLWQCYGAPSKLLFGDKIILSSVGCQQGDPLGPAIFSLAIHPIITKLNSKFNPWYLDDGSLGGDALTVLEDLQLIINKFSDIGLSLNFTKCEIFLPEHLSPEKKIEILTNFHAVVPNISVHTKSSLTLLGSPIFDDAISPIINCKLGLFKGISDLLFEINPHMALFVIRFCLFTPKFMYLLRSSPVWKLPPILSSIDDCLQTTLSKILNINFDSRSWDQAVLPIRLGGLGVRSSSSVALPAFLSSAYSSLSLVSVILNSPQLPDVEMASLVEARDAWCASCPGADIPITRAAQKAWDNPRLKATHASLLENSPNDLERARVLAVSASESGHWLHALPSRNIGTVLDPNCLRIATCLRLGARICVDHTCACGKSVDQLGRHGLSCARSAGRLYRHGTLNDLFRRSLATASVPAILEPIGMARDDGKRPDGATLVPWKLGKTLVWDATCVDTFAASHIQVTRTQAGAAADQAQILKRRKYSCLLKDHVFAALAVETLGPWSADMKSFLKALSSRLVDATGDPKAGAYLSQRISLAVQRGNAASVMGTMPQAELLEGVFFL

SEQ ID NO: 948 - protein, 970 aa, Notocelia uddmanniana
MTSQPCLNPPELLYCSICGDSKQYKGRRGLAIHTAYRHGTRVAIDPPIPSASQPAPSSFAGGFTAPPLPPADISLADRLGLLKTYTPIVKRIPRGARITVARCLTECVAKVVAENSVKAWERLLTFPFTVLHADKSNKASLTSQIKNNTFFISDLPAIPQISDNNTLLSHNSLNSKIKSIENKLSEGNVSGAARLLFSRDDLAAHSDETYAALKEKHPFPSASSTLPDPPALDDPCIIVSENEVIQAIASFPNGSAGGIDGLSPQHIKDLTSTLLGETRSALLKELTALLNLMLSGRVHSDIVPLIYGANLVALAKKDGGIRPIAVGCTFRRLVSKLSCRNLKERLTKIFKPRQLGFGIKGGCEAAVHAARTFLDRPDYQVFLKIDVKNAFNSVDRGALLAEVKKELPELYRYLWQCYGAPSKLFFGNKTLLSSMGCQQGDPLGPAIFGLVIHPIITSLNSKFNLWYLDDGCLGGDAATVLQDVQSIIAKFSKIGLTLNFTKCEIFIPDHVPSNTKIDILTNFNSVLPNISVHSKSSLTLLGSPIFDESITSVINCKLNLFNHTSDLLYKINPHMALFIIRFCLFTPKFMYLLRSCPVWKFPSILSSIDSSLQGTLSKSLNIDFDVRSWTQAVLPIRLGGLGVRTSASSALPAFLASVYGSLSLVGIILNLPQILDDEIANLKEARDAWCESCPGEDIPVSRHIQRDWDSPRLKAAHTSLLIDSPDDFERARILAVSAPESGHWLRALPSRQIGTVLDPSSLRIAICLRLGSKMCVPHACACGKNVDQLGRHGLSCARSAGRLFRHGTINDLVRRSLATVSLPAVLEPAGMVRDDGKRPDGATLVPWKLGKALVWDATCVDTFAQCHIQATRSKAGAAADQAQILKRRKYSSLLKDYEFAALAVETLGPWSADMKAFIRALSVRLVDSTGDPRAGAYFSQRIALAVQRGNAASIMGSMPQVDLLDGVFFL

SEQ ID NO: 949 - protein, 970 aa, Notocelia uddmanniana
MTSQPCLNPPELLYCSICGDSKQYKGRRGLAIHTAYRHGTRVAIDPPIPSASQPAPSSFAGGFTAPPLPPADISLADRLGLLKTYTPIVKRIPRGARITVARCLTECVAKVVAENSVKAWERLLTFPFTVLHADKSNKASLTSQIKNNTFFISDLPAIPQISDNNSLLSHNSLNSKIKSIENKLSEGNVSGAARLLFSRDDLAAHSDETYAALKEKHPFPSASSTLPDPPALDDPCIIVSENEVIQAIASFPNGSAGGIDGLSPQHMKDLTSTLLGETRSALLKELTALLNLMLSGRVHSDIVPLIYGANLVALAKKDGGIRPIAVGCTFRRLVSKLSCRNLKERLTKIFKPRQLGFGIKGGCEAAVHAARTFLDRPDYQVFLKIDVKNAFNSVDRGALLAEVKKELPELYRYLWQCYGAPSKLFFGNKTLLSSMGCQQGDPLGPAIFGLVIHPIITSLNSKFNLWYLDDGCLGGDAATVLQDVQSIIAKFSKIGLTLNFTKCEIFIPDHVPSNTKIDILTNFNSVLPNISVHSKSSLTLLGSPIFDESITPVINCKLNLFNHTSDLLYKINPHMALFIIRFCLFTPKFMYLLRSCPVWKFPSILSSIDSSLQGTLSKSLNIDFDVRSWTQAVLPIRLGGLGVRTSASSALPAFLASVYGSLSLVGIILNLPQILDDEIANLKEARDAWCESCPGEDIPVSCHIQRDWDSPRLKAAHTSLLIDSPDDFERARILAVSAPESGHWLRALPSRQIGTVLDPSSLRIAICLRLGSKMCVPHACACGKNVDQLGRHGLSCARSAGRLFRHGTINDLVRRSLATVSLPAVLEPAGMVRDDGKRPDGATLVPWKLGKALVWDATCVDTFAQCHIQATRSKAGAAADQAQILKRRKYSSLLKDYEFAALAVETLGPWSADMKAFIRALSVRLVDSTGDPRAGAYFSQRIALAVQRGNAASIMGSMPQVDLLDGVFFL

SEQ ID NO: 950 - protein, 959 aa, Cydia splendana
MSTQPSISSVELLECPVCLDNKLYKGERGLAIHTARRHGTRIPFNPPLPSASQPTPSTVGNSNSSPFLADRLGALKRHVTVIKRIPRGARRAVANSLSECVAKVVTENSPQAWERLLTFTYSVLHAEKSKKTSLTTQLKNNSYNLPPPSQLNQSVFISNPRPYSKIKSIENKISEGNISGAARLLFSNDDLATHSPETFAALSDKHPVPLAPTPLPDPPTQDNIGLTVTEDAVQQSILLFPNGSAGGLDGLSPQHLKDLIGVPSGDSGSALLKELTGLMNLMLAGRVNADIVPLLYGANLVALAKKDGGIRPIAVGCTFRRLASKLCCRKYNDKLTNIFKPRQLGFGVKSGCEAAVHAARSFLSRPDYEVFLKIDVKNAFNSINRGALLTEIKENLPDLYAYLWQCYGAPTKLLFGDRTILSSTGCQQGDPLGPAIFSLAIQPIISNLNSKFNLWYLDDGSLGGDAATVLQDLKFIIDKFSDIDLSLNFTKCEIFIPNHLPSERKSEILTNFNAILPNLSVHSNSSLTLLGSPIFDEAINPVINCKLNLFNCTSNLLFEINPHMALYIIRFCLFTPKFMYLLRSCPIWKYPAILSSIDSSLQTTLSKILNVNFDLRSWTQAVLPVRFGGLGVRSSTSVALPAFLSSVYCSLSLVGKILNLPQISGAEIASLAEAETAWCGTCPGVTAPATKHVQRAWDTPGLKATHASLIQNSPDDSDRARLLAVSSYESGHWLNALPSRNIGTVLEKNTLRISVCLRIGAKICSAHTCACGKDVDQLGRHGLSCIKSAGRLYRHGTINDLVRRSLATVSVPATLEPSGMARDDGKRPDGATLVPWRLGRPLVWDATCVDTFAQSHIQATRAQAGAAADQAQLLKRRKYSSLLQDYEFAALAVETMGPWSADMKTFMGDLSTRLVDASGDHRAGAYLSQRISLAIQRGNAASVMGSMPQAEVLEGVFSL

SEQ ID NO: 951 - protein, 956 aa, Apotomis turbidana
MPSQPIINPSQLLSCPICGGNKQYKGQRGLAIHTGRQHGTRMVVDPPLPSASQPAQSSSARDLTATPLAETLGLLKANRPILKRIPRAARISVARCLTECVSKVVTENSSQAWKCLLTFSFSVLHVNKTCKDSLSTQIKNNTLTVSDPPIIQHIYRQNLASKITAIENKISEGNVSGAARLLFSSDDLAAHSAETYAALKDKHPLPPTSAELPIPPTPNNDCITVTEDAVQQALWSFPNGSAGGLDGLSPQHLKDLISVPTGDAGTALLKSLTKLLNLMLAGRVNTEIIPLLYGANLVALAKKDGGIRPIAVGSTLRRLASKVCCRKFHQKLTNTFKPRQLGFGVKGGCEAAVHAARTFLNRPDYEVFIKIDVKNAFNSVDRGALLAEVQNVLPESFRYLWQCYGAPSKLLFGDKIILSSVGCQQGDPLGPAIFSLAIHPIITKLNSKFNLWYLDDGSLGGDALTVIEDLQLIINKFSDIGLSLNFTKCEIFLPEHLSPEKKIEILTNFHAVVPNISVHTKSSLTLLGSPIFDDAISPIINCKLSLFKSISDLLFEINPHMALFVIRFCLFTPKFMYLLRSSPVWKLPPILSSIDDCLQTTLSKILNINFDSRSWDQAVLPIRLGGLGVRSSSSVALPAFLSSAYSSLSLVSVILNSPQLPDVEMASLVDARDAWCASCPGADIPITRAAQKAWDNPRLKATHASLLENSQNDLERARVLAVSASESGHWLHALPSRNIGTVLDPNCLRIATCLRLGARICVDHTCACGKSVDQLGRHGLSCARSAGRLYRHGTLNDLFRRSLATASVPAILEPIGMARDDGKRPDGATLVPWKLGKTLVWDATCVDTFAASHIQLTRTQAGAAADQAQILKRRKYSCLLKDHVFAALAVETLGPWSADMKSFLKALSSRLVDATGDPKAGAYLSQRISLAVQRGNAASVMGTMPQAELLEGVFFL

SEQ ID NO: 952 - protein, 796 aa, Bembecia ichneumoniformis
MKIKSIENKLSDGNVSGAARLLFSRDGLAAHSDETYAALKEKHPVPPASSKLPDPPAPNDPFLTASEDAVIQAIASFPNGSAGGIDGLSPQHLKDLTMMSLGETRTALVKELTALINLMLSGSVHNDIVPLLYGANLVALAKKDGGIRPIAVGCTLRRLASKLSCRTFKERLTDIFKPRQLGFGIKGGCEAAVHAARTFLKLPDYQVFLKIDVQNAFNSVDRGALLAEVKKELPELFNYLWQCYGTPSKLFFGNKSILSSMGCQQGDPLGPAIFGLVIHPIISSLNSKFNVWYLDDGSLGGDAITVLQDVQSIIDKFSKIGLSLNFTKCEIFIPDHVPSNSKIDILTNFNALLPNISFLSKSSLTLLGSPIFDESVTPVINQKLNLFNDTSDLLFKINPHMALFIIRFCLFTPKFIYLLRSCPIWKFPSVLSSIDSSLQVTLSKILNINFEIRQWTQTVLPIRLGGLGFRSSESSALPAFLASVYGSLSLVSIILNNPQILDVEIANLKEARVAWFESCPGEDIPVCRHTQRAWDSPRLKAAHTSLLADSQDDFERARILAVSAPESGHWLRALPSRQLGTVLDPGSLRIAICLRLGSKMCVPHACACGKNVDQLGRHGLSCARSAGRLYRHGSINDLVRRSLATISVPAILEPTGMARDDGKRPDGATLVPWKLGKSLVWDATCVDTFAQSHIRATSKQAGAAADQAQILKRRKYSSLLKDYELAVLAVETLGPWSTDMKAFVRALSARLVDSTGDHKAGTYFSQRIALAVQRGNAASIIGSMPQADLLDGVFLL

SEQ ID NO: 953 - protein, 972 aa, Cydia splendana
MPSQPCINGWDLLYCPICDDNKQYKGPRGLAIHTSRRHGTRMVVDTPLPSASQPVPSNFARGPTATVSTSPTDATSLAKKLGLLKTNNPVIKRIPRGARITVARSLTECVAKVVAENSFQAWERLLTFPYKVFHVDRSNKTSLTSQIKSNTFSISDLPIISQGRDINTRTPVSSLAFKVRSIENKLSEGDVGGAARLLFSCDDLATHSPETYAALSEKHPVPAATSSLPDPPATDDPTVIVSEDAVQSAIWSFPNGSAGGMDGLSPQHLKDLINTPLGDTSSALVKEITGLINLMLAGLVHAEIAPLLYGANLVALAKKDGGIRPIAVGCTYRRLASKLCCKKFNDKLTHLFKPKQLGFGVKGGCEAAVHAARTFLSGPDSEIFVKIDVKNAFNSVDRGALLAAVKKELPDLYKYIWQCYGAPSKLLFGDNIISSSMGCQQGDPLGPAIFSLVIHPIISGLKSKFNIWYLDDGSLGGDAATVLEDLICIEEKFSEIGLSLNYAKCEIFFPEHLPSDIKNDFLTNFNEVLPNISVQSKSSPTLLGSPIFGEAIAPVVNCKLNLFNSTSELLFKINPHIALFIIRFCLFTPKFMYLLRSCPIWKFPSILSSIDTSLQATLSKILNIQFDTRSWTQAVLPIRFGGLGVRTSASSALPAFLSSVYGSLSLIGVILNLPQILDDEVASLREAREAWCQSCPSADIPDARHVQRAWDSPRLEAVHATLMESSPDDYDHARILAVSAPESGHWLQALPSKAIGTVLDPSSLRIAIGLRLGSRICVSHTCACGKSVDQLGRHGLSCAKSAGRIYRHGTINDLVRRALATVSVPAVLEPVGMARDDGKRPDGATLVPWKLGRALVWDATCVDTLAQSHIGATRIQAGAAADQAQILKRRKYSTLVNDYEFAALAVETLGPWSSDMKAFMKALSARLVDSTGDRRAGAYLSQRIALAVQRGNAASVMGSLPQAELLDGAFLL

SEQ ID NO: 954 - protein, 960 aa, Pammene fasciana
MSTQPLIAVSVELLECHLCLDKKLYKGQKGLAIHTARRHATRIAVDARPPYASQPTPSTANEDFISNSSTILAERLGYLKKHVPVVKRIPRGARRAVANSLSECVAKVISENSPTAWERLLTFSYSVLHADKSSKTSLTSQIKFNSNNLQTASQPNVIKLSNPQPYSKIKAIENKMSKGDVSGAARLLFSNDDLATHSPETFAALRDKHPVPTTQPPVPANPDVTCLTVSEDAVQQTILSFHNGSAGGLDGITPQHLKDLIMTSAGDAGSALLKKLTDLVNLMLAGGVNAEITPILYGANLIALAKKDGGIRPIAVGSTFRRLTSKLCCRKFNTKLTNIFKPRQLGFGVKSGCEAAVHAARSYLSRPDYEVFLKIDVKNAFNSVNRGALLTEIEKELPNSYAYLSQCYGAPTKLLFGDKTILSCTGCQQGDPLGPAIFSLAIQPIISKLNSKFNLWYLDDGSLGGDAATVLQDLRFIIDKFSDIDLSLNFTKCEIFIANHLSADRKTEIITNFNAILPNISVLSSSSLTLLGSPVFDEAINPVINCKLDLFNRTSSLLYEINPHMALFIIRFCVFTPKFTYLLRCCPVWKFPVILSSIDSVLQTTISKVLNIIFEPRSWSQAVLPVRFGGLGVRSSAGVALPAFLSSAYCSLSLVGKILNLPQISDADIVSLAEAENAWCAACPGVDVPATKHVQRAWDTHILKATHASLINNSPDDSDRARLLAVSANESGHWLNALPSQNIATVLDAKALRIAVCLRTGAQICLPHTCACGKSVDQLGRHGLSCPRSAGRLYRHGTLNDLVRRSLATVSVPATLEPAGMVRNDGKRPDGATLVPWKLGRPLVWDATCVDTFAQSHIQGTRSQAGAAADQAQLLKRRKYSSLLKDYEFAALAVETMGPWSADMKTFMGVLSKRLVDASGDPRAGTYLCQRISLAIQRGNSASVMGSLPQGDLLEGVFFL

SEQ ID NO: 955 - protein, 924 aa, Notocelia uddmanniana
MVVDPPLPSASQPVSSLGVIDPLPTSNSSSTLTQKLGLLKANTPIIKRIPRGARISVASCLTECIAKVVAENSPAAWERLLTFSYTILHVDKNNKASLTNQIKSKTLSLSEPHTISERSHRKQNALHFSKIKCIENKLSEGNVSGAARLLFSSDDLASYSAETHTALREKHPVPSPASQLPDPPGPDDSFASVSVDAVHQAILSFPIGSAGGIDGLSPQHLKDLTTMPSGDTGAALLIQITALINLMLSGRVNTEVVPLLYGANLIALAKKNGGIRPIAVGCTFRRLASKLCCRKFHTKLTNFFKPRQMGFGVKGGCEAAVHAARSFLCRPDYEVFLKIDVRNAFNSVDRGVLLSEVKKELPDAYKYLWQCYGAPTKLLFGDKVILSSMGCQQGDPLGPAIFSLAIHPIISNLKSSFNLWYLDDGSLGGDAETVLQDLHLIIDRFSDIGLSLNYTKCEIYLPSHLLSEKKIEILTNFNAVLPNISVHSNSSLSLLGSPIFDEAIKPIITCKLNLFNNTSNLLFQINPHMALFIIRFCLFTPKFMYLLRSCPIWKFPSILSAIDDSIKTTLSKVLNINFDSRSWAQAVLPIRFGGLGVRSSSSVALPAFLSSAYSSLSLVSIILNHPQIIDMEIASLAEANKAWCDSCPGVDVPETKHVQRAWDTPRLKVTHASLLNSSLDDSDRARILAVSVSESGHWLHALPSRNVGTVLDPNCLRISVCLRLGARMCLAHTCNCGRNVDQLGRHGLSCHRSAGRLYRHGTINDLIRRSLATASVPAILEPVGLARDDGKRPDGATLVPWKLGKALVWDVTCVDTFALSHIQGTRSQAGAAADQAQVNKRRKYSSLLKDYDFLALAVETLGPWSADMKNFFKALSSRLVQTTGDPRAGAYLSQRISIAIQRGNAASVMGSMPQSDLLEAVFFL

SEQ ID NO: 956 - protein, 971 aa, Pammene fasciana
MPSQPYFNPPELLYCPICKDDKQYKGRRGLAIHTAYRHGTRTAIDPPLTSASQPAPSTSTGGPTAAPSPSIEISLTERLGLLKTNVHIVKRIPRGARITVARCLTECVARVVAENSARAWERLLTFPFTVLHADKSNKASLTSQIKNNTSSISDLPDIPQICNNNNTRMPHHSLNVKIKSIENKLSEGNVSGAARLLFSRDDLAAHSAETYAALQQKHPVPSVSSSLPDPPAADDPSIVVSEDAVIQAIASFPNGSAGGIDALSPQHLKDLTTMSLGDARSDLLKEITALINIMLSGHVNPEIVPLLYGANLVALTKKDGGIRPIAVGCTFRRLASKLCCRKFSQKLLNIFKPRQLGFGVKGGCEAAVHAARTFLNRPDYDVFVKLDVQNAFNSIDRDALLAEVKKELPDLYKYIWQCYGAPSKLFFGNKIISSSMGCQQGDPLGPAIFSLVIHPIIASLNSKFNLWYLDDGSLGGDASTVLQDIQTNIDKFSKIGLTLNFTKCEIFMPDDLSIDKKGEILTNFNAVLPNISVLSKSSLTLLGSPIFDESVSSVISSKLNLFNNTSDLLFKINPHMALFIIRFCLFTPKFMYLLRSCPIWKFPATLASIDSSLQLTLTKILNINFDTKSWTQAVLPIRFGGLGVRTSASSALPAFLASAYGSLSLVGVILNLPQIIDDEIANLKEAREAWCESCPGADIPVTRQMQRAWDSPRLMAVHTSLLESSPNDSERARILAVSVPESGHWLHALPSRQIGTVLDSSTLRIAVCLRLGSSMCVPHTCACGKGVDQLGRHGLSCTRSAGRMYRHGTINDLVRRSLATVSVPAILEPAGIARDDGRRPDGATLVPWKLGRALVWDATCVDTFAQSHIQATRTKAGAAADQAQILKRRKYSFLLKDYEFAALAVETLGPWSADMKAFMRALSARLVDTTGDQKAGAYLSQRIALAVQRGNAASVIGSMPQADLLDGVFFL

SEQ ID NO: 957 - protein, 970 aa, Cydia pomonella
MSSQPCLNPLELLCCPICGGNKQYKGRRGLAIHTAHKHGTRMAVNPPLPSVSQPAPSSPAWGYTASSPPTAEIPLADRLGSLKANVPVLKRIPRGARFCVARCLAESVAKVVAENSTQAWERFLTLPYIVLHADKSSKVSLTSQIKNNTSYISNPPVTFPSRENYTRIPHNSLSTKIRSIENKFSEGDISGAARLLFSRDDLAAHSAETYAALIEKHPAPAASLTLPVPPASDDPTIHVCEDAVLQAIASFPNGSAGGIDGLSPQHLKDLTTKSLGEARADLIKQLTALINLMLSGRVHPEIVPLLYGANLVALAKKDGGIRPIAVGCTIRRLASKLCCRKLNKQLTNAFKPRQLGFGIKGGCEAAVHAARTFLNRPDFEVFVKLDVKNAFNSVDRGALLAEVKEQLPDIYNYLRQCYGAPSKLFFGDKTILSSMGCQQGDPLGPAIFSLVIHPIITKLNSKFNLWYLDDGSLGGDALNVLQDVQYIISKFSKIGLSLNFTKCEIFIPDHVPSEKKIEILTNFNAVLPNISVHSKSSLTLLGSPIFDESVTPVINCKLNLFNSTSDLLFKINPHMALFIIRFCLFTPKFMYLLRSCQIWKFPSILSSVDSSLQATLTKILNIHFEIRSWTQAVLPIRFGGLGVRTSASIALPAFLSSVYGSLSLVGIILNRSSILDDEIANMKEAREAWCESCPSADIPVARHCQRDWDSPRLKIAHASLIEHSLDDSERARILAVSAPESGHWLQALPSRQIGTVLDPSSLRIAICLRLGSRICVPHTCACGKDVDQLGRHGLSCSRSAGRIFRHGTINDLVRRALATVSVPAVLEPVGMARDDGKRPDGATLVPWKLGRALVWDATCVDTFAQSHIQGTRIRAGAAADQAQVLKRRKYSTLLDDYEFAALAVETLGPWSADMKIFMAALSARLVDTTGDPRAGAYLSQRISLAIQRGNAASIMGSMPQTDLLEGVFSL

SEQ ID NO: 958 - protein, 924 aa, Notocelia uddmanniana
MVVDPPLPSASQPVSSLGVIDPLPTSNSSSTLTQKLGLLKANTPIIKRIPRGARISVASCLTECIAKVVAENSPAAWERLLTFSYTILHVDKNNKASLTNQIKSKTLSLSEPHTISERSHRKQNALHFSKIKCIENKLSEGNVSGAARLLFSSDDLASYSAETHTALREKHPVPSPASQLPDPPGPDDSFASVSVDAVHQAILSFPIGSAGGIDGLSPQHLKDLTTMPSGDTGAALLIQITALINLMLSGRVNTEVVPLLYGANLIALAKKNGGIRPIAVGCTFRRLASKLCCRKFHTKLTNFFKPRQMGFGVKGGCEAAVHAARSFLCRPDYEVFLKIDVRNAFNSVDRGVLLSEVKKELPDAYKYLWQCYGAPTKLLFGDKVILSSMGCQQGDPLGPAIFSLAIHPIISNLKSSFNLWYLDDGSLGGDAETVLQDLHLIIDRFSDIGLSLNYTKCEIYLPSHLPSEKKIEILTNFNAVLPNISVHSNSSLSLLGSPIFDEAIKPIITCKLNLFNNTSNLLFQINPHMALFIIRFCLFTPKFMYLLRSCPIWKFPSILSAIDDSIKTTLSKVLNINFDSRSWAQAVLPIRFGGLGLRSSSSVALPAFLSSAYSSLSLVSIILNHPQIIDMEIASLAEANKAWCDSCPGVDVPETKHVQRAWDTPRLKVTHASLLNSSLDDSDRARILAVSVSESGHWLHALPSRNVGTVLDPNCLRISVCLRLGARMCLAHTCNCGRNVDQLGRHGLSCHRSAGRLYRHGTINDLIRRSLATASVPAILEPVGLARDDGKRPDGATLVPWKLGKALVWDVTCVDTFALSHIQGTRSQAGAAADQAQVNKRRKYSSLLKDYDFLALAVETLGPWSADMKNFFKALSSRLVQTTGDPRAGAYLSQRISIAIQRGNAASVMGSMPQSDLLEAVFFL

SEQ ID NO: 959 - protein, 970 aa, Notocelia uddmanniana
MTSQPCLNPPELLYCSICGDSKQYKGRRGLAIHTAYRHGTRVAIDPPIPSASQPAPSSFAGGFTAPPLPPADISLADRLGLLKTYTPIVKRIPRGARITVARCLTECVAKVVAENSVKAWERLLTFPFTVLHADKSNKASLTSQIKNNTFFISDLPAIPQISDNNTLLSHNSLNSKIKSIENKLSEGNVSGAARLLFSRDDLAAHSDETYAALKEKHPFPSASSTLPDPPALDDPCIIVSENEVIQAIASFPNGSAGGIDGLSPQHIKDLTSTLLGETRSALLKELTALLNLMLSGRVHSDIVPLIYGANLVALAKKDGGIRPIAVGCTFRRLVSKLSCRNLKERLTKIFKPRQLGFGIKGGCEAAVHAARTFLDRPDYQVFLKIDVKNAFNSVDRGALLAEVKKELPELYRYLWQCYGAPSKLFFGNKTLLSSMGCQQGDPLGPAIFGLVIHPIITSLNSKFNLWYLDDGCLGGDAATVLQDVQSIIAKFSKIGLTLNFTKCEIFIPDHVPSNTKIDILTNFNSVLPNISVHSKSSLTLLGSPIFDESITPVINCKLNLFNHTSDLLYKINPHMALFIIRFCLFTPKFMYLLRSCPVWKFPSILSSIDSSLQGTLSKSLNIDFDVRSWTQAVLPIRLGGLGVRTSASSALPAFLASVYGSLSLVGIILNLPQILDDEIANLKEARDAWCESCPGEDIPVSRHIQRDWDSPRLKAAHTSLLIDSPDDFERARILAVSAPESGHWLRALPSRQIGTVLDPSSLRIAICLRLGSKMCVPHACACGKNVDQLGRHGLSCARSAGRLFRHGTINDLVRRSLATVSLPAVLEPAGMVRDDGKRPDGATLVPWKLGKALVWDATCVDTFAQCHIQATRSKAGAAADQAQILKRRKYSSLLKDYEFAALAVETLGPWSADMKAFIRALSVRLVDSTGDPRAGAYFSQRIALAVQRGNAASIMGSMPQVDLLDGVFFL

SEQ ID NO: 960 - protein, 973 aa, Cydia splendana
MSSQPCINGWDLLYCPICDDNKQYKGPRGLAIHTSRRHGTRMVVDTPLPSASQPAPSNFARGPTATTVSSSPTDATSLAKKLGLLKTNNPVIKRIPRGARITVARSLTECVAKVVVENSFQAWERLLTFPYKVLHVDRSNKSSLTSQIKSNTFSISDSPIISQGRDINTRTPVSSLAFKVRSIENKLSEGDVGGAARLLFSCDDLATHSPETYAALREKHPVPAATSSLLDPPATDDPTIIVSEDAVQSAIWSFPNGSAGGMDGLSPQHLKDLINTPLGDTSSALVKEITGLINLMLAGLVHTEIAPLLYGANLVALAKKDGGIRPIAVGCTYRRLASKLCCKKFNDKLTHLFKPKQLGFGVKGGCEAAVHAARTFLSGPDFEIFVKIDVKNAFNSIDRGALLAAVKKELPDLYKYIWQCYGAPSKLLFGDNIISSSMGCQQGDPLGPAIFSLVIHPIISGLKSKFNIWYLDDGSLGGDAATVLDDLICIEEKFSEIGLSLNYTKCEIFFPEHLPSDIKNDYLTNFNEVLPNISVQSKSSLTLLGSPIFGEAIAPVINCKLNLFNSTSELLFKINPHIALFIIRFCLFTPKFMYLLRSCPIWKFPSILSSIDTSLQATLSKILNIQFDTRSWTQAVLPIRFGGLGVRTSASSALPAFLSSVYGSLSLIGVILNLPQILDDEVASLREAREAWCQSCPSADIPDARHIQRAWDSPRLEAVHATLIDNSPDDFDHARILAVSAPESGHWLQTLPSKAIGTVLDPSSLRIAIGLRLGSRICVSHTCACGKSVDQLGRHGLSCAKSAGRMYRHGTINDLVRRALATVSVPAVLEPVGMARDDGKRPDGATLVPWKLGRALVWDATCVDTLAQSHIGATRIQAGAAADQAQILKRRKYSTLVNDYEFAALAVETLGPWSSDMKAFMKALSARLVDSTGDRRAGAYLSQRIALAVQRGNAASVMGSMPQAELLDGAFLL

SEQ ID NO: 961 - protein, 952 aa, Apotomis turbidana
MSTQPLPTSVDLLTCPLCRDNKQYKGQRGLAIHTTRRHGTRMVFDPPLLSASQPAPTSSHVDSTGVLVSSSTEFAEKLGLWKSNLPVIKRIPRGARISVARCLTTVVAKVVAENSTQAWERLLTFPYTVLHADRANKNSLTTQIKNNTIGFTEPHINPQNVKRNRPNSQQYYKIKTIESKISEGNVSGAARLLFSSDELATHSAETFAALRDKHPTSPASIQLPDPPSPDDDTITITEDAVQEAIFSFPNGSAGGLDALSPQHLKDLTTVTSGDAGTALLKEITALVNLMLSGRVNSEIVPVLYGANLVALAKKDGGIRPIAVGSTLRRLTSKLCCRKFHQRLGKIFKPRQLGVGVKGGCEAAVHSARSFLSRPDHEVFLKIDVKNAFNSVDRGALLVEARKELSELYKYLWQCYGAPTKLLFGDNTIPSSVGCQQGDPLGPALFSLAIHPVISNLNSKFNMWYLDDGSLGGDANTVLQDLQIIVEIFSHIGLCLNSTKCEIYLPNHLSLEKRIEIITNFNAVLPNISVLSNSSLTLLGSPIFDEAVKPIINCKLNLFNSTSDLLFEINPHMALFIIRFCLFTPKFMYLIRSCPIWKFPSILSAIDNSLRSTISKILNVNFDDRTWTQAVLPIRFGGLGVRSSTGVALPAFLSSAYSSLSLVGIILDLQQISDTELASLAEARNAWCDSCPGADIPSSKSCQRAWDAPRLKASHAALIVNSSDDSDRARILAVSAPESGHWLRALPSHNVGTVLDPGCLRIAVCLRLGSRICIPHTCSCGKGVDQLGRHGLSCPRSAGRLYRHGAINDLVRLSLATVSVPAILEPVGMARDDGKRPDGATLVPWKLGRVLVWDATCVDTFAASHIQATRSQAGAAADQAQILKRRKYSSLSKDYEFAALAVETLGLPVVLWSLVGRYEGIYEGPVASVGTCLRGPQSWRVPLTEDRSCDPKR

SEQ ID NO: 962 - protein, 678 aa, Notocelia uddmanniana
MLSGRVNAEIIPLLYGANLVALAKKDGGIRPIAIGCTFRRLASKLCCRTFNERLTKIFKPRQLGFGVKGGCEAAVHSARTFLNRPDYEVFVKIDVKNAFNSVDRGALLSEVQKHLPEAYGYLWQSYGAQSKLLFGENIISSSTGCQQGDPLGPAIFSLAINPIISNLNSKFNLWYLDDGSLGGEAETVLQDLQLIIDKFADIGLSLNYTKCEIYLPNHLPQHRKIEILTNFNALLPNISVHSNTSLTLLGSPIFDEAIRPIIDCKLNLFNSTANLLFDINPHIALFIIRFCLFTPKFMYLLRSCPMWKFPSILTSIDDSIQVTLSKILNVDFDIRQWTQAVLPIRFGGLGVRSAHSVALPAFLASIHGSLSLVSVILQHPLIPDDDLADLKVAREAWSDSCPGADIPVTKHIQRAWDSPRLKATHTSLIESSPDDSDRARLLAVSAPESGHWLRALPSRQIGTVLDQSCLRIAVCLRLGSKICVAHTCGCGKKVDQLGRHGLSCARSAGRLFRHGTINDLIRRSLVTASVPAILEPVGMVRDDGKRPDGATLVPWKLGRVLVWDATCVDTFAQSHIQGTRSQAGAAAEQAQCLKRRKYSSLLNDFEFAALAVETLGPWSDDMKSFIRALSKRLIHTSGDPRAGAYLSQRIALAIQRGNAASVMGTMPQGDLLDGVFFL

SEQ ID NO: 963 - protein, 956 aa, Apotomis turbidana
MPSQPIINPSQLLSCPICGGNKQYKGQRGLAIHTGRQHGTRMVVDPPLPSASQPAQSSSARDLTATPLAETLGLLKANRPIIKRIPRAARISVARCLTECVSKVVTENSSQAWKCLLTFSFSVLHVNKTCKDSLSTQIKNNTLTVSDPPIIQHIYRQNLASKITAIENKISEGNVSGAARLLFSSDDLAAHSAETYAALKDKHPLPPTSAELPIPPTPNNDCITVTEDAVQQALWSFPNGSAGGLDGLSPQHLKDLISVPTGDAGTALLKSLTKLLNLMLAGRVNTEIIPLLYGANLVALAKKDGGIRPIAVGSTLRRLASKVCCRKFHQKLTNTFKPRQLGFGVKGGCEAAVHAARTFLNRPDYEVFIKIDVKNAFNSVDRGALLAEVQNVLPESFRYLWQCYGAPSKLLFGDKIILSSVGCQQGDPLGPAIFSLAIHPIITKLNSKFNLWYLDDGSLGGDALTVLEDLQLIINKFSDIGLSLNFTKCEIFLPEHLSPEKKIEILTNFHAVVPNISVHTKSSLTLLGSPIFDDAISPIINCKLSLFKSISDLLFEINPHMALFVIRFCLFTPKFMYLLRSSPVWKLPPILSSIDDCLQTTLSKILNINFDSRSWDQAVLPIRLGGLGVRSSSSVALPAFLSSAYSSLSLVSVILNSPQLPDVEMASLVDARDAWCASCPGADIPITRAAQKAWDNPRLKATHASLLENSQNDLERARVLAVSASESGHWLHALPSRNIGTVLDPNCLRIATCLRLGARICVDHTCACGKSVDQLGRHGLSCARSAGRLYRHGTLNDLFRRSLATASVPAILEPIGMARDDGKRPDGATLVPWKLGKTLVWDATCVDTFAASHIQVTRTQAGAAADQAQILKRRKYSCLLKDHVFAALAVETLGPWSADMKSFLKALSSRLVDATGDPKAGAYLSQRISLAVQRGNAASVMGTMPQAELLEGVFFL

SEQ ID NO: 964 - protein, 965 aa, Notocelia uddmanniana
MPSQPCLTSVELLECPICGDNKQYKGRRGLAIHTARQHGTRMVVDPPLPSASQPVSSLGVIDPLPTSNSSSTLTRKLGLLKANTPIIKRIPRGARISVASCLTECIAKVVAENSPAAWERLLTFSYTILHVDKNNKASLTNQIKSKTLSLSEPHTISERSHRKQNALHFNKIKCIENKLSEGNVSGAARLLFSSDDLASYSAETHTALREKHPVPSPASQLPDPPGPDDSFASVSVDAVHRAILSFPIGSAGGIDGLSPQHLKDLTTMPSGDTGAALLIQITALINLMLSGRVNTEVVPLLYGANLIALAKKDGGIRPIAVGCTFRRLASKLCCRKFHTKLTNFFKPRQMGFGVKGGCEAAVHAARSFLCRPDYEVFLKIDVRNAFNSVDRGVLLSEVKKELPDAYKYLWQCYGAPTKLLFGDKVILSSMGCQQGDPLGPAIFSLAIHPIISNLKSSFNLWYLDDGSLGGDAETVLQELHLIIDRFSDIGLSLNYTKCEIYLPSHLPSEKKIEILTNFNAVLPNISVHSNSSLSLLGSPIFDEAIKPIITCKLNLFNNTSNLLFQINPHMALFIIRFCLFTPKFMYLLRSCPIWKFPSILSAIDDSIKTTLSKVLNINFDSRSWAQAVLPIRFGGLGVRSSSSVALPAFLSSAYSSLSLVSIILNHPQIIDMEIASLAEANKAWCDSCPGVDVPETKHVQRAWDTPRLKVTHASLLNSSLDDSDRARILAVSVSESGHWLHALPSRNVGTVLDPNCLRISVCLRLGARMCLAHTCNCGRNVDQLGRHGLSYHRSAGRLYRHGTINDLIRRSLATASVPAILEPVGLARDDGKRPDGATLVPWKLGKALVWDVTCVDTFALSHIQGTRSQAGAAADQAQVNKRRKYSSLLKDYDYSALAVETLGPWSADMKNFFKVLSPRLVQTTGDPRAGAYLSQRISIAIQRGNAASVMGSMPQSDLLEAVFFL

SEQ ID NO: 965 - protein, 965 aa, Notocelia uddmanniana
MSSQPCIASVELLKCPLCVDNKFYKGNRGLAIHTARRHAIRVAVDPPLPSASQPAPTTSRDVHFNSSASFAVKLGTLKKNVQIIRRIPRGARRAVANSLAECVAKVVSENSFQAWERLFTFSFSVLHVNKSNKDSLTKQIKDNSSSVSALSDILLNSSLVNSDFNSRHYSKIKLIENKVSEGNVGGAARLLFSNDDLAAHSSETFAALREKHPVPSAPAQLPEPPSSEDAIVTVSEDAVRLALLSFPNGSAGGLDGLSPQHLKDLTTSPSGDAGSALLKELTALINLMLSGRVNAEIIPLLYGANLVALAKKDGGIRPIAIGCTFRRLASKLCCRTFNERLTKIFKPRQLGFGVKGGCEAAVHSARTFLNRPDYEVFVKIDVKNAFNSVDRGALLSEVQKHLPEAYGYLWQCYGAQSKLLFGENIISSSTGCQQGDPLGPAIFSLAINPIISNLNSKFNLWYLDDGSLGGESETVLQDLQLIIDKFADIGLSLNYTKCEIYLPNHLPQHRKIEILTNFNALLPNISVHSNTSLTLLGSPIFDEAIRPIIDCKLNLFNSTANLLFDINPHIALFIIRFCLFTPKFMYLLRSCPMWKFPSILTSIDDSIQVTLSKILNVDFDIRQWTQAVLPIRFGGLGVRSAHSVALPAFLASIHGSLSLVSVILQHPLIPDDDLADLKVAREAWSDSCPGADIPVTKHIQRAWDSPRLKATHTSLIESSPDDSDRARLLAVSAPESGHWLRALPSRQIGTVLDQSCLRIAVCLRLGSKICVAHTCGCGKKVDQLGRHGLSCARSAGRLFRHGTINDLIRRSLVTASVPAILEPVGMVRDDGKRPDGATLVPWKLGRVLVWDATCVDTFAQSHIQGTRSQAGAAAEQAQCLKRRKYSSLLNDFEFAALAVETLGPWSDDMKSFIRALSKRLIHTSGDPRAGAYLSQRIALAIQRGNAASVMGTMPQGDLLDGVFFL

SEQ ID NO: 966 - protein, 956 aa, Apotomis turbidana
MPSQPIPINPSQLLSCPICGGNKQYKGQRGLAIHTGRQHGTRMVVDPPLPSASQPAQSSSARDLTATPLAETLGLLKANRPIIKRIPRAARISVARCLTECVSKVVTENSSQAWKFLLTFSFSVLHVNKTCKDSLSTQIKNNTLTVSDPPIIQHIYRQNLASKITAIENKISEGNVSGAARLLFSSDDLAAHSAETYAALKDKHPLPPTSAELPIPPTPNNDCITVTEDAVQQALWSFPNGSAGGLDGLSPQHLKDLISVPTGDAGTALLKSLTKLLNLMLAGRVNTEIIPLLYGANLVALAKKDGGIRPIAVGSTLRRLASKLCCRKFHQKLTNTFKPRQLGFGVKGGCEAAVHAARTFLNRPDYEVFIKIDVKNAFNSVDRGALLAEVQNVLPESFRYLWQCYGAPSKLLFGDKIILSSVGCQQGDPLGPAIFSLAIHPTITKLNSKFNLWYLDDGSLGGDALTVLEDLQLIINKFSDIGLSLNFTKCEIFLPEHLSPEKKIEILTNFHAVVPNISVHTKSSLTLLGSPIFDDAISPIINCKLGLFKGISDLLFEINPHMALFVIRFCLFTPKFMYLLRSSPVWKLPPILSSIDCLQTTLSKILNINFNSRSWDQAVLPIRLGGLGVRSSSSVALPAFLSSAYSSLSLVSVILNSPQLPDVEMASLVEARDAWCASCPGADIPITRAAQKAWDNPRLKATHASLLENSPNDLERARVLAVSASESGHWLHALPSRNIGTVLDPNCLRIATCLRLGARICVDHTCACGKSVDQLGRHGLSCARSAGRLYRHGTLNDLFRRSLATASVPAILEPIGMARDDGKRPDGATLVPWKLGKTLVWDATCVDTFAASHIQVTRTQAGAAADQAQILKRRKYSCLLKDHVFAALAVETLGPWSADMKSFLKALSSRLVDATGDPKAGAYLSQRISLAVQRRNAASVMGTMPQAELLEGVFFL

SEQ ID NO: 967 - protein, 992 aa, Scleropages formosus
MEPLQRSAAAVLCVGFLSLLTESKLNQLGEIIYDYGEKRFGVFEKKHKGEQSRLKSRRQMEIERLVKERRHLKKLWKRADEEGRSGINILQEELKRRLVVLRRAEKLRLRRKKKEQARVAFFKDPFKFVKSLLEQEKSGCLDVPRRELESYLRGMHTDGESERVFEVPADIPPLGEIVVQMDVCPPRLKEVQEVVRRARAASAPGPNGVPYRVYKGAPDVLKFLWKQMVVVWKKGIIPKEWRRAGGVFIPKEKDAVDIGQFRPICLLNVEGKIFFTVVAQRLSAYLLVNNLIDTSVQKAGISGFSGCLEHCSMIWHQIKEAKMDGKDLHVIFLDLANAFGSVPHVLLWRAFDFFKVPECITRLVKVYFEDIKFYFCTKQYTTSWQRLGIGIMAGCTISPLAFTMAMEVLIRASRWVVGGMRLKDGPHLPPIRAYMDDMTLLTTTVPCTRRLLTKLNGNLKLAGLKIKPSKCRSLSVVKGKLSRENFQIDGEKIPSVAERPIKSLGRWYDSSFSDKEQVKRLREDVALAINRIDKSFLPGKLKVWCLQFGLLPRIRWPLTIYEVCMSEVERLERVMSKAIRRWLGVPHCLSSVALYGNGVLELPLTSLVEEFKCAKVGLELTLSNSRDPVVRSVPVSLKKGRKWDPREAVAQAQTALEHRDVVGQVQVGRAGLGAGDRIKLWSKAKLPERRKMVIGFIREQEEEARRVTATSHGVQGRCLAWEHVEKRKISWRDLWAMDAGRIKFLIGATYDVLPTPQNLNRWVGTEPTCSLCGGVASLRHILSACKVSLSQGRYTWRHNEVLRSLACLLENKRVEVNSLPQYGRNKLISFVREGESVISHARGRGDTSFKWGEVRDWKLLADVGKQLQMPQCIAITALRPDIVLYSEGARIVYFIELTIPFEDSLEDAFERKKLKYTELAGEVRERGWQCVIRPVEIGTRGFVAKSTTSLLLEFGFRGQSLRAAIKGLSEVAERSSQWLWMRRHQGAWGKHT

SEQ ID NO: 968 - protein, 992 aa, Scleropages formosus
MEPLQRSAAAVLCVGFLSLLTESKLNQLGEIIYDYGEKRFGVFEKKHKGEQSRLKSRRQMEIERLVKERRHLKKLWKRADEEGRSGINILQKELKRRLVVLRRAEKLRLRRKKKEQARVAFFKDPFKFVKSLLEQEKSGCLDVPRRELESYLRGMHTDGESERVFEVPADIPPLGEIVVQMDVCPPRLKEVQEVVRRARAASAPGPNGVPYRVYKGAPDVLKFLWKQMVVVWKKGIIPKEWRRAGGVFIPKEKDAVDIGQFRPICLLNVEGKIFFTVVAQRLSAYLLVNNLIDTSVQKAGISGFSGCLEHCSMIWHQIKEAKMDGKDLHVIFLDLANAFGSVPHVLLWRAFDFFKVPECITRLVKVYFEDIKFYFCTKQYTTSWQRLGIGIMAGCTISPLAFTMAMEVLIRASRWVVGGMRLKDGPHLPPIRAYMDDMTLLTTTVPCTRRLLTKLNGNLKLAGLKIKPSKCRSLSVVKGKLSRENFQIDGEKIPSVAERPIKSLGRWYDSSFSDKEQVKRLREDVALAINRIDKSFLPGKLKVWCLQFGLLPRIRWPLTIYEVCMSEVERLERVMSKAIRRWLGVPHCLSSVALYGNGVLELPLTSLVEEFKCAKVGLELTLSNSRDPVVRSVPVSLKKGRKWDPREAVAQAQTALEHRDVVGQVQVGRAGLGAGDRIKLWSKAKLPERRKMVIGFIREQEEEARRVTATSHGVQGRCLAWEHVEKRKISWRDLWAMDAGRIKFLIGATYDVLPTPQNLNRWVGTEPTCSLCGGVASLRHILSACKVSLSQGRYTWRHNEVLRSLACLLENKRVEVNSLPQYGRNKLISFVREGESVISHARGRGDTSFKWGEVRDWKLLADVGKQLQMPQCIAITALRPDIVLYSEGARIVYFIELTIPFEDSLEDAFERKKLKYTELAGEVRERGWQCVIRPVEIGTRGFVAKSTTSLLLEFGFRGQSLRAAIKGLSEVAERSSQWLWMRRHQGAWGKHT

SEQ ID NO: 969 - protein, 1127 aa, Scleropages formosus
MNLTMSRGESTSTTTPSRGGLALQVCICGWRKVTSVRGLRIHQGKKKCLGGRGQGPCVDRYDLRSGSNKSGEVQGQVAHQRPQDINTSVLEEARPSMDAQGSIDHGEDAGQMISRRAGKERGRKLKVRWPGATDYKEWTSVNNDLRGILNGLKGTAESKLNQLGEIIYDYGEKRFGVFEKKHKGEQSRLKSRRQMEIERLVKERRHLKKLWKRADEEGRSGINILQEELKRRLVVLRRAEKLRLRRKKKEQARVAFFKDPFKFVKSLLEQEKSGCLDVPRRELESYLRGMHTDGESERVFEVPADIPPLGEIVVQMDVCPPRLKEVQEVVRRARAASAPGPNGVPYRVYKGAPDVLKFLWKQMVVVWKKGIIPKEWRRAGGVFIPKEKDAVDIGQFRPICLLNVEGKIFFTVVAQRLSAYLLVNNLIDTSVQKAGISGFSGCLEHCSMIWHQIKEAKMDGKDLHVIFLDLANAFGSVPHVLLWRAFDFFKVPECITRLVKVYFEDIKFYFCTKQYTTSWQRLGIGIMAGCTISPLAFTMAMEVLIRASRWVVGGMRLKDGPHLPPIRAYMDDMTLLTTTVPCTRRLLTKLNGNLKLAGLKIKPSKCRSLSVVKGKLSRENFQIDGEKIPSVAERPIKSLGRWYDSSFSDKEQVKRLREDVVLAINRIDKSFLPGKLKVWCLQFGLLPRIRWPLTIYEVCMSEVERLERVMSKAIRRWLGVPHCLSSVALYGNGVLELPLTSLVEEFKCAKVGLELTLSNSRDPVVRSVPVSLKKGRKWDPREAVAQAQTALEHRDVVGQVQVGRAGLGAGDRIKLWSKAKLPERRKMVIGFIREQEEEARRVTATSHGVQGRCLAWEHVEKRKISWRDLWAMDAGRIKFLIGATYDVLPTPQNLNRWVGIEPTCSLCGGVASLRHILSACKVSLSQGRYTWRHNEVLRSLACLLENKRVEVNSLPQYGRNKLISFVREGESVISHARGRGDTSFKWGEVRDWKLLADVGKQLQMPQCIAITALRPDIVLYSEGARIVYFIELTIPFEDSLEDAFERKKLKYTELAGEVRERGWQCVIRPVEIGTRGFVAKSTTSLLLEFGFRGQSLRAAIKGLSEVAERSSQWLWMRRHQGVWGKHT

SEQ ID NO: 970 - protein, 933 aa, Scleropages formosus
MEIERLVQERRHLKKLWKRADEEGRSGINILQEELKRRLVVLRRAEKLRLRRKKKEQARVAFFKDPFKFVKSLLEQEKSGCLDVPRRELESYLREMHTDGESERVFEVPADIPPLGEIVVQMDVCPPRLKEVQEVVRRARAASAPGPNGVPYRVYKGAPDVLKFLWKQMMVVWKKGIIPKEWRRAGGVFIPKEKDAVDIGQFRPICLLNVEGKIFFSVVAQRLSAYLLVNNLIDTSVQKAGIAGFSGCLEHCSMIWHQMKEAKMEGKDLHVIFLDLANAFGSVPHVLLWRAFDFFKVPECITRLVKVYFEDIQFYFCTKQYTTSWQQLGIGIMAGCTISPLAFTLAMEVLIRASRWVVGGMRLKDGSHLPPIRAYMDDMTLLTTTVPCTRRLLTKLNGNLKLAGLKIKPSKCRSLLIVKGKLSRENFQIDGEKIPSVAERPIKSLGRWYDSSFSDKEQVKRLREDVIRAIKRIDKSFLPGKLKVWCLQFGLLPRIRWPLTIYEICMSEVERLERVMSKAIRRWLGVPHCLSSVALYGKGVLELPLTSLVEEFKCAKVGLELTLSSSRDPVVRSVPVSLKNGHKWDPRVAVAQAQTALEHRDVVGQVQVGRAGLGAGDRIKLWSKAKLPERRKMVTGFIREQEEEARRVTATSHGVQGQCLAWEHVEKRKISWRDLWAMDAGRIKFLIGATYDVLPTPQNLNRWVGTEPTCSLCGGIASLRHILSACKVSLSQGRYTWRHNEVLRSLACLLENKRVEVNSLPQYGRNKLISFVREGESAISHVRGRGDTSFKWGEVRDWKLVADVGKQLQMPQCIVITALRPDIVLYSEGARIVYFIELTIPFEDSLEDAFERKKLKYSELAGEVRERGWQCVIRPVEIGTRGFVAKSTTSLLLEFGFRGQSLRAAVKGLSEVAERSSQWLWMRRHQGVWGKHT

SEQ ID NO: 971 - protein, 1084 aa, Scleropages formosus
MTKKCLGGRGQGPCVDRYDLRSGSNKSGEVQGQVAHQRPQDINTSVLEEARPNMDAQGSIDHGEDAGQMISRRAGKERGRKLKVRWPGATDCKEWTSVNNDLRGILNGLKGTAESKLNQLGEIIYDYGEKRFGVFEKKHKGEQSRLKSRRQMEIERLVKERRHLKKLWKRADEEGRSGINILQEELKRRLVVLRRAEKLRLRRKKKEQARVAFFKDPFKFVKSLLEQEKSGCLDVPRRELESYLRGMHTDGESERVFEVPADIPPLGEIVVQMDVCPPRLKEVQEVVQRARAASAPGPNGIPYRVYKGAPDVLKFLWKQMVVVWKKGIIPKEWRRAGGVFIPKEKDAVDIGQFRPICLLNVEGKIFFTVVAQRLSAYLLVNNLIDTSVQKAGISGFSGCLEHCSMIWHQIKEAKMDGKDLHVIFLDLANAFGSVPHVLLWRAFDFFKVPECITRLVKVYFEDIKFYFCTKQYTTSWQRLGIGIMAGCTISPLAFTMAMEVLIRASRWVVGGMRLKDGPHLPPIRAYMDDMTLLTTTVPCTRRLLTKLNGNLKLAGLKIKPSKCRSLSVVKGKLSRENFQIDGEKIPSVAERPIKSLGRWYDSSFSDKEQVKRLREDVVLAINRIDKSFLPGKLKVWCLQFGLLPRIRWPLTIYEVCMSEVERLERVMSKAIRRWLGVPHCLSSVALYGNGVLELPLTSLVEEFKCAKVGLELTLSNSRDPVVRSVPVSLKKGRKWDPREAVAQAQTALGHRDVVGQVQVGRAGLGAGDRIKLWSKAKLPERRKMVIGFIREQEEEARRVTATSHGVQGRCLAWEHVEKRKISWRDLWAMDAGRIKFLIGATYDVLPTPQNLNRWVGTEPTCSLCGGVASLRHILSACKVSLSQGRYTWRHNEVLRSLACLLENKRVEVNSLPQYGRNKLISFVREGESVISHARGRGDTSFKWGEVRDWKLLADVGKQLQMPQCIAITALRPDIVLYSEGARIVYFIELTIPFEDSLEDAFERKKLKYTELAGEVRERGWQCVIRPVEIGTRGFVAKSTTSLLLEFGFRGQSLRAAIKGLSEVAERSSQWLWMRRHQGAWGKHT

SEQ ID NO: 972 - protein, 1031 aa, Scleropages formosus
MDAQGSIDHGEDAGQMISRRAGKERGRKLKVRWPGATDCKEWTSVNNDLRGILNGLKGTAESKLNQLGEIIYDYGEKRFGVFEKKHKGEQSRLKSRRQMEIERLVKERRHLKKLWKRADEEGRSGINILQEELKRRLVVLRRAEKLRLRRKKKEQARVAFFKDPFKFVKSLLEQEKSGCLDVPRRELESYLRGMHTDGESERVFEVPADIPPLGEIVVQMDVCPPRLKEVQEVVRRARAASAPGPNGVPYRVYKGAPDVLKFLWKQMVVVWKKGIIPKEWRRAGGVFIPKEKDAVDIGQFRPICLLNVEGKIFFTVVAQRLSAYLLVNNLIDTSVQKAGISGFSGCLEHCSMIWHQIKEAKMDGKDLHVIFLDLANAFGSVPHVLLWRAFDFFKVPECITRLVKVYFEDIKFYFCTKQYTTSWQRLGIGIMAGCTISPLAFTMAMEVLIRASRWVVGSMRLKDGPHLPPIRAYMDDMTLLTTTVPCTRRLLTKLNGNLKLAGLKIKPSKCRSLSVVKGKLSRENFQIDGEKIPSVAERPIKSLGRWYDSSFSDKEQVKRLREDVVLAINRIDKSFLPGKLKVWCLQFGLLPRIRWPLTIYEVCMSEVERLERVMSKTIRRWLGVPHCLSSVALYGNGVLELPLTSLVEEFKCAKVGLELTLSNSRDPVVRSVPVSLKKGRKWDPREAVAQAQTALEHRDVVGQVQVGRAGLGAGDRIKLWSKAKLPERRKMVIGFIREQEEEARRVTATSHGVQGRCLAWEHVEKRKISWRDLWAMDAGRIKFLIGATYDVLPTPQNLNRWVGTEPTCSLCGGVASLRHILSACKVSLSQGRYTWRHNEVLRSLACLLENKRVEVNSLPQYGRNKLISFVREGESVISHARGRGDTSFKWGEVRDWKLLADVGKQLQMPQCIAITALRPDIVLYSEGARIVYFIELTIPFEDSLEDAFERKKLKYTELAGEVRERGWQCVIRPVEIGTRGFVAKSTTSLLLEFGFRGQSLRAAIKGLSEVAERSSQWLWMRRHQGAWGKHT

SEQ ID NO: 973 - protein, 1123 aa, Scleropages formosus
MRSVMIFSTTTPSRGGLALQVCICGWRKVTSVRGLRIHQGKKKCLGGRGQGPCVDRYDLRSGSNKSGEVQGQVAHQRPQDINTSVLEEARPNMDAQGSIDHGEDAGQMISRRAGKERGRKLKVRWPGATDCKEWTSVNNDLRGILNGLKGTAESKLNQLGEIIYDYGEKRFGVFEKKHKGEQSRLKSRRQMEIERLVKERRHLKKLWKRADEEGRSGINILQEELKRRLVVLRRAEKLRLRRKKKEQARVAFFKDPFKFVKSLLEQEKSGCLDVPRRELESYLRGMHTDGESERVFEVPADIPPLGEIVVQMDVCPPRLKEVQEVVRRARAASAPGPNGVPYRVYKGAPDVLKFLWKQMVVVWKKGIIPKEWRRAGGVFIPKEKDAVDIGQFRPICLLNVEGKIFFTVVAQRLSAYLLVNNLIDTSVQKAGISGFSGCLEHCSMIWHQIKKAKMDGKDLHVIFLDLANAFGSVPHVLLWRAFDFFKVPECITRLVKVYFEDIKFYFCTKQYTTSWQRLGIGIMAGCTISPLAFTMAMEVLIRASRWVVGGMRLKDGPHLPPIRAYMDDMTLLTTTVPCTRRLLTKLNGNLKLAGLKIKPSKCRSLSVVKGKLSRENFQIDGEKIPSVAERPIKSLGRWYDSSFGDKEQVKRLREDVVLAINRIDKSFLPGKLKVWCLQFGLLPRIRWPLTIYEVCMSEVERLERVMSKAIRRWLGVPHCLSSVALYGNGVLELPLTSLVEEFKCAKVGLELTLSNSRDPVVRSVPVSLKKGRKWDPREAVAQAQTALEHRDVVGQVQVGRAGLGAGDRIKLWSKAKLPERRKMVIGFIREQEEEARRVTATSHGVQGRCLAWEHVEKRKISWRDLWAMDAGRIKFLIGATYDVLPTPQNLNRWVGTEPTCSLCGGVASLRHILSACKVSLSQGRYTWRHNEVLRSLACLLENKRVEVNSLPQYGRNKLISFVREGESVISHARGRGDTSFKWGEVRDWKLLADVGKQLQMPQCIAITALRPDIVLYSEGARIVYFIELTIPFEDSLEDAFERKKLKYTELAGEVRERGWQCVIRPVEIGTRGFVAKSTTSLLLEFGFRGQSLRAAIKGLSEVAERSSQWLWMRRHQGAWGKHT

SEQ ID NO: 974 - protein, 1164 aa, Scleropages formosus
MHPVQAIDTQILSIPQESARAGVKDDSLVDITVLDYGVNLTMSRGESTSTTTPSRGGLALQVCICGWRKVTSVRGLRIHQGKKKCLGGRGQGPCVDRYDLRSGSNKSGEVQGQVAHQRPQDINTSVLEEARPNMDAQGSIDHGEDAGQMISRRAGKERGRKLKVRWPGATDCKEWTSVNNDLRGILNGLKGTAESKLNQLGEIIYDYGEKRFGVFEKKHKGEQSRLKSRRQMEIERLVKERRHLKKLWKRADEEGRSGINILQEELKRRLVVLRRAEKLRLRRKKKEQARVAFFKDPFKFVKSLLEQEKSGCLDVPRRELESYLRGMHTDGESERVFEVPADIPPLGEIVVQMDVCPPRLKEVQEVVRRARAASAPGPNGVPYRVYKGAPDVLKFLWKQMVVVWKKGIIPKEWRRAGGVFIPKEKDAVDIGQFRPICLLNVEGKIFFTVVAQRLSAYLLVNNLIDTSVQKAGISGFSGCLEHCSMIWHQIKKAKMDGKDLHVIFLDLANAFGSVPHVLLWRAFDFFKVPECITRLVKVYFEDIKFYFCTKQYTTSWQRLGIGIMAGCTISPLAFTMAMEVLIRASRWVVGGMRLKDGPHLPPIRAYMDDMTLLTTTVPCTRRLLTKLNGNLKLAGLKIKPSKCRSLSVVKGKLSRENFQIDGEKIPSVAERPIKSLGRWYDSSFGDKEQVKRLREDVVLAINRIDKSFLPGKLKVWCLQFGLLPRIRWPLTIYEVCMSEVERLERVMSKAIRRWLGVPHCLSSVALYGNGVLELPLTSLVEEFKCAKVGLELTLSNSRDPVVRSVPVSLKKGRKWDPREAVAQAQTALEHRDVVGQVQVGRAGLGAGDRIKLWSKAKLPERRKMVIGFIREQEEEARRVTATSHGVQGRCLAWEHVEKRKISWRDLWAMDAGRIKFLIGATYDVLPTPQNLNRWVGTEPTCSLCGGVASLRHILSACKVSLSQGRYTWRHNEVLRSLACLLENKRVEVNSLPQYGRNKLISFVREGESVISHARGRGDTSFKWGEVRDWKLLADVGKQLQMPQCIAITALRPDIVLYSEGARIVYFIELTIPFEDSLEDAFERKKLKYTELAGEVRERGWQCVIRPVEIGTRGFVAKSTTSLLLEFGFRGQSLRAAIKGLSEVAERSSQWLWMRRHQGAWGKHT

SEQ ID NO: 975 - protein, 1164 aa, Scleropages formosus
MHPVQAIDTQILSIPQESARAGVKDDSLVDITVLDYGVNLTMSRGESTSTTTPSRGGLALQVCICGWRKVTSVRGLRIHQGKKKCLGGRGQGPCVDRYDLRSGSNKSGEVQGQVAHQRPQDINTSVLEEARPNMDAQGSIDHGEDAGQMISRRAGKERGRKLKVRWPGATDCKEWTSVNNDLRGILNGLKGTAESKLNQLGEIIYDYGEKRFGVFEKKHKGEQSRLKSRRQMEIERLVKERRHLKKLWKRADEEGRSGINILQEELKRRLVVLRRAEKLRLRRKKKEQARVAFFKDPFKFVKSLLEQEKSGCLDVPRRELESYLRGMHTDGESERVFEVPADIPPLGEIVVQMDVCPPRLKEVQEVVRRARAASAPGPNGVPYRVYKGAPDVLKFLWKQMVVVWKKGIIPKEWRRAGGVFIPKEKDAVDIGQFRPICLLNVEGKIFFTVVAQRLSAYLLVNNLIDTSVQKAGISGFSGCLEHCSMIWHQIKEAKMDGKDLHVIFLDLANAFGSVPHVLLWRAFDFFKVPECITRLVKVYFEDIKFYFCTKQYTTSWQRLGIGIMAGCTISPLAFTMAMEVLIRASRWVVGGMRLKDGPHLPPIRAYMDDMTLLTTTVPCTRRLLTKLNGNLKLAGLKIKPSKCRSLSVVKGKLSRENFQIDGEKIPSVAERPIKSLGRWYDSSFSDKEQVKRLREDVVLAINRIDKSFLPGKLKVWCLQFGLLPRIRWPLTIYEVCMSEVERLERVMSKTIRRWLGVPHCLSSVALYGNGVLELPLTSLVEEFKCAKVGLELTLSNSRDPVVRSVPVSLKKGRKWDPREAVAQAQTALEHRDVVGQVQVGRAGLGAGDRIKLWSKAKLPERRKMVIGFIREQEEEARRVTATSHGVQGRCLAWEHVEKRKISWRDLWAMDAGRIKFLIGATYDVLPTPQNLNRWVGTEPTCSLCGGVASLRHILSACKVSLSQGRYTWRHNEVLRSLACLLENKRVEVNSLPQYGRNKLISFVREGESVISHARGRGDTSFKWGEVRDWKLLADVGKQLQMPQCIAITALRPDIVLYSEGARIVYFIELTIPFEDSLEDAFERKKLKYTELAGEVRERGWQCVIRPVEIGTRGFVAKSTTSLLLEFGFRGQSLRAAIKGLSEVAERSSQWLWMRRHQGAWGKHT

SEQ ID NO: 976 - protein, 1169 aa, Scleropages formosus
MLPSQTSPLHTIDTQILSIPQESARAGVKDDSLVDITVLDYGVNLTMSRGESTSTTTPSRGGLALQVCICGWRKVTSVRGLRIHQGKKKCLGGRGQGPCVDRYDLRSGSNKSGEVQGQVAHQGPQDINTSVLEEARPNMDAQGSIDHGEDAGQMISRRAGKERGRKLKVRWPGATDCKEWTSVNNDLRGILNGLKGTAESKLNQLGEIIYDYGEKRFGVFEKKHKGEQSRLKSRRQMEIERLVKERRHLKKLWKRADEEGRSGINILQEELKRRLVVLRRAEKLRLRRKKKEQARVAFFKDPFKFVKSLLEQEKSGCLDVPRRELESYLRGMHTDGESERVFEVPADIPPLGEIVVQMDVCPPRLKEVQEVVRRARAASAPGPNGVPYRVYKGAPDVLKFLWKQMVVVWKKGIIPKEWRRAGGVFIPKEKDAVDIGQFRPICLLNVEGKIFFTVVAQRLSAYLLVNNLIDTSVQKAGISGFSGCLEHCSMIWHQIKEAKMDGKDLHVIFLDLANAFGSVPHVLLWRAFDFFKVPECITRLVKVYFEDIKFYFCTKQYTTSWQRLGIGIMAGCTISPLAFTMAMEVLIRASRWVVGGMRLKDGPHLPPIRAYMDDMTLLTTTVPCTRRLLTKLNGNLKLAGLKIKPSKCRSLSVVKGKLSRENFQIDGEKIPSVAERPIKSLGRWYDSSFSDKEQVKRLREDVVLAINRIDKSFLPGKLKVWCLQFGLLPRIRWPLTIYEVCMSEVERLERVMSKTIRRWLGVPHCLSSVALYGNGVLELPLTSLVEEFKCAKVGLELTLSNSRDPVVRSVPVSLKKGRKWDPREAVAQAQTALEHRDVVGQVQVGRAGLGAGDRIKLWSKAKLPERRKMVIGFIREQEEEARRVTATSHGVQGRCLAWEHVEKRKISWRDLWAMDAGRIKFLIGATYDVLPTPQNLNRWVGTEPTCSLCGGVASLRHILSACKVSLSQGRYTWRHNEVLRSLACLLENKRVEVNSLPQYGRNKLISFVREGESVISHARGRGDTSFKWGEVRDWKLLADVGKQLQMPQCIAITALRPDIVLYSEGARIVYFIELTIPFEDSLEDAFERKKLKYTELAGEVRERGWQCVIRPVEIGTRGFVAKSTTSLLLEFGFRGQSLRAAIKGLSEVAERSSQWLWMRRHQGAWGKHT

SEQ ID NO: 977 - protein, 1176 aa, Scleropages formosus
MLDPETLCPGDCQLGIHCNLLLSFNLCLTKLWLVKDDSLVDITVLDYGVNLTMSMGDSTSTTTPSRGGLALQVCICGWRKVTSVRGLRIHQGKKKCLGGRGQGPCVDRYDLRSGSNKSGEVQGQVAHQRPQDINTSVLEETRPNMDAQGSIDHGEDAGQMISRRAGKERCREQKLKVRWPGATDCKEWTSVNDLRGILNGLKGTAESKINQLGEIIYDYGEKRFGVYEKKRKGEQSRLKSRRQMEIERLVQERRHLKKLWKRADEEGRSGINILQEELKHKLVVLRRAEKLRLRRKKKEQARVAFFKDPFKFVKSLLEQEKSGCLDVPRRELESYLREMHTDGESERVFEVPADIPPVGEIVVQMDVCPPRLKEVQEVVRRARAASAPGPNGVPYRVYKGAPDVLKFLWKQMVVVWKKGIIPKERRRAGGVFIPKEKDAIDIGQFRPICLLNVEGKIFFSVVAQRLSAYLLVNNLIDTSVQKAGIAGFSGCLEHCSMIWHQMKEAKMEGKDFRVIFLDLANAFGSVPHVLLWRAFDFFKVPECITRLVKVYFEDIQFYFCTKQYTTSWQQLGIGIMAGCTISPLAFTMAMEVLIRASRWVVGGMRLKDGSHLPPIRAYMDDMTLLTTTVPCTRRLLKKLNGNLKLAGLKIKPSKCRSLSIVKGKLSRENFQIDGEKIPSVAERPIKSLGRWYDSSFSDKEQVKRLREDVVRAINRIDKSFLPGKLKVWCLQFGLLPRIRWPLTIYEVCMSEVERLERVMSKAIRRWLGVPHCLSSVALYGKGVLELPLTSLVEEFKCAKVGLELTLSSSRDPVVRSVPVSLKKGRKWDPRVAVAQAQTALEHRDVVGQVQVGRAGLGAGDRIKLWSKAKLPERRKMVIGFIRKQEEEARRVTATSHGVQGRCLAWEHVEKRKISWRDLWAMDAGRIKFLIGATYDVLPTPQNLNRWVGTELTCSLCGGIASLRHILSACKVSLSQGRYTWRHNEVLRSLACLLENKRVEVNSLPQYGRNKLISFVREGESAISHVRGRGDTSFKWGEVRDWKLVADVGKQLQMPQCIAITALRPDIVLYSEGARIVYFIELTIPFEDSLEDAFERKKLKYSELAGEVRERGWQCVIRPVEISTRGFVAKSTTSLLLEFGFRGQSLRAAVKGLSEVTERSSQWLWMRRHQGVWGKHT

SEQ ID NO: 978 - protein, 1033 aa, Eupelmus urozonus
MAFASKIGLGVHRRHRHLEVVNQDVQVDRLKRHWSDEEKRLMARVEAIAVRQGVRNINQHLMDNAGIGRTLESIKGARRAQAYKDLVVAAIEDLRAVPEAVPESPVEAAPMTGPDSNNDDALFSSTSSFHSASEEPSTIFEDSPPRRVSSDRVSHPRRWSGMYGGIAAAVERLCHVVTEVDGWETDRLTSVARAALEGRDASRQCQEWLSGVFPAPRPPRRGRLLPRADAQPVSRRRQRRREYAHVQDQLKKNMSRTAREILDGPSNSTVPNLLEMTEYWEPVLRQNSAPTPRPARPTARRDLLCTWLPVTCEEAAAVNIPGNSAPGIEGITARQWKGVPASVKALFFNIIMLTGGFSPGMLESRTVFLPKKVGSSTPSEFRPISIASVVVRHLHKVLAERLREVNLVDVRQRCLDDGCAENIAVLATVLDDARANLREVHIASLDFAKAYDSVSHEAISGVMEEAGLPQALVNYVTRAYENSATKLEVNGERSAPIKVQRGVRQGDPLSTVLFCLVVDRVLRGLPEEVGYEIGGNRVNALAYADDVFLVSSSKPGMGRLLTVAEGIAKTQGLALNATKCSAVSIVPAGKAKKYKVLTNPQFTLADGSRLPQLSPSQEWRYLGVDFRPIGPKRPGGTLRVELERLSRAPLKPQQRLTILRCFLVTRLYHRLVLAGATLKQLKALDRQVRAAVRVWLRLPKDIPNAYFHADCNDGGLGLPAMATTIPGCVLTRFKNLARSSSGAVRAVAGASWVLRRRAWAERVLHVEGERLYSREKRSKWWAKALHRSVDGKELRESVKTRLSTAWINAGSWAIPGRDYVQYHHVHVNCLPTRIRTSRGVRRAGRETACRAGCNATETAAHVIQACFRTHGGRVKRHDAVNKVLASGLRDKGWTIFEEPQIQTDVGMRKPDLVVCKEGRICVIDSQVVSGQQPLDAAHDRKLRKYSENTQVRTAVRSWRGGYYERVEFSTCTVSWRGVWSARSADFLLGLGLTKRLLAGITTRVLQGSHTNWTRWNQMTYREPRLPVERIGIG

SEQ ID NO: 979 - protein, 1910 aa, Caenorhabditis sp.
MSRITRDLSSSCKMTLKTDVNGTKNAEKRSVCDIILCKKDNNAVSKSVKDTAPEKLSNNETKNTETVSNGAPAQINPGLKGQPVQKSTVIKNQEESTAYRKNQSWVAKPTSNKNYPEVQTSTLIKNAVEETTIIKNRPLRGGARIGQSHLEEAMETVEEDGEEETLRIWVPHDGPLLCPHCTLYRTERKIGAEHLRGIKKHIFERHDRSAKFTYGCTVCGATKPAHKADACKWIQQHLKHEHNIHDVETVKYDSTRGKAAEALNACAPAFDLSKKDAKTTKPPEKPVKTMTDFFAKAVCSPAVTRAKAKLLAEAGASEPAKAEEKLNRGKRPATVDGEGSSAAKTPTSSPPAKKSFAEAVKSPEVVTIDDDDDEPSAEAKPRYNAWCLNHKVGKEAWIDGDTIMIFMKKRTVSNKAVGYLDPFENNKKRLELANMVTKKLEDPQTQMVLFPICWKSHWVLLAFKKAVVLFYDPLMHRMDSTLEELTSLLDIPVKQLMKVPKQADSWNCGVYVMLMAEALIQRKRWDPATAENDVQQFRDKFKEELREDYILYEEPYTSGEAPKAEETMDTSEKLQDDGWTTVGKKKPSKRSHEPNLSPPTKRVDKDGPESPRPGSSKEQHQESVSTSCPVPMDQGPSEEVKQKTLPSLLQMKIQSPVPRKKPAAGHGAKASAKPSQNVPDALLDKVRTWLDSQLDLFEKEGSNPSRFEWIADLLTAATYKAINGDIQTVHKMTARAPPPQLEPGDMATQTTRNPSEVKARPNGKVHTVTVEPMRIEYAKNRSKAFKKIIQEAEEKCSIPVKVVEEHFKATLKAEAVDAAAVRKICEQIPRVNVYKGITDPITAEEVKKTLEKLSDTSPGSDGLKYSCLRALDPSGERLARVYRICQKSRRVPSKWKESETILLPKPGTAEEKKLPENWRPISLMPTIYKVYSSIWNRRIVAVPNVISPVQRGFQSLDGTAESIGILRTAMDTATSLNRDLSVCWLDLTNAFGSVPHALIQESLAAFGFPKELIEIIGDFYEGASMQVKTETEKTGKLVIETGVKQGDPISPTLFNIALEGIIRRHLRRGISHKCLHSSIACLAFADDLAIMTDTKSDMQEALRQLDDDCKSVQLIFKPRKCASLHIQNGNVDQSRRMEVRSQKIQALSKADAYKYLGVKAGANGRQSEIATFEKVVKEMEKVHNTDLTPAQKLDAVKAFILPKLTHLYRNATPKLSELREFENVVFKAIKVMHHIPIRGSPTEYVQIPVKKGGLGVLSPKTTCLVAFLSTMMTKLWSQDKFIAKIHNDALSRIAAKALDLEKGASVEEICNFLNAKRLPTKIAYSVFSRLNEALRNLARIQGAPLHDMKFVEHNGTLAIAVQSTAKSPVKLLTSEAPLKLQMQLKESVREGLLYRFLQEKPVKSLVVQVIQQHPPSNAFVRDGRNTSIAVQKWIHRARLNLLVCNGNIYDKEQPRNCRRCNAEIESQMHILQLCRYQLPTGITERHDLVLNLILQEIRKGTKSKLELRVDTECGTGRDRPDIVLENRESGEVLIADVAIPYEAGTEAMQKAWDHKVQKYQHLVHYFRSQGKSASVLPLIVGSLGTYWSPTSKSLKELGLGEGQIKNLIPELCRVTSEASKNIYWRHIFGESYKLVDGLYCRDHRKEERVGDGETDSNVQVSNHFAKTLRRPENKKAESRRRKRNSRRETMTQPEERSTPEAASTEPSNSKCQSIAPATQEPQIREQRGSRSQRRYASAPQRQENSRSNSERSNRNQKRIQDWKAQENGKSSKSPRNRRKKKKQPPERSQSDQGVAVCQCGNIVIVRSKSEGDVATAPEPTTEIEGHRHARSKNRRGKASRNWNGVKRQMTMNDWLMKGDVPKMNRDRKAEEGGPDHIQQAEQRNQPKRSRNRKRSEPRVSWDRQVGRSQD

SEQ ID NO: 980 - protein, 1132 aa, Branchiostoma lanceolatum
MTEEYPQELPRGGAEESSVGTDLRTTTRTDLGPTIPGTTCICGKTCKNNRGLKIHQTKMGCLQKQRNLDQRSRPRGLGETEETQRQEANHSPQGIQGRGQHLAGTQGSSPVVRESVGRSSSEPRVEEAEEPRKGRVKWPQSNAERQWEQLDDDLESVLESVLAGSAERKLEAFVKVVYNMGLERYGEIELGKGRPQNNVPNRREREKQKIKKDLKALKKRWKKASHEEREALSSLREELRARLRSLSNAERTRKKRRQKEKKRAEFVSNPFRFTKKILGAKTSGRLTCSREEVESYLQKTHGDTERETPLADRPAEEFPDPEQPTREFDCSELKLAEVREVIRKARAGSAPGPSGIPYRVYKKCPKLTKRLWSLLKVVWRKKKVPQGWKRAEGVFCPKQENADRIEQFRTISLLSVEGKIFFAIVAKRLLEYMMANAYIDTSIQKGGVPGCSGCLEHTSILSQLIQEAKTGKKDLAVVWLDLENAYGSVPHQLIKVALEKYHVPATIRHLIEQYIDGLKIRFTVNGHTTSWQCLQKGIITGCTISVILFVTAMNLLMKPALSQARGPKTNSGIRQPPLKAFMDDLTVTTESVISAKYMLRSLSNAASWTRMKFKAKKCRKLVMRRGKVCDRIQLEIQGEKVPNIAEQPIKSLGKKFDATLGDKNNVEEFKQLVRRGLEAIENSELPARYKVWCYQHGLLPRAVWPMSLYEIPLTAVEEVERLVSRHLRKWLGVPPALTNIGLYSKSSKLQLPLTSIEEEFKVAKARAQVMLQESRDEKISQAGIRLRSGRKWAAAEAVSEATSRLRHKDIVGVVAQGRRGLGAGKEGSQSWGKANPRQRREMIQKEVRQREEENRRARAVGQGVQGAWTRWECIRERRVMWKELLFREPLKTRFLLKSVYDLLPTAANLMRWGKREEDKCELCGKRGNLSHILTSCQVALSRGRYTWRHNQVLKAIVSAVEERMKVKGRKQGPFINFVREGEKGKTKGKQREQLGILASASDWMLQADVGKQLEFPTDIVATNLRPDLLLISRKTTQLVILELTVPWEDRIEEAHERKLMKYQEIVKSAKEKGWKAQYFPVEVGCRGFIGQSLWKALGALGVVGKKRREVTRKIAETATDSSYWVWAQRSKN

SEQ ID NO: 981 - protein, 1167 aa, Branchiostoma lanceolatum
MTEEYPQELPRGGAEESSVGTDLRTTTRTDLGPTIPGTTCICGKTCKNNRGLKIHQTKMGCLQKQRNLDQRSRPRGLGETEETQRQEANHSPQGIQGRGQHLAGTQGSSPVVRESVGRSSSEPRVEEAEEPRKGRVKWPQSNAERQWEQLDDDLESVLESVLAGSAERKLEAFVKVVYNMGLEKYGEIELGKGRPQNNVPNRRVREKQKIKKDLKALKKRWKKASHEERDALSSLREELRARLRSLSYAERTRKKRRQKEKKRAEFVSNPFRFTKKILGAKTSGRLTCSREEVESYLQKTHGDTERETPLADRPAEEFPDPEQPTREFDCSELKLAEVREVIRKARAGSAPGPSGIPYRVYKKCPKLTKRLWSLLKVVWRKKKVPQGWKRAEGVFCPKQENADRIEQFRTISLLSEEGKIFFAIVAKRLLEYMTANAYIDTSIQKGGVPGCSGCLEHTSILSQLIQEAKTGKKDLAVVWLDLENAYGSVPHQLIKVALEKYHVPATIRHLIEQYIDGLKIRFTVNGHTTSWQCLQKGIITGCTISVILFVTAMNLLMKPALSQARGPKTNSGIRQPPLKAFMDDLTVTTESVISAKYMLRNLSNAASWSRMKFKAKKCRKLVMRKGKVCDRIQLEIQGEKVPNIAEQPIKSLGKKFDATLGDKNNVEEFKQLVRRGLEAIENSELPARYKVWCYQHGLLPRAVWPMSLYEIPLTAVEEVERLVSRHLRKWLGVPPALTNIGLYSKSSKLQLPLTSIEEEFKVAKARAQVMLQESRDEKISQAGIRLRSGRKWAAAEAVSEATSRLRHKDIVGVVAQGRRGLGAGKEGSQSWGKANPRQRREMIQKEVRQREEENRRARAVGQGVQGAWTRWECIRERRVMWKELLFREPLKTRFLLKSVYDLLPTAANLMRWGKREEDKCELCGKRGNLSHILTSCQVALSRGRYTWRHNQVLKAIVSAVEERMKVKGRKQGPFINFVREGEKGKTKGKQREQLGILASASDWMLQADVGKQLEFPTDIVATNLRPDLLLISRKTTQLVILELTVPWEDRIEEAHERKLMKYQEIVKSAKEKGWKAQYFPVEVARMPWFYRTVPVEGSGRSRSSRKGKKRSDQKDSRDSHRLILLGMGTEVQELGTPVEQRPASAVAPPPGGVLLVGAKLRGRTESS

SEQ ID NO: 982 - protein, 1113 aa, unidentified
MGCRKKASNLEQRTSPQGLGETEEAQSRDENHSSQGILVRGRRPVSTQRISPEEEALLNQSRGEATADEAGQNQEEARAEETGQSQEEARAEETGQSQEEARADEADEPRKARVKWPPSNAERQWEQLDDDLEGILEGTLAGGVERKLEAFVKIVYNVGLERFGEMEIGKGRPQCKQPNRREREKQKIRKDLKALRKRWRKASLEERDALSALQEELRARLRSLSKAERTRKKRRQKEKKRAEFVSNPFRFTKKLLGAKTSGRLTCSREDVESYLQKTHGDSERETPLQERPPEEFPDPRQPIRELDCSELKLAEVKEVIRKARAGSAPGPSGIPYRVYKKCPKLTRRLWSLLKVVWRKKKVPQEWKKAEGVFCPKQEKAVNIEQFRTISLLSVEAKIFFAIVAKRLLEYMMSNDYIDTSIQKGGVPGCSGCLEHTSILSQLIQEAKSGKKDLAVVWLDLENAYGSVPHQLIKVALEKYYVPAPVRHLIEQYMNGLKIRFTVNGHTTAWQSLQKGIITGCTISVILFVSAMNLVMKPALTQARGPKTESGIRQPPLKAFMDDLTVTTESVISARHMLKSLSKAASWARMKFKAKKCRKLVLRKGKVCDRVQLEVQGERVPNIADQPIKSLGKKFDATLGDKNNVKDFKLLVREGLKAIENSDLPGRYKVWCYQYGLLPRTVWPMSMYNIPLTVVEEVERAVSRHLRKWLGVPPGLTSVGLYSKSAKLQLPLSSMGEEFKVTKARAQVMLQQSRDEKVSQAGIELRSGRKWTATEAVSNAASRLRHKDIVGIIAQGRRGLGAEREGSQTWGKAGPKERREMIQKEVRQREEELRRARAVGQGVQGAWTKWEGVRERRIAWKELFREPLKTAFLLKSVYDLLPTAVNLKRWGKRDEDRCVLCGKKGNLSHILSSCQVALSRGRYTWRHNQVLKVIVNALEEVRAENKGRPGKRIQPISFVREGEKVKSIEKRHRDQPGIMTTANDWVIQADIGKQLEFPKDIITTNLRPDIIMYSRRTKQLVLVELTVPWEDRVEEAQERKLQKYQELVTNCRERGWKTRNCPVEVGCRGFIAESMWRTLGFLGVVGKKRRDLTRKITETTQEASYWVWKQRESN

SEQ ID NO: 983 - protein, 856 aa, Branchiostoma belcheri
MSGRLTCSKEEAESYLQKTHGDVEREVPLEDRPKDEFPDPEQPTRELDCSELKLAEVKDVIRKARAGAAPGPSGIIYRIYKKCPRLTRRLWSLLKVVWRKKKLPQGWKKAEGVFCPKQENAKGIEQFRTISLLSVEGKIFFAVLAKRLLKYMMDNNYIDTSIQKGGVPGCSGCLEHTSILSQLIQEAKAGKEDLAIVWLDLQNAYGSVPHQLIKVALEKYYVPEPVRLLIEQYMDGLMIRFTVNGYTTSWQRLQKGIITGCTISVILFVAAMNLVMKPALGQARGPKTDSGIRQRPLKAFMDDLTVTTESVISARYVLRSLSKAASWARMKFKAKKCRKLVMRRGKICDKLQLEVQGERIPAIAEQPIKSLGKKFDVTLSDKKNIEEFKQQMRDGLEAIENSELPGRYKVWCNQYGLLPRAVWPMTMYDIPLTVVEEVERRVSRHLRKWLGVPPGLTSIGLYSKTAKLQLPLTSMEEEYKVTKARAQLMLQESRDELVSQAGVRLRSGKKWAAAEAVASATSRLKHRDIVGVVAQGRRGFGAGREGTQRWGTASPRERRELIQKEVRQQEVRRSRAVSQGVQGAWTRWEGVRERKVMWNELMYSEPSKIRFLLKSVYDLLPTAANLKRWRKKDEDKCELCGKTGNLSHVLTSCPVALGKGRYTWRHNQVLKVIASAVEEQMTENKVKGKQRKGLQFISFVKEGWKGKSKEKKERERIGIIASASDWSLHADLGKQLAFPADIIDTNLRPDLILFSRKTTQVVLIELTVPWEDRMEEANERKRMKYQEPVSRCREKGWKTWYFPVEVGCRGFIGQTLWKALGQLGVAGKKRREVTKRVTKTTVDASLWVWTLRNTTQ

SEQ ID NO: 984 - protein, 1056 aa, Cecidostiba semifascia
MGSQREPLGLPTPPVQPLPGPNPQNQASDDNTSRRPSRRPTPGTSPNRPTDGIGVVCEFPGCGATFTTTTGRGLHHRKAHKAWYDARAIQGKGGGKARWTEEEKALLANREAEIIRADSSANVNQQLHLSFPHRTLEAIKGQRRKEEHRARVQSYLSQSAPQAVAHQTINRPASTTSPRLEEPPVSPPSAQADGSGRILEYLRNLPQLPGSAGYQGERLQGLLLRASTSSKADIFEGLSNYLRDVLPSSNQRPPPQNPPRRPTTLSRRRERRRQYAATQRHWRSNRARCINSILSNVEDAEQPPRELMEPYWTAVLTREASNTSPPCVARPTIESIWEPITAEDIRDARPHLSVSPGPDGLTARQLRAIPLSILVRILNLILFCGKLPRHLSRSITIYIPKKSKSRLPEDFRPISIPSVLARLFHKILAKRIDATVSLDEHQRAFRAGIDGCRDNTTLLDALLRSRYTTIRSLHMAILDMAKAFDSVEHSAILAAIKAAGLPSSMCDYLYDLYAHSTTILSGSNWQSPPIKVTRGVKQGDPLSPVMFNIVMDHLLRSLPAECGASFNGQRMRAMAFADDLILLADTPTGLQHLINHTTTYLESCGLTLNNNKCSTISLEALGKQKKTVVDAGRSFNVKGQPIKSLSREDTWTYLGVDFTAEGRKTTSLTSLLSPLLERVTRAPLKPQQRIFALKTAVLPRLYYHMALGKITVSALVGVDKMVRAFVRQWLKLPNDTPTGYFHAPVGEGGLGIPSTRWLAPLHRRDRLLGLVPRRDPANIVDPYLAKEVAQCDRRLTDGRTSLQTEDDVKKRWAALLHGTIEGAALKNSRQVTGQHQWVTDGTALLSGRDYINCQKVRTGSLPTRSRTTRGRRGDRLCRAGCMLPETNNHVLQVCHRTHGARIDRHNAALSYICRNLRRQGFSIEEEPRLKTPSGTLKPDVIATMGQLGLVIDAQICGEQSDLPRARKKKIEKYDTPEVSAAITELTGANNIRHLPVILSWRGIWCQRSANDLLALGTLNRRDLAVVSTRVLIGGVIAHRIFAKSTATKPSHRLHPP

SEQ ID NO: 985 - protein, 795 aa, Philotrypesis tridentata
MRKREYATTQRHWRRNRRRCIDSILSSVEDSELPPQNIMEPYWTAVLTREATNTSPPCEQRPILHSIWQPITADEIRDSRPSLRVSPGPDGLTARQARAIPLSILVRVFNLILVCGKLPRHLSRSTTIFIPKKSTSRSPGDFRPISIPSILARIFHKILAKRVEQAVVLDEHQRAFRAGIDGCRDNIVLLDALLRSRFTSIRPLNMAVLDMAKAFDSVEHSAIAAAIKAAGLPPPMCAYMLDLYENSTTTLSGTGWQSPPIKVTRGVKQGDPLSPVVFNIVMDHLLRSLPAECGSTFNGRKLRAMAFADDLILLSETPTGLQHLIDHTSSFLNSCGLTLNNNKCSTISIVALGKQKKTVVDERRIFTIQGQPIRALSRQDTWTYLGVEFSAEGRRTSRLASQLNPLLERLTKAPLKPQQRIFALKTTALPRVFYHMALGKITVSALVGVDKMVRGYVRQWLKLPNDTPTGVFHAPIGEGGLGVASLRWLAPLHRRDRLLGLVPGRDPANIADDYLAREMAQCEKRLIDGSTSIRTEDDIRKRWAKLLHSKIEGASLRNSSQVTGQHQWISDGTALLTGRDYISCHKVRTGSLPTLSRTSRGRRGDRLCRAGCMTPETNNHVLQVCHRTHDARIDRHNAVINFACRSLRRQGFDIDLEPHITTTDGLRKPDIVATMGTLGVVLDAQVCSEQSDLDRARRQKIAKYNTPEIHAAITQRTGATNIRHLPIILSWRGIWCRQSATDLLSLGTFNRRDLAVVSTRVLIGGAVAFRTFSRTTASGPPSIRPPNLVLPAIQA

SEQ ID NO: 986 - protein, 980 aa, Muscidifurax raptorellus
MHKTWYDKREIGNRQVSKARWTEEEIGLLASREAEILRENPSAPKINQLLLASFPHRTLEAIKGQRRKQDYRARVQSRLSHSAPPAVALTTSNRPASTSSPRMEEPPVSAPASTGNHGRILEFLRSLPPIPDSVGYNRERLQGLLLRASPSSHLDVFEGLSNYLKETFPPPAARQSSNPPSCLRVSLSRRKERRREYAVTQRHWRGNRARCINSILSSIESSLQPSRDLMEPYWKTVFTREASITSPTCITRPTVDSIWDPITADEIRTARPHLSVSPGPDGLTARQLRAVPLSILTRILNLILFCGKLPRHLLSSNTIFIPKKSLSRQPGDFRPISIPSILTRLLHKILARRIDAAIELDNTQRAFRAGVDGCRDNIMLLDAILRSRYESIQHLNMAILDMAKAFDSVEHSAILAALRAAGLPPQMCDYLQDLYANATTTLSGQNWRSAPLKVTRGVKQGDPLSPVVFNIIMDHLLRSLPPECGATFNGHQVRAMAFADDLVLLANTPVGLQHLLDHTAAFLHTCGLTLNNSKCSTISIVALGKQKKAVVDEVRTFNILGQPIKALSRDSTWNYLGVEFSAEGRKSSPSLSSVLSPLLERLTKAPLKPQQRIFALKNFALPKVYYQMALGKIPVSSLLRADKMVRAFVRQWLKLPNDTSIGYFHAPVGEGGLGIPSIRWLAPLHRRNRLLGLAFQRDPANITDPYLVREFAQCVKRLTDRGTPLLSEHQIKSRWADLLHNSIEGAALRNSRQVPGQHQWVSDGTALLSGRDFIQCQRVRSGSLPSKSRTTRGRHGDRLCRAGCILPETANHIIQVCHRTHGARIQRHDAVLHYIGRNLRRQGFDVTEEPTYATPSGTFKPDIVATMGSLGIVLDAQICSEQSDLSRARTNKINKYDTPELTTAITTRTGATNIRHLPVILSWRGLWCQRSANDLLALGTLSRRDLAVVSTRTLIGGAIIHRMFSTSTAVGEPGYRRHPP

SEQ ID NO: 987 - protein, 1008 aa, Androctonus mauritanicus
MLGIVADIEAQIAFRFEVEGGYCPNINELIIAGLREAGRAFSLEQIKNVRRDRKIGTNIKYRQLLEARMTNLREAAQVVDESGGEESDNSTEDSFRSANSTFAALSDSGSDDIEHGPAAGDAPGPIGGYVTEVRSLLERTQQLDGPVEMLLNGIAERFLQGEDVSDDLCAWVGEVAKRGKQHKQHRRPAKSTPARRKRADKRRSTAPRIPSRKQRRRREFAKLQTVWRKSMSKAAKLVLDGEIKATPPSLDEMTRHWEPVLTAPSVEVKAPVPSPKPEFQWLQDPVKEREVDRVVIPLDSAAGVDKMTFRTWRTVNSATRTLFFNMVLARGAFPTPLLISRTVFVPKKSRSATPADFRPISVANVVVRHLHKILARRMLRTNVVDFRQRGLADGCAENIAVLASVLADARAKRKDLHLVATDIAKAFDSASHHAIKAILTEIGFPELLVDYIMTFYEESTTVLEVGKERSHTIKVRQGVRQGDPMSSIIFALLMDKIIRRVPKHLGYRLGDVNINELLYADDELKFSSSEVGMQQSLLTTEAEANKAGFHFNPGKCLALSFKNAGKCKKIKVITNTTFHLASGKKIRALKPSESFTYLGVEFNSMGVEKPGRTLEKDLENITKAPLKPQQRIKVLRTFLIPRFYHKLVLTRCTKKLLRALDRQVSDALRRWLHLPKDTPVAYFHTACKDGGLGIPSFQTAIPGMMFDRLSRLQHSDSPITVAASETEFVQKRLAWAEMALQRGDQSLTDKSARDDYWRERLYGSTDGKDLRESRKASSSTSWIDQRSQQIPGRDYVQFHRVHINALPTRIRTSRGRRTGDRPVTCRAGCPDTETNYHVVQTCFRTQGGRQLRHDAVVQKITKSLRDKRWQVSEEPRLHTDEGLRKPDMVAAREGRLVVVDVQIVGGSDPGELRRQKIAKYKSPTVLRSLSERFNTPVEMIEIDSCTMTWKGVWASGSEKLLLGMGLSKKFLAGLTTRVLQGSHTNAVRWTQIPITYGGYIRRVRSGVG

SEQ ID NO: 988 - protein, 1214 aa, Teleogryllus occipitalis
METRQKKKASEQVPLPEERRGTSGATAGGDSERAGGDQVLSRRVLVGTPEEETAEITRDDQMLQVSPAESVLPVSQPTTTAAGRIRQRIQWTSEMNRDVIRCYMRSTKAGTDTTAYRQEMYRHFIELYPDMISKVTKNNLADRRNAIIRLNLLSPLEIADIKNSVLTELCLTSSNPPRPLRGTDTLAQQNLELNEGLTERPPLSVETPSNLGGENDTSMHELKEKLKTNLIQFLGLDPLVRQNIPKPKFSHIFWQQLNYLNENVLPDLIPECNDITDVYHLIYCSAHTIANPPRRPTNNWNEQRQRKDNREPAWKRRIEKRIGDIRQKLGRLTQYRRGIRTKALKRKVSNIIKPRSLDHLNDNDILEIIDNYTQKLNVYCHRLRRYMTSLKRKQQNRKFLEERKFYRGLSQKPVSFSNGTPTIESITNFWSDIWENGKIHNTTTPVLLEEKRRSQNLSEMLSTNISTEEIKKAICRMSNWKSPGPDGIHVFWLKYFTSVHEKLAECYNSLLHQPDTAPAFLTTGKTLLLPKTEETTNPANYRPITCLSVFYKCLTKIITDKINEHLENCNIMTEEQKGCYKHSKGCKEQVIIDSVITHQSTKANRNLSFTYIDYQKAFDSVPHSYLIEIMQMYRVDATLIQFFQETMNKWKTVLQLTTPEVKLTSRTIQIKRGIFQGDSFSPLWFCMALNPLSRALNETKYGFKIKSSKGSHTISHLLYIDDMKMYANSPTQLHKMLDITTKFSNDIHMSFGLSKCKSLHLTKGKITQTSGFDTGKGVIEDLTAEELYKYLGFQQLRGINDTLIKEKTSTEVMRRVETVLKTHLHRRNKVKAINTFAIPVLGYTFGVVKWSKTDLENIERQIRVKITKHRMRHPKSAIERVTLPPCKGGMGITSVFQLHWKQIQDLREYFHSKQDKHMYKILCSADVNITPLKLQNQNQDLENTWQSMEEKILSWKQKSLHGSYPHQLEDTNVDSIFSHLWLTAGNLYGETAGFMMAIQDRVISTRNYRKYILKETLNDKCRLCSTETETIEHITGACKILAGTEYLRRHNNFAKIVHQSLAVKEHLSVENVPYYQYQPPTVLENESMKMYWDREIRTDKTITANRPDIIVLNKITKDVTIIDITVPLSHNLHSAYTNKVTKYQELAEEIKKIWKVKKVQIRPLTISTTGIIPKSLIKHLQELNIKHILATVQKAVILDTCHIVRKTVTDVSDM

SEQ ID NO: 989 - protein, 1096 aa, Teleogryllus occipitalis
METRQKKKASEQVPLPEERRGTSGATAGGDSERAGGDQVLSRRVLVGTPEEETAEITRDDQMLQVSPAESVLPVSQPTTTAAGRIRQRIQWTSEMNRDVIRCYMRSTKAGTDTTAYRQEMYRHFIELYPDMISKVTKNNLADRRNAIIRLNLLSPLEIADIKNSVLTELCLTSSNPPRPLRGTDTLAQQNLELNEGLTERPPLSVETPSNLGGENDTSMHELKEKLKTNLIQFLGLDPLVRQNIPKPKFSHILWQQLNYLNENVLPDLIPECNDITDVYHLIYCSAHTIANPPRRPTNNWNEQRQRKDNREPAWKRRIEKRIGDIRQKLGRLTQYRRGIRTKALKRKVSNIIKPRSLDHLNDNDILEIIDNYTQKLNVYCHRLRRYMTSLKRKQHNRKFLEERKFYRGLSQKPVSFSNGTPTIESITNFWSDIWENGKIHNITTPVLLEEKRRSQNLSEMLSTNISTEEIKKAICRMSNWKSPGPDGIHVFWLKYFTSVHEKLAECYNSLLHQPDTAPAFLTTGKTLLLPKTEETTNPANYRPITCLSVFYKCLTKIITDKINEHLENCNIMTEEQKGCYKHSKGCKEQVIIDSVITHQSTKANRNLSFTYIDYQKAFDSVPHSYLIEIMQMYRVDATLIQFFQETMNKWKTVLQLTTPEVKLTSRTIQIKRGIFQGDSFSPLWFCMALNPLSRALNETKYGFKIKSSNGSHTISHLLYIDDMKMYANSPTQLHKMLDITTKFSNDIHMSFGLSKCKSLHLTKGKITQTSGFDTGKGVIEDLTAEELYKYLGFQQLRGINDTLIKEKTSTEVMRRVETVLKTHLHRRNKVKAINTFAIPVLGYTFGVVKWSKTDLENIERQIRVKITKHRMRHPKSAIERVTLPPCKGGMGITSVLQLHWKQIQDLREYFHSKQDKHMYEILCSADVNITPLKLQNQNQDLENTWQSMEEKILSWKQKSLHGSYPHQLEDTNVNSIFSHLWLTAGNLYGETAGFMMAIQDRVISTRNYRKYILKETLNDKCRLCSTETETIEHITGACKILTGTEYLRRHNNFAKIVHQSLAVKEHLSVENVPYYQYTSENVPYYTNLPPSWKMNP

SEQ ID NO: 990 - protein, 1213 aa, Teleogryllus occipitalis
METRQKKKASEQVPLPEERRGTSGATAGGDSKQAGGDQVLSRRVLVGTPEEETAEITRDDQMLQVSPAESVLPVSQPTTTAAGRIRQRIQWTSEMNRDVIRCYMRSTKAGTDTTAYRQEMHRHFIELYPDMISKVTKNNLADRRNAIIRLNLLSPLEIADIKNSVLTELCLTSSNPPRPLRGTDTLAQQNLELNEGLTEHPPLSAETPSNLGGENDTSMHELKEKLKTNLIQFLGLDPLVRQNIPKPKFSHIFWQQLNYLNENVLPDLIPECNDITDVYHLIYCSAHTIANPPRRPTNNWNEQRQRKDNREPAWKRRIEKRIGDIRQKLGRLTQYRRGIRTKALKRKVSNIIKPRSLDHLNDNDILEIIDNYTQKLNVYCHRLRRYMTSLKRKQQNRKFLEERKFYRGLSQKPVSFSNGTPTIESITNFWSDIWENGKIPNTTTPVLLEEKRRSQNLSEMLSTNISTEEIKKAICRMSNWKSPGPDGIHIFWLKYFTSVHEKLAECYNSLLHQPDTAPAFLTTGKTLLLPKTEETTNPANYRPITCLSVFYKCLTKIITDKINEHLEKCNIMTEEQKGCYKHSKGCKEQVIIDSVITHQSTKGNRNLSFTYIDYQKAFDSVPHSYLIEIMQMYRVDATLIQFFQETMNKWTTVLQLTTPEVKLTSRTIQIKRGIFQGDSFSPLWFCMALNPLSRALNETKYGFKIKSSKGSHTISHLLYIDDMKMYANSPTQLHKMLDITTKFSNDIHMSFGLSKCKSLHLTKGKITQTSGFDTGKGVIEDLTAEELYKYLGFQQLRGINDTLIKEKTSTEVMRRVETVLKTHLHRRNKVKAINTFAIPVLGYTFGVVKWSKTDLENIERQIRVKITKHRMRHPKSAIERVTLPPCKGGMGITSVLQLHWKQIQDLREYFHSKQDKHIYEILCSADVNITPLKLQNQNQNLENTWQSMEEKILSWKQKSLHGSYPHQLEDTNVDSIFSHLWLTAGNLYGETAGFMMAIQDRVISTRNYRKYILKETLNDKCRLCSTETETIEHITGACKILAGTEYLRRHNNFAKIVHQSLAVKEHLSVENVPYYQYQPPAVLENESMKMYWDREIRTDKTITANRPDIIVLNKITKDVTIIDITVPLSHNLHSAYTNKVTKYQELAEEIKKIWKVKKVQIRPLTISTTGIPKSLIKHLQELNIKHILATVQKAVILDTCHIVRKTVTDVSDM

SEQ ID NO: 991 - protein, 1083 aa, Teleogryllus occipitalis
MISKVTKNNLADRRNAIIRLNLLSPLEIADIKNSVLTELCLTSSNPPRPLRGTDTLAQQNLELNEGLTEHPPLSAETPSNLGGENDTSMHELKEKLKTNLIQFLGLDPLVRQNIPKPKFSHIFWQQLNYLNENVLPDLIPECNDITDVYHLIYCSAHTIANPPRRPTNNWNEQRQRKDNREPAWKRRIEKRIGDIRQKLGRLTQYRRGIRTKALKRKVSNIIKPRSLDHLNDNDILEIIDNYTQKLNVYCHRLRRYMTSLKRKQHNRKFLEERKFYRGLSQKPVSFSNGTPTIESITNFWSDIWENGKIHNTTTPVLLEEKRRSQNLSEMLSTNISTEEIKKAICRMSNWKSPGPDGIHVFWLKYFTSVHEKLAECYNSLLHQPDTAPAFLTTGKTLLLPKTEETTNPANYRPITCLSVFYKCLTKIITDKINEHLEKCNIMTEEQKGCYKHSKGCKEQVIIDSVITHQSTKGNRNLSFTYIDYQKAFDSVPHSYLIEIMQMYRVDATLIQFFQETMNKWTTVLQLTTPEVKLTSRTIQIKRGIFQGDSFSPLWFCMALNPLSRALNETKYGFKIKSSKGSHTISHLLYIDDMKMYANSPTQLHKMLDITTKFSNDIHMSFGLSKCKSLHLTKGKITQTSGFDTGKGVIEDLTAEELYKYLGFQQLRGINDTLIKEKTSTEVMRRVETVLKTHLHRRNKVKAINTFAIPVLGYTFGVVKWSKTDLENIERQIRVKITKHRMRHPKSAIERVTLPPCKGGMGITSVLQLHWKQIQDLREYFHSKQDKHMYEILCSADVNITPLKLQNQNQDLENTWQSMEEKILSWKQKSLHGSYPHQLEDTNVDSIFSHLWLTAGNLYGETAGFMMAIQDRVISTRNYRKYILKETLNDKCRLCSTETETIEHITGACKILAGTEYLRRHNFAKIVHQSLAVKEHLSVENVPYYQYQPPAVLENESMKMYWDREIGTDKTITANRPDIIVLNKITKDVTIIDITVPLWHNLHSAYTNKVTKYQELAEEIKKIWKVKKVQIRPLTISTTGIIPKSLIKHLQELNIKHIVATVQKAVILDTCHIVRKTVTDVSDV

SEQ ID NO: 992 - protein, 1061 aa, Actinia equina
MVNSSFLLILITGIVCSFCGQDFVSLGRHAWRCKQRVQQDDQPQQQNHGQQTHYNNSSATETSATTVKCCCGKVCKGNRGLKMHQRSCRVISGLDDELRADLTNTVQHENDEDEQDHNNLFINSDEDIFPNIKVGVNLPKSDDQWLTANEYFKTVLHLNSPITLEDLNSCIKLLNDTIYDYFSENFGHAKKAVNEELIKKYKDKTTKELKKTLRILKRSKADLIEIKYVSRLLRDLLQNNSKQEQDTSSFIDHDNLINKNFWGYVKKIFESKETILPTFSMTKCVDFFKKTLSSANPTKLFHLPNWIPALNNPVTPFNLDPPTYEQITHVIRRMKTSGSPCPLDQLSIICFKRCPYLRTYLAEIIRTVWSSGSVPSEWKRACTILIHKKGDSGDPANFRPITLQSIPLKVFTSCLRNSIFNFLVTNNLIEHDIQKGFTPGLSGTLEHTSQMADIINKARTKQRSLVITLLDLKNAFGEVHHNLIQSVLDYHHIPDHIKLLINSLYTDFKTSIITQEFSTPFIAIGRGVLQGDCLSPLLFNLCFNTFIQHIKSEKYRQFGFSYKLLNPLHWFQFADDAAVISSQESENQHLLNRFAIWCQWASMIIRVDKCCTFGIRKSCTKSIQYLPKLLINSVLVPRVNIGESFRYLGRFFDFDMSNDQHRSEVTSTVGSMMSDIDMKPLHPKNKLLLYGRYVLSKISWHLTVADLGKTWISENLDPLVNQYLRRWLEIPISGTLSNTYLPRNKFGLNIIPPSVKFIQCQTVTRKALRSSKSSDIKYLWKSSSNSSMIQYDVFRSTKEVLKSFRSTQEEKLTHHLLSQGSFFTNIMKFSLSSLHSIWSTAHANLPKNIFNFTIRYINNSLPTRTNLAKWGLSAISECSYCGSSESLCHVVAGCQYYLPRFTWRHDSILNFLAASLLSKLDKSSLYADIEGYTSPSLITGDAHRPDLLIKTLDCLFILELTVGFETNLKNNVDRKYKKYKNIIRKLSSVFKSVKFVNLSISSVGVFSAESSTFLEMFDQLGYEKKHKMYIIRKIINIAIRSTYFIFCKRNKDWENPDLMNF

SEQ ID NO: 993 - protein, 781 aa, Actinia equina
MTKCVDFFKKTLSSANPTKLFHLPNWIPALNNPVTPFNLDPPTYEQITHVIRRMKTSGSPCPLDQLSIICFKRCPYLRTYLAEIIRTVWSSGSVPSEWKRACTILIHKKGDSGDPANFRPITLQSIPLKVFTSCLRNSIFNFLVTNNLIEHDIQKGFTPGLSGTLEHTSQMADIINKARTKQRSLVITLLDLKNAFGEVHHNLIQSVLDYHHIPDHIKLLINSLYTDFKTSIITQEFSTPFIAIGRGVLQGDCLSPLLFNLCFNTFIQHIKSEKYRQFGFSYKLLNPLHWFQFADDAAVISSQESENQHLLNRFAIWCQWASMIIRVDKCCTFGIRKSCTKSIQYLPKLLINSVLVPRVNIGESFRYLGRFFDFDMSNDQHRSEVTSTVGSMMSDIDMKPLHPKNKLLLYGRYVLSKISWHLTVADLGKTWISENLDPLVNQYLRRWLEIPISGTLSNTYLPRNKFGLNIIPPSVKFIQCQTVTRKALKSSKSSDIKYLWKSSSNSSMIQYDVFRSTKEVLKSFRSTQEEKLTHHLLSQGSFFTNIMKYSLSSLHSIWSTAHANLPKNIFNFTIRYINNSLPTRTNLAKWGLSAISECSYCGSSESLCHVVAGCQYYLPRFTWRHDSILNFLAASLLSKLDKSSLYADIEGYTSPSLITGDAHRPDLLIKTLDCLFILELTVGFESNLKNNVDRKYKKYENIIRKLSSDFKSVKFVNLSISSVGVFSAESSTFLEMFDQLGYEKKHKMYIIRKIINIAIRSTYFIFCRRNKDWENPDLMNF

SEQ ID NO: 994 - protein, 1061 aa, Actinia equina
MVNSSFLSILITGIVCSFCGQDFVSLGRHAWRCKQRVQQDDQPQQQNHGQQTHDNNSSATETSATTVKCCCGKVCKGNRGLKMHQRSCRVISGLDDELRADLTNTVQHENDEDEQDHNNLFINSDEDIFPNIKVGVNLPKSDDQWLTANEYFKTVLHLNSPITLEDLNSCIKLLNDTIYDYFSENFGHAKKAVNEELIKKYKDKTTKKLKKTLRILKRSKADLIEIKYVSRLLRDLLQNNSKQEQDTSSFIDHDNLINKNFWGYVKKIFESKETILPTFSMTKCVDFFKKTLSSANPTKLFHLPNWIPALNNPVTPFNLDPPTYEQITHVIRRMKTSGSPCPLDQLSIICFKRCPYLRTYLAEIIRTVWSSGSVPSEWKRACTILIHKKGDSGDPANFRPITLQSIPLKVFTSCLRNSIFNFLVTNNLIEHDIQKGFTPGLSGTLEHTSQMADIINKARTKQRSLVITLLDLKNAFGEVHHNLIQSVLDYHHIPDYIKLLINSLYTDFKTSRITQEFSTPFIAIGRGVLQGDCLSPLLFNLCFNTFIQHIKSEKYRQFGFSYKLLNPLHWFQFADDAAVISSQESENQHLLNRFAIWCQWASMIIRVDKCCTFGIRKSCTKSIQYLPKLLINSVLVPRVNTGESFRYLGRFFDFDMSNDQHRSEVTSTVGSMMSDIDMKPLHPKNKLLLYGRYVLSKISWHLTVADLGKTWISENLDPLVNQYLHRWLEIPISGTLSNTYLPRNKFGLNIIPPSVKFIQCQTVTRKALRSSKSSDIKYLWKSSSNSSMIQYDVFRSTKEVLKSFRSTQEEKLTHHLLSQGSFFTNIMKYSLSSLHSIWSTAHANLPKNIFNFTIRYINNSLPTRTNLAKWGLSAISECSYCGSSESLCHVVAGCQYYLPRFTWRHDSILNFLAASLLSKLDKSSLYADIEGYTSPWLITGDAHRPDLLIKTLDCLFILELTVGFETNLKNNVDRKYKKYKNIIRKLSSVFKSVKFVNLSISSVGVFSAESSTFLEMFDQLGYEKKHKMYIIRKIINIAIRSTYFIFCKRNKDWENPDLMNF

SEQ ID NO: 995 - protein, 963 aa, Sepia pharaonis
MCKRQKSKKINNNNNNNNNNNNNNNTTALAATRKLGVKTINKINRHREPAWKTKLIREIQQIRCELSILDELTRNPNISTRKFKKIKRKYNIKSLIDIPSIKEMLKQKLQLKAQRTRRYEKRCRFYRQNKIFRTDLKKFYREMGKTPIHVERPPSIDNVQTFWENIWSSPKEYNPNAEWIRREEERMLDTPLQEWENISTDDVRQALTKSQKWKSPGSDKLPNFWLYHLTSTHEILAKILSTLVNNPYKTPEWITEGMTYLIPKTTETDDPKNYRPITCLSTTYKLITSVLTNRTYSFLETNSTLPLEQKGCRRGSYGCKDQLLINKMILENCRRRRRNLSAAWIDYRKAFDSVPHSWILKTLEMYKVSPVVLNFLKHSMGMWNTKLYLSHTGGTAISNRLSIRHGIFQGDSLSPLLFCLSLIPLTHELNNSSYGYKINKKIFNHLLYMDDLKLFAKDDNELKGLLNIVKYFSDDIGMDFGLDKCAKVTFKKGRITETPLIDLDFVTKIRELEHGEAYKYLGISEGDGIQHPQMKEKIRKEYYRRVRLVLNTELNSKNRISAINTLAVPVVQYSFNVLNWTIAEIKRLDAKTRKLLTCYRMHHPKADVDRLYVPRSEGGRGLVQLELSYKTTTIGLQRYLETTEDSMMVCVKEHESSKRLYSVMKEANKFKMEFQMGVEMQLQHNTPAETAKYLKKIAKTNATDQLQKRWQDKPLHGQYSARTKQADVDKTRTHQWLRSAGLKAETEGFILAAQDQCLLTRNYQAHILKYCVNPKCRFCDKYPETIDHLVSGCTVLASTEYKTRHDRVGQYLHWKICNFYGKKTERNWYEHHPDPVTEIGPVTILWDYTIHTDRTIKANRPDIVIKDHKKKRCFLIDMAVPADCNVSLKIFKNLSKYKDLEIEIAKMWHMGTSTIPVVVGALGLVGKDSSRLIEGIPGSPCLKEIQKIVLTSTAHTLRRALSM

SEQ ID NO: 996 - protein, 1078 aa, Owenia fusiformis
MKCHEKQKQCRKESPVRKTQEDLNQDLNHSVQDLQVSPEPDPPQVGREENDGPVLERKPRLRLPATTDKVWKELDDEMDDVLENSLKGTAGKKMESMTRQVYAMCAERFQEKRANSKKEGKAGPSRRQKRIAALRRDMRRLTWRWKHAPDFEKPALEDLRDSLRKQLSVLRRAENLRKKQREKKRARKSFLKNPFQYTSNLLGKPKGGKLQCPKEDVEESVRAAHSDPERATPLGECPLPIPEPPPKIAFDLGDIKMEEIRQIVQHARSSAAPGPSGNTYKVYKNCPKLLQRLSKLIKSIWRNKTIPKAWALAEGCFVPKEENSVKLDQFREISLLDVEGKIFWSVIARRLTSFLLENKYLNPSVQKGGIPGYSGCLEHTAAITQLIKEAKQRRKTLAVVWLDLAKAYPSVPHQLIKTALTHYHVPDEVISLLMHHFDTLKMRFTVEDYTTKWQRLEKGIMAGCTVSVVLFVAAMNVILTAAEKECRGPVADSGERHPPCRAFMDDITVMTPTMTGTRWVLQGLDKMATWARMKFKPAKSRSLVIIKGKVESNTFTIQGERIPTVSEQPIKCLGKHYDDSLNDINNTNNVVCELKRWLGAIDKCQLQGKFKAWAFQHGIISRLQWPFLLYDFPMGKVEQMERMSSRFLRKWLGVPPSFSRGILFSKSPKLSLPVTSVLEEYKAAKVRAVTTLRSSKDNKVTSSGETISSGRGWNPQQAIGIAESQLRHKDIVGVVCKGRMGLGNYGTSRWKDANTETRRKLVVQQIRQSEEEGRQVRLAQLVKQGAWTHWESTLDRQLSWKDIWDMEQGKISFLLRAISDLLPSPANLTTWGLNEDASCIHCGALRSNIQHILSSCKAALAEGRYTWRHDKVLQKISHWVDQSRIMNKTNATVTPGPRADMLQPLEKHFVGANANPKGKVLPSGSRHTSRGRYGILQQAQDWELRVDLHQRLTFPSSITTTNQRPDMLLFSEDKRIAVMIELTVPWEDRIEVAHQLKSAKYQDLVEEIEAKGWKVHYYPVEVGCRGFPSTSLNRMFKNVGLPPSWLKRANRAVGSAAEEASRWLWLRRNDKWAKGRQH

SEQ ID NO: 997 - protein, 1078 aa, Owenia fusiformis
MKCHEKQKQCRKESPVRKTQEDLNQDLNHSVQDLQVSPEPDPPQVDREENDGPVLERKPRLRLPATTDKVWKELDDEMDDVLENSLKGTAGKKMESMTRQVYAMCAERFQEKRANSKKEGKAGPSRRQKRIAALRRDMRRLTWRWKHAPDFEKPALEDLRDSLRKQLSVLRRAENLRKKQREKKRARKSFLKNPFQYTSNLLGKPKGGKLQCPKEDVEESVRAAHSDPERATPLGECPLPIPEPPPKIAFDLGDIKMEEIRQIVQHARSSAAPGPSGNTYKVYKNCPKLLQRLSKLIKSIWRNKTIPKAWALAEGCFVPKEENSVKLDQFREISLLDVEGKIFWTVIARRLTSFLLENKYLNPSVQKGGIPGYSGCLEHTAAITQLIKEAKQRRKTLAVVWLDLAKAYPSVPHQLIKTALTHYHVPDEVISLLMHHFDTLKMRFTVEDYTTKWQRLEKGIMAGCTVSVVLFVAAMNVILTAAEKECRGPVADSGERHPPCRAFMDDITVMTPTMTGTRWVLQGLDKMATWARMKFKPAKSRSLVIIKGKVESNTFTIQGERIPTVSEQPIKCLGKHYDDSLNDINNTNNVVCELKRWLGAIDKCQLQGKFKAWAFQHGIISRLQWPFLLYDFPMGKVEQMERMSSRFLRKWLGVPPSFSRGILFSKSPKLSLPVTSVLEEYKAAKVRAVTTLRSSKDNKVTSSGETISSGRGWNPQQAIGIAESQLRHKDIVGVVCKGRMGLGNYGTSRWKDANTETRRKLVVQQIRQSEEEGRQVRLAQLVKQGAWTHWESTLDRQLSWKDIWDMEQGKISFLLRAISDLLPSPANLTTWGLNEDASCIHCGALRSNIQHILSSCKAALAEGRYTWRHDKVLQKISHWVDQSRIMNKTNATVTPGPRADMLQPLEKHFVGANANPKGKVLPSGSRHTSRGRYGILQQAQDWELRVDLHRRLTFPSSITTTNQRPDMLLFSEDKRIAVMIELTVPWEDRIEVAHQLKSAKYQDLVEEIEAKGWKVHYYPVEVGCRGFPSTSLNRMFKNVGLPPSWLKRANRAVGSAAEEASRWLWLRRNDKWAKGRQH

SEQ ID NO: 998 - protein, 1078 aa, Owenia fusiformis
MKCHEKQKQCRKESPVRKTQEDLNQDLNHSVQDLQVSPEPDLPQVGREENDGPVLERKPRLRLPATTDKVWKELDDEMDDVLENSLKGTAGKKMESMTRQVYAMCAERFQEKRANSKKEGKAGPSRRQKRIAALRRDMRRLTWRWKHAPDFEKPALEDLRDSLRKQLSVLRRAENLRKKQREKKRARKSFLKNPFQYTSNLLGKPKGGKLQCPKEDVEESVRAAHSDPERATPLGECPLPIPEPPPKIAFDLGDIKMEEIRQIVQHARSSAAPGPSGNTYKVYKNCPKLLQRLSKLIKSIWRNKTIPKAWALAEGCFVPKEENSVKLDQFREISLLDVEGKIFWTVIARRLTSFLLENKYLNPSVQKGGIPGYSGCLEHTAAITQLIKEAKQRRKTLAVVWLDLAKAYPSVPHQLIKTALTHYHVPDEVISLLMHHFDTLKMRFTVEDYTTKWQRLEKGIMAGCTVSVVLFVAAMNVILTAAEKECRGPVADSGERHPPCRAFMDDITVMTPTMTGTRWVLQGLDKMATWARMKFKPAKSRSLVIIKGKVESNTFTIQGERIPTVSEQPIKCLGKHYDDSLNDINNTNNVVCELKRWLGAIDKCQLQGKFKAWAFQHGIISRLQWPFLLYDFPMGKVEQMERMSSRFLRKWLGVPPSFSRGILFSKSPKLSLPVTSVLEEYKAAKVRAVTTLRSSKDNKVTSSGETISSGRGWNPQQAIGIAESQLRHKDIVGVVCKGRMGLGNYGTSRWKDANTETRRKLVVQQIRQSEEEGRQVRLAQLVKQGAWTHWESTLDRQLSWKDIWDMEQGKISFLLRAISDLLPSPANLTTWGLNEDASCIHCGALRSNIQHILSSCKAALAEGRYTWRHDKVLQKISHWVDQSRIMNKTNATVTPGPRADMLQPLEKHFVGANANPKGKVLPSGSRHTSRGRYGILQQAQDWELRVDLHQRLTFPSSITTTNQRPDMLLFSEDKRIAVMIELTVPWEDRIEVAHQLKSAKYQDLVEEIEAKGWKVHYYPVEVGCRGFPSTSLNRMFKNVGLPPSWLKRANRAVGSAAEEASRWLWLRRNDKWAKGRQH

SEQ ID NO: 999 - protein, 1078 aa, Owenia fusiformis
MKCHEKQKQCRKESPVRKTQEDLNQDLNHSVQDLQVSPEPDPPQVGREENDGPVLERKPRLRLPATTDKVWKELDDEMDDVLENSLKGTAGKKMESMTRQVYAMCAERFQEKRANSKKEGKAGPSRRQKRIAALRRDMRRLTWRWKHAPDFEKPALEDLRDSLRKQLSVLRRAENLRKKQREKKRARKSFLKNPFQYTSNLLGKPKGGKLQCPKEDVEESVRAAHSDPERATPLGECPLPIPEPPPKIAFDLGDIKMEEIRQIVQHARSSAAPGPSGNTYKVYKNCPKLLQRLSKLIKSIWRNKTIPKAWALAEGCFVPKEENSVKLDQFREISLLDVEGKIFWTVIARRLTSFLLENKYLNPSVQKGGIPGYSGCLEHTAAITQLIKEAKQRRKTLAVVWLDLAKAYPSVPHQLIKTALTHYHVPDEVISLLMHHFDTLKMRFTVEDYTTKWQRLEKGIMAGCTVSVVLFVAAMNVILTAAEKECRGPVADSGERHPPCRAFMDDITVMTPTMTGTRWVLQGLDKMATWARMKFKPAKSRSLVIIKGKVESNTFTIQGERIPTVSEQPIKCLGKHYDDSLNDINNTNNVVCELKRWLGAIDKCQLQGKFKAWAFQHGIISRLQWPFLLYDFPMGKVEQMERMSSRFLRKWLGVPPSFSRGILFSKSPKLSLPVISVLEEYKAAKVRAVTTLRSSKDNKVTSSGETISSGRGWNPQQAIGIAESQLRHKDIVGVVCKGRMGLGNYGTSRWKDANTETRRKLVVQQIRQSEEEGRQVRLAQLVKQGAWTHWESTLDRQLSWKDIWDMEQGKISFLLRAISDLLPSPANLTTWGLNEDASCIHCGALRSNIQHILSSCKAALAEGRYTWRHDKVLQKISHWVDQSRIMNKTNATVTPGPRADMLQPLEKHFVGANANPKGKVLPSGSRHTSRGRYGILQQAQDWELRVDLHQRLTFPSSITTTNQRPDMLLFSEDKRIAVMIELTVPWEDRIEVAHQLKSAKYQDLVEEIEAKGWKVHYYPVEVGCRGFPSTSLNRMFKNVGLPPSWLKRANRAVGSAAEEASRWLWLRRNDKWAKGRQH

SEQ ID NO: 1000 - protein, 1078 aa, Owenia fusiformis
MKCHEKQKQCRKESPVRKTQEDLNQDLNHSVQDLQVSPEPDPPQVGREENDGPVLERKPRLRLPATTDKVWKELDDEMDDVLENSLKGTAGKKMESMTRQVYAMCAERFQEKRANSKKEGKAGPSRRQKRIAALRRDMRRLTWRWKHAPDFEKPALEDLRDSLRKQLSVLRRAENLRKKQREKKRARKSFLKNPFQYTSNLLGKPKGGKLQCPKEDVEESVRAAHSDPERATPLEECPLPIPEPPPKIAFDLGDIKMEEIRQIVQHARSSAAPGPSGNTYKVYKNCPKLLQRLSKLIKSIWRNKTIPKAWALAEGCFVPKEENSVKLDQFREISLLDVEGKIFWTVIARRLTSFLLENKYLNPSVQKGGIPGYSGCLEHTAAITQLIKEAKQRRKTLAVVWLDLAKAYPSVPHQLIKTALTHYHVPDEVISLLMHHFDTLKMRFTVEDYTTKWQRLEKGIMAGCTVSVVLFVAAMNVILTAAEKECRGPVADSGERHPPCRAFMDDITVMTPTMTGTRWVLQGLDKMATWARMKFKPAKSRSLVIIKGKVESNTFTIQGERIPTVSEQPIKCLGKHYDDSLNDINNTNNVVCELKRWLGAIDKCQLQGKFKAWAFQHGIISRLQWPFLLYDFPMGKVEQMERMSSRFLRKWLGVPPSFSRGILFSKSPKLSLPVTSVLEEYKAAKVRAVTTLRSSKDNKVTSSGETISSGRGWNPQQAIGIAESQLRHKDIVGVVCKGRMGLGNYGTSRWKDANTETRRKLVVQQIRQSEEEGRQVRLAQLVKQGAWTHWESTLDRQLSWKDIWDMEQGKISFLLRAISDLLPSPANLTTWGLNEDASCIHCGALRSNIQHILSSCKAALAEGRYTWRHDKVLQKISHWVDQSRIMNKTNATVTPGPRADMLQPLEKHFVGANANPKGKVLPSGSRHTSRGRYGILQQAQDWELRVDLHQRLTFPSSITTTNQRPDMLLFSEDKRIAVMIELTVPWEDRIEVAHQLKSAKYQDLVEEIEAKGWKVHYYPVEVGCRGFPSTSLNRMFKNVGLPPSWLKRANRAVGSAAEEASRWLWLRRNDKWAKGRQH

SEQ ID NO: 1001 - protein, 1078 aa, Owenia fusiformis
MKCHEKQKQCRKESPVRKTQEDLNQDLNHSVQDLQVSPEPDPPQVGREENDGPVLERKPRLRLPATTDKVWKELDDEMDDVLENSLKGTAGKKMESMTRQVYAMCAERFQEERANSKKEGKAGPSRRQKRIAALRRDMRRLTWRWKHAPDFEKPALEDLRDSLRKQLSVLRRAENLRKKQREKKRARKSFLKNPFQYTSNLLGKPKGGKLQCPKEDVEESVRAAHSDPERATPLGECPLPIPEPPPKIAFDLGDIKMEEIRQIVQHARSSAAPGPSGNTYKVYKNCPKLLQRLSKLIKSIWRNKNIPKAWALAEGCFVPKEENSVKLDQFREISLLDVEGKIFWTVIARRLTSFLLENKYLNPSVQKGGIPGYSGCLEHTAAITQLIKEAKQRRKTLAVVWLDLAKAYPSVPHQLIKTALTHYHVPDEVISLLMHHFDTLKMRFTVEDYTTKWQRLEKGIMAGCTVSVVLFVAAMNVILTVAEKECRGPVADSGERHPPCRAFMDDITVMTPTMTGTRWVLQGLDKMATWARMKFKPAKSRSLVIIKGKVESNTFTIQGERIPTVSEQPIKCLGKHYDDSLNDINNTNNVVCELKRWLGAIDKCQLQGKFKAWAFQHGIISRLQWPFLLYDFPMGKVEQMERMSSRFLRKWLGVPPSFSRGILFSKSPKLSLPVTSVLEEYKAAKVRAVTTLRSSKDNKVTSSGETISSGRGWNPQQAIGIAESQLRHKDIVGVVCKGRMGLGNYGTSRWKDANTETRRKLVVQQIRQSEEEGRQVRLAQLVKQGAWTHWESTLDRQLSWKDIWDMEQGKISFLLRAISDLLPSPANLTTWGLNEDASCIHCGALRSNIQHILSSCKAALAEGRYTWRHDKVLQKISHWVDQSRIMNKTNATVTPGPRADMLQPLEKHFVGANANPKGKVLPSGSRHTSRGRYGILQQAQDWELRVDLHQRLTFPSSITTTNQRPDMLLFSEDKRIAVMIELTVPWEDRIEVAHQLKSAKYQDLVEEIEAKGWKVHYYPVEVGCRGFPSTSLNRMFKNVGLPPSWLKRANRAVGSAAEEASRWLWLRRNDKWAKGRQH

SEQ ID NO: 1002 - protein, 1078 aa, Owenia fusiformis
MKCHEKQKQCRKESPVRKTQEDLNQDLNHSVQDLQFSPEPDPPQVGREENDGPVLERKPRLRLPATTDKVWKELDDEMDDVLENSLKGTAGKKMESMTRQVYAMCAERFQEKRANNKIEGKAGPSRRQKRIAALRRDMRRLTWRWKHAPDFEKPALEDLRDSLRKQLSVLRRAENLRKKQREKKRARKSFLKNPFQYTSNLLGKPKGGKLQCPKEDVEESVRAAHSDPERATPLGECPLPIPEPPPKIAFDLGDIKMEDIRQIVQHARSSSAPGPSGNTYKVYKNCPKLLQRLSKLIKSIWRNKTIPKAWALAEGCFVPKEENSVKLDQFREISLLDVEGKIFWTVIARRLTSFLLENKYLNPSVQKGGIPGYSGCLEHTAAITQLIKEAKQRRKTLAVVWLDLAKAYPSVPHQLIKTALTHYHVPDEVISLLMHHFDTLKMRFTVEDYTTKWQRLEKGIMAGCTVSVVLFVAAMNVILTAAEKECRGPVADSGERHPPCRAFMDDITVMTPTITGTRWVLQGLDKMATWARMKFKPAKSRSLVIIKGKVESNTFTVQGERIPTVSEQPIKCLGKHYDDSLNDINNTNNVVCELKRWLGAIDKCQLQGKFKAWAFQHGIISRLQWPFLLYDFPMGKVEQMERMSSRFLRKWLGVPPSFSRGILFSKSPKLSLPVTSVLEEYKAAKVRAVTTLRSSKDNKVTSSGETISSGRGWNPQQAIGIAESQLRHKDIVGVVCKGRMGLGNYGTSRWKDANTETRRKLVVQQIRQSEEEGRQVRLAQLVKQGAWTHWESTLDRQLSWKDIWDMEQGKISFLLRAISDLLPSPANLTTWGLNEDASCIHCGALRSNIQHILSSCKAALAEGRYTWRHDKVLQKISHWVDQSRIMNKTNATVTPGPRADMLQPLEKHFVGVNANPKGKVLPSGSRHTSQGRYGILEQAQDWELRVDLHQRLTFPSSITTTNQRPDMLLFSEDKRIAVMIELTVPWEDRIEVAHQLKSAKYQDLVEEIEAKGWKVHYYPVEVVCRGFPSTSLNRMFKNVGLPPSWLKRPNRAVGSAAEEASRWLWLRRNDKWAQGRQH

SEQ ID NO: 1003 - protein, 1078 aa, Owenia fusiformis
MKCHEKQKQCRKESPVRKTQEDLNQDLNHSVQDLQVSPEPDPPQVGREENDGPVLERKPRLRLPATTDKVWKELDDEIDDVLENSLKGTAGKKMESMTRQVYAMCADRFQEKRANNKKEGKAGPSRRQKRIAALRRDMRRLTWRWKHAPDFEKPALEDLRDSLRKQLSVLRRAENLRKKQREKKRARKSFLKNPFQYTSNLLGKPKGGKLQCPKEDVEESVRAAHSDPERATPLGECPLPIPEPPPKIAFDLGDIKMEEIRQIVQHARSSSAPGPSGNTYKVYKNCPKLLQRLSKLIKSIWRNKTIPKAWALAEGCFVPKEENSVKLDQFREISLLDVEGKIFWTVIARRLTSFLLENKYLNPSVQKGGIPGYSGCLEHTAAITQLIKEAKQRRKTLAVVWLDLAKAYPSVPHQLIKTALTHYHVPDEVISLLMHHFDTLKMRFTVEDYTTKWQRLEKGIMAGCTVSVVLFVAAMNVILTAAEKECRGPVADSGERHPPCRAFMDDITVMTPTMTGTRWVLQGLDKMATWARMKFKPAKSRSLVIIKGKVESNTFTIQGERIPTVSEQPIKCLGKHYDDSLNNINNTNNVVCELKRWLGAIDKCQLQGKFKAWAFQHGIISRLQWPFLLYDFPMGKVEQMERMSSRFLRKWLGVPPSFSRGILFSKSPKLSLPVTSVLEEYKAAKVRAVTTLRSSKDNKVTSSGETISSGRGWNPQQAIGIAESQLRHKDIVGVVCKGRMGLGNYGTSRWKDANTETRRKLVVQQIRQSEEEGRRVRLAQLVKQGAWTHWESTLDRQLSWKDIWDMEQGKISFLLRAISDLLPSPANLTTWGLNEDASCIHCGALRSNIQHILSSCKAALAEGRYTWRHDKVLQKISHWVDQSRIMNKTNATVTPGPRADMLQPLEKHFVGANANPKGKVLPSGSRHTSRGRYGILQQAQDWELRVDLHQRLTFPSSITTTNQRPDMLLFSEDKRIAVMIELTVPWEDRIEVAHQLKSAKYQDLVEEIEAKGWKVHYYPVEVGCRGFPSTSLNRMFKNVGLPPSWLKRANRAVGSAAEEASRWLWLRRNDKWAQGRQH

SEQ ID NO: 1004 - protein, 1078 aa, Owenia fusiformis
MKCHEKQKQCRKESPVRKTQEDLNQDLNHSVQDLQVSPEPDPPQVGREENDGPVLERKPRLRLPATTDKVWKELDDEMDDVLENSLKGTAGKKMESMTRQVYAMCAERFQEKRANSKKEGKAGPSRRQKRIAALRRDMRRLTWRWKHAPDFKKPALEDLRDSLRKQLSVLRRAENLRKKQREKKRARKSFLKNPFQYTSNLLGKPKGGKLQCPKEDVEESVRAAHSDPERATPLGECPLPIPEPPPKIAFDLGDIKMEEIRQIVQHARSSAAPGPSGNTYKVYKNCPKLLQRLSKLIKSIWRNKTIPKAWALAEGCFVPKEENSVKLDQFREISLLDVEGKIFWTVIARRLTSFLLENKYLNPSVQKGGIPGYSGCLEHTAAITQLIKEAKQRRKTLAVVWLDLAKAYPSVPHQLIKTALTHYHVPDEVISLLMHHFDTLKMRFTVEDYTTKWQRLEKGIMAGCTVSVVLFVAAMNVILTAAEKECRGPVADSGERHPPCRAFMDDITVMTPTMTGTRWVLQGLDKMATWARMKFKPAKSRSLVIIKGKVESNTFTIQGERIPTVSEQPIKCLGKHYDDSLNDINNTNNVVCELKRWLGAIDKCQLQGKFKAWAFQHGIISRLQWPFLLYDFPMGKVEQMERMSSRFLRKWLGVPPSFSRGILFSKSPKLSLPVTSVLEEYKAAKVRAVTTLRSSKDNKVTSSGETISSGRGWNPQQAIGIAESQLRHKDIVGVVCKGRMGLGNYGTSRWKDANTETRRKLVVQQIRQSEEEGRQVRLAQLVKQGAWTHWESTLDRQLSWKDIWDMEQGKISFLLRAISDLLPSPANLTTWGLNEDASCIHCGALRSNIQHILSSCKAALAEGRYTWRHDKVLQKISHWVDQSRIMNKTNATVTPGPRADMLQPLEKHFVGANANPKGKVLPSGSRHTSRGRYGILQQAQDWELRVDLHQRLTFPSSITTTNQRPDMLLFSEDKRIAVMIELTVPWEDRIEVAHQLKSAKYQDLVEEIEAKGWKVHYYPVEVGCRGFPSTSLNRMFKNVGLPPSWLKRANRAVGSAAEEASRWLWLRRNDKWAKGRQH

SEQ ID NO: 1005 - protein, 1409 aa, Sarota myrtea
MRLRNRLLPQAGTCEGESRPESSGSGCPTYSGGGNVSPSSAQLSAVAMNVTLSPPHNNIYNSSPISSTRSLFPSPASSSSYQYHNSFSHSSDTTSPMSTDVIQEARHATSPVSTFDTTIPAREMLNTLPNRANCTHILTQNIDTPARSALQDMLPATTLAGKSRKRMKWTDNINKELLRCYYIVTHCERDLTAYRPLLHTTFTQSYPELSHLSEQRLADQIRVIHRNNRITPSERERIKHIVSQTFASTNNTSDQLNGSHTEQQTTTQQLSTPINDNHQTDTPNLTSQTSISSLFVTTQHTNTTIQTPQMLEHIENSQTFQTETLNEPIGNSLTYKKIEDTFTEILIKYRGTDPTLRPFIPKIQTTHQTSKTLNTVNHIVEKHLQTKDSFDVEEIHEIIYSAALTITTLHTNPVRKSFGSTTQPNNKQKCEQNKPLWEKRLENKITTLRKEIGQFTQYIKGNLTQKKQRKLNPNSRSLDDIVDQLDNKKQKLQAYCKRLRRFKVSNQRKSDNNLFNSNQKLFYQKLNTENIKITQPPDITAVQTYWQNLWSKPVQHNTQSFWAGIEEREMESVNPMAEVIINEEDVTQAIRKTLNWKTPGPDKIQNYWMKYLTATHKHIASTMNNLIRNPQKMPAFFTQGITYLKPKDHDTTNPTKYRPITCLPTIYKLLTSIITQKLNIHITQNKIIPEEQKGCCKGSRGCKEQLVIDTEIHNQVKQKHRNLYYSYIDYQKAFDSVPHSWLIHILKIYKVDNNTIQFLQHAMSKWSTNLSLRTNDTTLHTSTIKITRGIFQGDSLSPLWFCLALNPLSRILNRTNSGYIIDRSNDIKITHLLYMDDIKLYASNRHQLDELLKLTEQFSNDIKMTFGTNKCKINSITNGRHNETDPFDLEQQRGLIESMEPKETYKYLGFHQSTVINHSNIKKDIKIKYKQRLNKILNTQLSARNKTKAINTYAIPILTYSFGIIKWTDTELNALNTTTRVACYKHNIHHIHSSVERFTLKRKLGGRGFVDIRDLYYSQIENLRTYFLTKSNESTIHNAIVNLSHSGTPLQLSNSSYDPKLKMTKDTQKLENWKKKALHGKYPHQLEQDHIDKNASCAWLRKGNIFGETEGFLIAIQDQIIKTRNYSKYIIKQSIETDKCRLCHQITETIDHITGGCSVLANKEYTHRHDNVAKHIHQQLALKYKLVENYTPYYKYKPKNVIENNTAKLYWNRDIITDRTILSNRPDITLTLKVSKTTFLIDISIPNTHNLKQKHTEKIQKYIPLADEIKQMWHQETVRIIPIIMSSTGIIPKTLHNALKLLDLHENTYIPLQKSVVIDTCSIVRRFLNPTTLTLQSNTETTTNTNALITHNHTQRITHISHTDTQNTMSYSTHNIPYTQPNTQNPIGTPSHNRSYTTHTNILNINTLS

SEQ ID NO: 1006 - protein, 1360 aa, Pyrgus malvae
MRLRNRQIPQVGTREGESRPGPSGSGSPAYSGGGNALHMTAQARTDAANTNNQNHTSSHISSDPPSPISSTESLFQSPSSSPHSFQFQSTSRSTTISPLSCDVAQEALAISPVPTLGNNDPTRPSENNINNRVNHYTSSSLNHNTPARSALQEMLPATTLAGKCRQRMKWTEQINTELLRCYYIVTCKETNFTAWRPLLHERFIQKFPDLSHLSEQRLSDQIRVIHRNNRIPASKRELIKQSISVTTTPHCSNVHQPTNNDISTENGCNSNIDTITDIVVQNNSITAQSVTSLQTHNHPTQTHPIPINTEHVQIQDFETTNTTPESINYTKVENTFKEMLIKYTYTDPTLRPIIPKLKITRHVIKTVSTINQIVDKHLSTKNTLSLEEIHVVIYCAAQTVATLYTSRLNNFENHTKDNNANRQIKSRKPKWEKRIETKIETLRREIGQLTQYLNGNLSLKKQYKLNPHSRSRDDITTQLDTDKQKLQAYSKRLRRYKKSNERKYHNKLFNNNQKLFYQKLSTDQIQITQPPDKNDVHNYWTKLWSNPVQHNTHLSWSEIEEEEHANVNPMSELKIDVEDVIQAVKKTLNWKAPGPDKIQNYWLKYISATHKYIANTFNHLLHNPQDTPLFLTQGITYLKPKDNDTTNPAKYRPITCLPTIYKLLTSIISHKLNTHITTNQIIPEEQKGCSKGSRGCKEQLVIDTEVHYQVKKKHRNLAYCYIDYRKAFDSVPHSWLIHILKIYKVDSILINFLQHTLKNWTTKLHLRTENTTLSTPIIKILRGIFQGDSLSPLWFCLAINPLSKILNKSGYGYIIDREHNVKLTHLLYMDDIKLYASNRTQLNHLLKLTEKFSADIKMSFGTEKCKINSIVKGKYDEAQPFDLHIQRGTIDRMEPMETYKYLGYQQSTSVNHTDIKNTLKVKYKQRLHKILNTQLSARNIVKAVNTYAVPILTYSFGIIKWSDTELEALNTTTRTVSYKHNIHHIHSALQRFTLKRKLGGRGFIDIKNLHYIQIKNLREYFLTKADTSPLHNAIVNLSQSGTPLQLNNHAFDPKIKILTQDQKIEGWKNKALHGRYPHQLDQDHIDRNASCTWLTRGNIFSETEGFLIAIQDQIIKTRNYAKYILKESVLTDKCRLCHQSTETIDHITGGCSALASKEYTHRHDNVAKHIHQQLALKYKLLESYTPYYQYKPKHVIENNAAKLYWDRDIITDRTILSNRPDITLTLKSSKTTYLIDIAVPNTHNLRQKHTEKIQKYIPLADEIKQMWHQDTVRIIPIIISSTGLIPKTLLTALKILDLKENTYIPIQKSIIIDTCSLVRRFLNPTSLIINDEHNTNTNTTSHNTTHMHTTADTQEPGYLA

SEQ ID NO: 1007 - protein, 1399 aa, Nymphidium onaeum
MRLRSRVIPQAGTCEGESRPESSGSGCPTYSGGGNVSLSTAQSNTAAVNHNFHNTTLLPSTTHPSSPISSTQSLFASPDSSNSYQFHSHNSSHSNTTSPLSNDVVSEMFALSPVPIIDNTTPTHIMSNYQTNSVDYHTNTQPLPNSNTPARSALQDMLPATTLAGKNRQRMKWTDNINKELLRCYYIVTHCETNLTAYRPLLYTKFVETYPELSHLSEQRLADQIRVIHKNNRISISEREHIKRLVSQLNISTDQTISQISNSHLIHQQSINNDQFNSTDTHIEQNSIQHFSLTTTQQNNILMQTPEALINSEHIHTLDTETSTVITRDTLHNTTIENTFVEMLIKYKGLDATERPPIPKLQTSRQSIKTVNIVNDIIDKHLRNQDILSIEEIHDVIYSAALTITSLHTKPAPNQNINVINLSRNRQNKPQWEMRLDNKIVASRKIIGQLTQYINGNLSQKKRRKLNPDNQSMDAIVNQLDYHKQKLQAYSKRLRRYKISNQRRTDNNLFKTNQKLFYQKLSSEVIQVTEPPNLTAVQTYWESLWSKSVHHNTHSHWAEIEEQEINNISSMTDIKIETEDVIHSIKKTLNWKAPGPDKIQNYWLKYLTATHKHIAHTFNDLIYNPQKMPPFFTQGITYLKPKDKDTTDPSKYRPITCLPTIYKLLTSIITHKLNTHITQNNIMSEEQKGCCKGSRGCKEQLIIDTEIHNQVKQKHRNLYYAYIDYQKAFDSVPHSWLLQILKIYKVDNTTIQFLRHAMSNWTTKLNIKTHETTFNSSLIKIERGIFQGDSLSPLWFCLALNPLSRILNRTKYGYSIDKLHDIKLTHLLYMDDIKLYSSTRHELDHLLKLTNKFSTDIKMTFGIDKCKINCIVKGQHQKTDSFDLEEHRGLIESMDPRETYKYLGYHQSTVINQTDIKTSLKSRYKQRLHKILNTHLSARNKTKAINTYAIPILTYSFGIIRWTETELNSLNTATRMASYKHNIHHIHSSVERFTLKRKLGGRGFIDIRDLYYTQIDNLRTYFLNKSKDSPLHKALVNLPHSGTPLQLSNSLFDPKLKITKETQRIENWKKKALHGKYPHQLEQDHVDKIASCTWLTKGNIFSETEGFLIAIQDQIIKTRNYSKYILKQTIDTDKCRLCNLTTETLDHITGGCNLLANKEYTHRHDNVAKYIHQQLALKHKLLDMYTPYYKYKPKQVLENSTTKLYWDRDIITDRTILSNRPDITLTLKSSKTTYLIDISIPNTHNLKQKYTEKIQKYIPLADEIKQMWHQETVKIIPIIISSTAVIPKTLKVSLKSLDLHENTYIPLQKSVVLDTCGIVRRFLNSTSLSYVQNNNDVRANTVTSNTRITTHNTINTNHNYTQNTIFTHNHHTLLTITNETQSTQTLHANRTHDTLTVPH

SEQ ID NO: 1008 - protein, 1328 aa, Paramimus stigma
MTNGALVYKYAMRLRNRQIPQAGTREGESRPETPSSGSSTYSGGSDASHSTTQPRAVVVHKISTHTTSHPSSTSNHSTFQSPNSFSLSPCITPLSHDVTQEGNTYSPVPITGITNHTRVNNQNTDFRVNHDTNIASPNINPPARSVLQDMLPATTLAGKSRQRMKWTNEINKELLRCYYLVTNNETNLTAWRPLLHKKIVDIFPEFHSLSEQRLADQIRVIHKNNRISAQEREDLKKEVSLSLLSRNGHSEITSDNANMHQSPTLTQHYHSPALSQTTHMENLSPILNQTNTTTLEYQQVIIPEQTETRNLDSNCQKDLINKNKIEDTFIEMTIKYTDTDPSLRPIIPKPKITRKLIKIIHLTDQVVNEYLKAKNIITLKGIHEVIYCAAQTITSININKLEHTKGNNNTRKQNKPQWEKRLDNKIMVLRKELGLLTQYLKGNLTRKKQLTLNPNNKSNDAIQEDLDIKTQKLQAYSKRLRRYKLSNQRKTQNILFDTNQKQFYQTLNSERIQITLPPSKDNLQNYWKNIWSTPTQHKIHTPWEEIETEEMANVEPMQDIKIAKSDVEQAIRKTLNWKSPGPDKIHNYWIKYLPSTHEHIANTFNNLIQNPNETPTFLTNGITYLKPKDNDTTNPAKYRPITCLPTMYKLLTSIIADKLNTHISLNQIIPEEQKGCRKGSKGSKEQLIIDTEIHNQVKQKHRNLFYAYIDYQKAFDSIPHSWLIHVLKIYKVNIKLVKFLDYTMKNWSTKLNLYTNTTTICTDLIKIKRGIFQGDSLSPLWFCLAINPLSRILNKTDYGYVIDRENNIKITHLLYMDDIKLYAANRQQINQLLKLTEHFSADIKMTFGIQKSKINHIHKGQHKETDPFHLSTQEGLIGSMKSEETYKYLGYQQSISINNTEIKNALKAQYKHRLHKILNTQLSAKNKIKAINTYAIPILTYSFGVIRWSDTELEALNTTTRTTSNKHNIHHIHSAIQRFTLRRKHGGRGVIDIKNLHYAQIDNLRKYFLTKANSNDLIKAIVKLPQAGTPLQLNNNQYDPKKKILSDDQKINIWKSKALHGKYPHQLELDHIDKNASSTWLTKGNIFGETEGFMIAIQDQIIKTRNYSKYILKQPIDTDKCRLCNQCIETIDHITGGCSILANKEYTHRHDNVAKHVHQQLALKHNLTQTYTPYYQYKPKAVMENSTAKLYWNRDIITDRTILSNRPDITLILKHTKTTYLIDISVPNTHNLKQKHTEKIRKYMSLADEVKQMWHQEFVKIVPIIISATGIIPKTLKPALQLLQLNENTYIPLQKSIIIDTCSIVRRFLNPTSLALQQDKQHDNTTIF

SEQ ID NO: 1009 - protein, 1329 aa, Hypermnestra helios
MQTRSKTRPQVPGGSSSGLGSDGGRTNARTRGAYNPRATVLTRHTTTATTTDSDMPNEIVLSSPSPSTSNESNASHSLQHSTTSSQNLSFDAVREAFAIDPSPITDSTITRTDNLNTFNRVRMNSNTPYNSTPTTTPPASSVLQEMLPATTLAGKSRQRMKWTDQINRQLLRCYYIVTQCESNLTAYRPALRKKFIEVFPELGHLSEQRLVDQIRVIHKNNRIPAPERDNIKMEVSNNTSTTEMFCPTQLNTETHNQYLNIMNPDPNEDNTVSTTHTSHMDTTVETCNIETSSELMSVDSRSNNSVNSEIPQSSIHFEKIKNTFTEMIIKYRDIDPNSRPVIPKLQTSHKTIKTVNILNEILDQIIKEEELITIELLHDFIYCAAMTATTLHSREKKTKDMHSRKGGKPVWERRLDNQITALRKEIGQLTQYLKGNLSQKKQRKLNLLNLNINQITDEIDKKKQKLQAYSKRLRRYKISNKRKSDNKLFNLNQKIFYRNLGTEAIKITQPPNITEVQNYWENIWSEAEEHDKNAVWLKTEEMKVDHIEHMPDFTIDKEDVQEAIRKTSNWKAPGPDKIQNYWLKYFTATHEHLANTLNSLIQEPQNMPAFLTQGITYLKPKDHDTSNPAKYRPITCLSTVYKLLTSIITHKLNAHINRNNIIPEEQKGCRKGSRGCKEQLVIDAELHNQVKQNHRNLYYSYIDYQKAFDSVPHSWLIHVLEIYKVDDTLIKFLRHVIKKWTTKLNIRTNDTSLTTTPIKILRGIFQGDSLSPLWFCLSLNPLSTILNRTGYGYIFNRDSNTKLNHLLYMDDIKLYATQRQHLDYLLQLTEKFSADIKMKFGTDKCKINSIVRGKHQQTDPYHLDLQNGTIENMEYRETYKYLGYQQSTTTDHKEIKNTLKSKYKQRLNKILKTQLCARNKTKAVNTYAIPLLTYSFGIIKWSHTELEALNTLTRRACNRHNIHHIHSATERFTLKRKQGGRGFIDIKNLHYTQVENLRSYFLNKADDSKLHNAIVNLPTTATPLQLNNREFDPKVKVTKDEQKIENWKKKALHGRYPHQLQQEHIDQDASTTWLTKGNIFGETEGFLVAIQDQVIKTRNYSLHILKEKIESDKCRLCHQATETIDHITGGCSALANKEYTYRHDNVAKHIHQQLALKHKLLETYTPYYKYKPINVLENNTSKLYWNRDIITDRTILSNRPDITLVLKPTKTTYLIEISIPNTNNLKQKHTEKIQKYIPLADEIKQMWHQEIVKVVPIIISSTGVVPKTLSKALNILELDKNTYIPMQKSVVIDTCSLVRRFFNPSSLPLNTSPQDSTPSTNLTSHLHNT

SEQ ID NO: 1010 - protein, 1373 aa, Chioides albofasciatus
MRLRNRQIPQAGTREGESRPGPSGSGCPTYSGGGNVSHKAAQSSTVAVDKPHSLSHPSSPISSTHSLFPSPSSSPYSYQFQSSSSRSSTITPLSCDVAQEARAISPVPTTDNINHTRALQNNPTNRVTHNTNSSSHTNNTPARSVLQEMLPATTLAGRSRQRMKWTDDINKELLRCYYVVTQNESNLTAWRPQLHRTFAESIPELSHLSEQRLADQIRVIHKNNRIAAPEREQIKHSVSLHISSSSNRLNDHTTARHTDHQSNVNTTPLTNNHQSMTDSHSQTLNLHALNTQHTTTFTHHTTTTPQAYQSYESIEHMQTQNSEATNMSVDLVDHEKIENIFREMLIKYTGTDPTLRPTICKPQITRNFIKTLNCINEIIDKYLQNKGSLTIEEIHVVIYCAAQTVTKIHTKHAKTLENNKNNNNRKQIRPEWEKRIENNIVTLRKEIGQLTQYLKGNLSLKKQQKINPNSRSREEILEQLDNNKQKLQAYTKRLRRYKKSNERKSHNKLFNTNEKLFYQKLTAEQIQVTQPPDTTDIQNYWKSIWSVPVQHNTHTSWAEIEEQEMEKIDSMPEITIHKDDILVAIKKTLNWKAPGPDKIQNYWIKYLPATHDHIANAFNHILCNPQDTPFFLTQGITYLKPKDGDTTNPSNYRPITCLPTIYKLLTSIIAHKLNSHITRNHIIPEEQKGCCKGSRGCKEQLVIDTEIHTQVKQKHRNLYYSYIDYQKAFDSVPHSWLIHILKIYKVDNRLIQFLLHTMKYWTTKLSLHTNNISLCTQKIKILRGIFQGDSLSPLWFCLALNPLSRILNKTSSGYVIDKNSNIKLTHLLYMDDIKLYAANRQQLDHLLKLTEKFSTDIKMTFGTDKCKVNSIIKGQHQETNSFQLETQGGTINSMEFKETYKYLGYHQSTSINHTDIKNTLKTKYKHRLHKILNTQLSAKNKIKAVNTYAVPILTYSFGVVKWSDTELEALNTATRSISNKHNIHHIHSAVQRFTLKRRLGGRGFIDIKNLHYTQIDNLRTYFLQKSNESALHKAIVDLPQSGTPLQLNNSQFDPKLKILKDDQKIENWKKKALHGKYPHQLEQDHIDYNASCTWLTKGNIFGETEGFLVAIQDQIIKTRNYSKYILKETIDTDKCRLCHQTTETIDHITGGCSVLANKEYTHRHDNVAKHIHQQLALKHKLLQSYTPYYQYKPKNVLENNTAKLYWDRDIITDRTILSNRPDITLTLKSSKTTFLIDIAVPNTHNLKQKHTEKIQKYIPLADEIKQMWHQDTVRIIPIIISSTGVIPKTLKTALKLLELHENTYIPMQKSIVIDTCSIVRRFLNPTTLTLQNHQDNHPNTATQTSSTHNTQTQEHNRPNTLIITHPNHTNTHE

SEQ ID NO: 1011 - protein, 1186 aa, Udranomia kikkawai
MLPATTLAGKSRQRMKWTDEINRALLRCYYIVTNNETNLTAWRSLLHQKFITDTPELSHISEQRLADQIRVIHRNNRISASERESLKQSLLSLTNIPINQNTINCIEQQLHTLTDISPSTNNDRPNADSHTQTLNSSYVLHTTQPNNDIIQRNQTLENTEHIETQELNYTDRQTITIDYDKIENTFTETLIKYSGTDPSLRPTIPKLQITRKSIKTVNTINEIIHKHLNSKEAITLEEIHEVLYCAAHTVTILNTKNIDKTKNVHIHINETIKQKRPQWERRIENKIILLRKEIGRLTQYLNGNLTQKKQQKLNPNNRNREEIVDQLDKGKMKLQAYSKRLRRYKKSNERKSHNKLFNTNEKLFYQKLNTEQIQIKEPPNKEELQNYWKNLWSKPVQHNLHSSWTEVEEQEMENITPMPEINISRDDVSQAIRKTLNWKAPGPDKIQNYWIKYFTATHQYIADSFNSIILNPQDTPHFLTQGITYLKPKDNDTTNPAKYRPITCLPTIYKLLTSIITHKLNTHITQNQIIPEEQKGCCKGSRGCKEQLIIDTEIHHQATHKHRNLFYSYIDYQKAFDSVPHSWLLHILNIYKVDSRLIQFLQHSMNNWTTKLHLRTNNTSFQTHPIRILRGIFQGDSLSPLWFCLALNPLSRILNQTGYGYIVDRDSNTKLTHLLYMDDIKLYAANRQQLEHLLTLTEKFSSNIKMSFGVDKCKINSIIKGKHQDTLPFELEDQGQIIDNMDLGQTYKYLGYQQSTSINHTDIKNQLKIKYKQRLNKVLNTQLSARNKIKAVNTYAIPVLTYSFGIIKWSDTELEGLNTLTRTTSNKHNIHHIHSAVQRFTLKRKEGGRGFIDIKNLHYTQIDNLRTYFLNKANESTLHKAIVNLAPSGTPLLLNNDQFNPKLKILKDEQKIENWKKKALHGKYPHQLDQEHVDRNASCTWLTKGNIFGETEGFLVAIQDQIIKTRNYSKFILKEPIDTDKCRLCHQTTETVDHITGGCSVLANKEYTHRHDNVAKHIHQQLALKHKLIDTYIPYYQYKPKKVLENNTAKLYWDRDIITDRTILSNRPDITLTLKSTKTTYLIDISVPNTQNIKQKHTEKIQKYIPLADEIKQMWHQEFVRIVPIILSSTGIVPKTLKTALNLLELHENTYIPLQKSIIIDTCSIVRRFLNLSSLTLRNYDEVNTA

SEQ ID NO: 1012 - protein, 1342 aa, Oechydrus chersis
MTNGVLVNKKYAMRLRSRIIPREEESRPRPSGLGCPTYSGEGNVSHMTTQFPTVVVDNPRPNTTSHPSSPISSTYSLFQSPNSSLYSPQHSLSRSTTVTPLSCDAAQEAIANSPEPTTDITNPTRVSVLINTSHNRVDHNNHPSQPFTTTPARSVLQNMLPATTLAGKNRQRMKWTNEINQELLRCYYMVTQNETNLTGWRPLLHQTFSESFPELKHLSEQRLADQIRVIHRNNRIPVSERERIKQYVATLTTTTNSSNDNTVTTHNHQSTTNHPIPTQSSNRQHSPTITQHVTLTTLTNSTQLNTPQSTEHNQTLELETINTQSDVIHYNQIENSFNEMLIKYAGTDPSLRPVIPKLQINRNVIKTINITNKIINKHLQSRETVTLEEIHEIIYCAAQTVTTIHTTHNKKTENTNKENNIFVVSTPKLPQWEKRIVNKINMLRKEIGQFTQYINGNLTQKKQQKLNPNNSRNRDEIIEQLDKSKQKLQAYSKRLRRYKKSNQRKTQNHLFNTNQKRFYQELNSEQIKITQPPNRDDLQSYWRNLWSKPVQHNTHTSWAEIEEQEMQNIDPMPKVIIDIEDVSQAIRRTLNWKAPGPDKIQNYWIKYLSSTHKHIALTFNNIIQNPQDTPAFLTQGITYLKPKDHETSNPANYRPITCLPTIYKLFTSILSNKLNTHITQYDIIAEEQKGCSKGSRGCKEQLVIDTEIHNQIKQKHGNLYYSYIDYQKAFDSIPHSWLIHVLKIYKIDNRLIQFLEHTMKNWSTKLHLRTNNTIIHTPPIKISRGIFQGDSLSPLWFCLAINPLSRLLNKTNFGYVINKDSDTKLTHLLYMDDIKLYAATRQQLNHLLRLTEHFSTDIKMILGTNKCKINNIIKGRHSETDSLRLETQEGIIDSMEPKDTYKYLGYQQSTCINHTDIKSSLKIKYKQRLHKILNTQLSARNKIKAVNTYAIPILTYSFGIIKWSDTELEALNIATRTASNKHNIHHIHSAVQRFTLKRKLGGRGIIDIRNLHYTQIDNLRSYFQTKANSSALHKAIVQTSNSTTPLKLNDSQYDPKLKIIKDEEKLENWKKKALHGKFPHQLEQSHVDRNSSSTWLTKGNIFGETEGFMVAIQDQIIRTRNYSKYILKEAIETDKCRLCHHASETIDHITGGCSVLATKEYTHRHDNVAKHIHQQLALKYNLLETYTPYFKYKPKKVLENSKVKLYWDRDIITDRTILSNRPDITLTLKTSKITYLIDISVPNTHNLKQKHTEKIQKYIPLVDEIRQMWHQEYVRVVPIIISSTGVVPKTLKTALQQLNLHDKTYIPIQKSIIIDTCSIVRRFLNPTSISLQNDTETILNTT

SEQ ID NO: 1013 - protein, 1336 aa, Gorgopas trochilus
MRLRNRRLPQAGTREGESRPGPSSPGCPTYSGEGIVSHKTTQPQTVVVEKPHDTSGTTSPISSTHSLFQSPSSSPQSYELDQSSPRSSIITPLSFDVAEEAHAILPLPINDITNPTRARQNYISNRVNHNTQSSSPHINTPARSVLQEMLPATTLAGKSRQRMKWTDQINRELLRCYYIVTHLETNLTAWRPLLHQKFVDSIPELSHLSEQRLADQVRVIHRNNRIPISEREEIKQSISLLLSPHSPTHIRETNNTITQTNISDTQTITNQVTHSNTHLLTQTPNLPYDHNITHLGNEMPQSTEPCINNEQNPISSEKPQEPLDYEKVENIFTETLIKYTGTDPTLRPTIPKLQITRHTIKTVNTINEIISKHLKTKDTITLEEIHEVIYCAAQTVTGIHNKSTNKFENTAERSNRAKRGKPQWEERIENKITILRKEIGQLTQYLKGNLTQKKERKLNPSNKSTQEITEQLDKYIQKLQAQSKRLRRYKISNQRKSHNKLFNNNQKLFYQTLNEEHIKITEPPEKDNIENYWKSLWSKPVHHSIHSSWTTIEEQETSNIDPMPELTIEKEDVLTAIKKTLNWKAPGPDKIQNYWIKYLSSTHEYISNTFNHLIHNPHETPSFLTQGVTYLKPKDTDTTNPEKYRPITCLPTIYKLLTAIITHKLTTHISRNQIILEEQKGCRKGSKGCKEQLVIDSEIHTQVKQKHTNLFYSYIDYQKAFDSVPHSWLVEILKIYKVDNTLVQFLQHTMKNWTTKLHLYTNSTSLITQVIKISRGIFQGDSLSPLWFCLALNPLSRILNNTKNGYVLDRENNIKITHLLYMDDIKLYAANRQQLDHLLKLTENFSTDIKMSFGINKCKINSIIKGQYKQTDAFDLNLQSGKIDSMGPNETYKYLGYQQSTSINHTDIKNTLKIKYKQRLQKILNTQLSARNKVKAINSYAIPILTYSFGVIKWSDTELEALNTLTRTTSYKHNIHHIHSAVQRFTLKRKLGGRGFIDIKNLHYNQIDNLRTYFTQKSKENALFKAILNLRKTGTPLQLNNGEFNPTLKIQTDEQKIDNWKKKALHGKYPHQLEQEHIDRNASCSWLTKGNLFGETEGFIIAIQDQIIKTRNYSKFILKETIETDKCRLCHQTTETIDHITGGCSILANKEYTHRHDNVAKHIHQTLALKYKLIDSYTPYYQYKPKNVIENNIAKLYWDRGIITDRTILSNRPDITLTLKSSKTTYLIDIAVPNTHNLKQKHTEKVQKYIALADEIKQMWHQETVKIVPIIISSTGMIPKTLKIALKLLDLHENIYVPLQKSIIIDTCSIVRRFLNPTTLSFQPEYLHSTDTATHT

SEQ ID NO: 1014 - protein, 986 aa, Fabriciana adippe
MLMKFKGTDPTLRPHIPKLQTCRKTIKTINTINQIIKPHLQDNDDTTVENLHDIIYCAAKTVTSLHTGKNTLNKKNTKRTETSENKPAWQKRIETKIAKLRKEIGQLTQHLNGKLSQKKQEKIKVNEKDRNEVVDELDKNKQKLAAQSKRLRRYKLSNLRKQQNRDFNNNEKVFYRNLHKTHTITQPPDITQVKKFWEDRWGNSVYHNHNAKWIELEENRVKHIENMTQFKIEKSDIETAIRKTLNWKAPGPDKIQNYWIKYFTSTHAHLAKALNTLIQEPQNIPSFLLQGITYLKPKDTDTTNPANYRPITCLPTIYKLLTFIIAHKLNIHITQNKIIPEEQKGCCKGSKGCKEQLVIDTEIHNQVKQKHRKLFYAYIDYEKAFDSVPHSWLIQILKLYKVDNILIHFLENTMEKWMTTLTLRTEKENLTTTPIKIARGIFQGDSLSPLWFCLAINPLSSILNSTECGYTIDREAKIKITHLLYMDDIKLYASNRTQLNQLLKQTEQFSNDIKMNFGTEKCKINSISKGQHKETETYNLTLQEGAISTMDSKEIYKYLGYQQSTCLNHTDIKQALKTKYSQRLNTILKTHLSARNKTKAINTYAVPILMYSFGIIKWSDTDLNALNTLTRSQAYKHNIHHIHTSTERFTLQRKHGGRGFIDIKNLHYTQIKNLRSYFLSKANNSKLHKAITTLTTSGTSLQFNDKNYEPETNIITEQKKIEHWKKKALHGKYPHQLEQTHIDKEASNTWLTKGNIFAETEGFFIAIQDQIIKTRNYSKYIIKESIETDLCRLCHQSKETIEHITGGCKILATKEYVKRHDNVAKQVHQSLALNYKLISTYTPYYKYIPPNVLEKKTAKLYCNVDIITDKTIACNRPDITLTLKSSKTTYLIDISIPNTENLNTKHQEKIQKYIPLADEIKDMWHQNSIKIVPIIISSTGVVPKTLHKSIELLELHKSTYIHLQKSIVLDTCSIVRRFLNPSSLPP

SEQ ID NO: 1015 - protein, 1300 aa, Blastobasis lacticolella
MRRSIRIKNKNSAQCSTAAENGSAGNSSPISSTRSLFSTPSSSPKSFQNPTSSRSTTASPMSYDVTQEAPANYPESIYDIINAARNNANVESNYGAETDTYNIDTNTPARSVLQEMLPATTLAGRSRQRMKWTDLINRELLRCYYTVTQCETNLTAYRPLLHKMFIETFPELHHLSEQRLADQIRVIHRNHRISLAERERIKQLVSLSVTEEIADTVHDTSLIDTLSPPIDSEVTTGNYATHNVSVNVEQYSTSTQQTVTIEDLDTYTQTTEPESLHINFNTIEDTFTEMLIKYSHTDATLRPTIIKLQITRKSIKTVNTVNDILHKHLENRETVDIDNIHEVIYCAAMTVTTLHAKPKNKVNSNIHTANSTESNNSNKDKKQQWEKRLENKITILRKEIGQLIQYLNGNLTQRKQRKINPNNQSKDEIVYQLDTYKQKLQAYSKRLRRYKLSNQRKSDNNIFQTNQKLFYRNLNTENIHISQPPNIKDVQNFWENIWSKPVEHNRNTPWSRIEEQDASNIEPMAEVFISKDDVTQAIMKTLNWKAPGPDKIQNYWIKYFTSTHEYIANAFNHLLHNPQDTPSFFTQGITYLKPKDDDTTNPAKYRPITCLPTIYKLLTSIISHKLNHHIAHNNIIPEEQKGCSKGSMGCKEQLVIDTEIHNQVKQKKRNLYYAYIDYQKAFDSVPHSWLIEVLKMYKTDNGLIQFLQYTMANWTTTLNIHTNNKTLNTEHIKISRGIFQGDSLSPIWFCLALNPLSKILNGTDYGYNIDRENTNKLTHLLYMDDIKLYAANRQQLDHLLKLTEDFSRDIKMTFGTDKCRINSIIKGQHKDTEPYDLEQQLGKIDNMEPRETYKYLGYLQSTSINHTEIKSGLKTKYKQRLTKILKTKLSARNKTKAVNTYAIPVLTYSFGIIKWSDTELEALNTLTRTTCNKHNMHHIHSAVQRFTLKRKLGGRGFIDIKNLHYTQIDNLRTYFQTKANQSTLHKAIVNITTSGTPLQLNNSQFDPKQKILQDNQKIENWKKKAIHGKYPHHLDQDHVNRTASCTWLTKGNLFSETEGFLIAIQDQIIKTRNYSKYILKEAITTDKCRLCHQTTETIDHITGGCRILANKEYTHRHDNVAKHIHQQLALKHNLLETYTPYYKYKPKKVLENNTTKLYWDRDIITDCTVLSNRPDITLTIKSIKTTYLIDVSVPNTHNLKQKHTEKIQKYIQLADEIKQMWHQETVRIIPIIISSTGVVPTSLSAALKTLQLPDTTYIPLQKSIVIDTCSIVRRFLNPTSLSYAITAENNDVPSTLTLLS

SEQ ID NO: 1016 - protein, 1300 aa, Blastobasis lacticolella
MRRSIRIKNKNSAQCSTAAENGSAGNSSPISSTRSLFSTPSSSPKSFQNPTSSRSTTASPMSYDVTQEAPANYPESIYDIINAARNNANVESNYGAETDTYNIDTNTPARSVLQEMLPATTLAGRSRQRMKWTDLINRELLRCYYTVTQCETNLTAYRPLLHKMFIETFPELHHLSEQRLADQIRVIHRNHRISLAERERIKQLVSLSVTEDIADTVHDTSLIDTLSPPIDSEVTTGNYATHNVSVNVEQYATSTQQTVTIEDLDTYTQTTEPESLHINFNTIEDTFTEMLIKYSHTDATLRPTIPKLQITRKSIKTVNTVNDILHKHLENRETVDIDNIHEVIYCAAMTVTTLHAKPKNKVNSNIHTANSTESNNSNKDKKQQWEKRLENKITILRKEIGQLIQYLNGNLTQRKQRKINPNNQSKDEIVNQLDTYKQKLQAYSKRLRRYKLSNQRKSDNNLFRTKQKLFYRNLNTENINISQPPNIKDVQNFWENIWSKPVEHNRNTPWSRIEEQDASNIEPMAEVFISKDDVTQAIMKTLNWKAPGPDKIQNYWIKYFTSTHEYIANAFNHLLHNPQDTPSFFTQGITYLKPKDDDTTNPAKYRPITCLPTIYKLLTSIISHKLNHHIAHNNIIPEEQKGCSKGSMGCKEQLVIDTEIHNQVKQKKRNLYYAYIDYQKAFDSVPHSWLIEVLKMYKTDNGLIQFLQYTMANWTTTLNIHTNNKTLNTEHIKISRGIFQGDSLSPIWFCLALNPLSKILNGTDYGYNIDRENTNKLTHLLYMDDIKLYAANRQQLDHLLKLTEDFSRDIKMTFGTDKCRINSIIKGQHKDTEPYDLEQQLGKIDNMEPRETYKYLGYLQSTSINHTEIKSGLKTKYKQRLTKILKTKLSARNKTKAVNTYAIPVLTYSFGIIKWSDTELEALNTLTRTTCNKHNMHHIHSAVQRFTLKRKLGGRGFIDIKNLHYTQIDNLRTYFQTKANQSTLHKAIVNITTSGTPLQLNNSQFDPKQKILQDNQKIENWKKKAIHGKYPHHLDQDHVNRTASCTWLTKGNLFSETEGFLIAIQDQIIKTRNYSKYILKEAITTDKCRLCHQTTETIDHITGGCRILANKEYTHRHDNVAKHIHQQLALKHNLLDTYTPYYKYKPKKVLENNTTKLYWDRDIITDCTVLSNRPDITLTIKSIKTTYLIDVSVPNTHNLKQKHTEKIQKYIQLADEIKQMWHQETVRIIPIIISSTGVVPTSLSAALKTLQLPDTTYIPLQKSIVIDTCSIVRRFLNPTSLSYAITAENNDVPSTLTLLS

SEQ ID NO: 1017 - protein, 1013 aa, Hyposmocoma kahamanoa
MIIKYTGIDPTLRPIIPKLQTTRQIVKTVNIVNQIVDKHLQNTKVITFEEIHTAIYCAAITVTTLHDKKTKKTVDHASHTQNNKTDKQKKPQWEKRIENKITTLRKEIGQLTQYLNGNLTQKKQQKLNPTNKTRQELIDELDKNKQKLQAQAKRLKRYKKSNQRKSDNILFNNNQKIFYQKLNSENIVVTQQPDIEEIQKYWENIWSKPVQHNTHSSWTEIEEQEMEKIEPMPEITIDEDDVTQAIKRTLNWKAPGTDKIQNYWIKYLTSTHRHIANTLNGFIQNPHDMPAFLTQGTTYLKPKDSDTTNPAKYRPITCLPTMYKLLTSIITHKISSHISTNKIIPEEQKGCSKGSMGCKEQLIIDAEIHNQVKHKHRNLYYSYIDYQKAFDSVPHSWLLHILRIYKIDNSLIQFLQHAMTKWTTKLNVKTSTTTLSTTPIKIARGIFQGDSLSPLWFCLALNPLPRILNNSTYGYIIDRENKIKLTHLLYMDDIKLYASNKPELDHLLRLTEKFSTDIKMTFGTNKCKINSIIKGKHSRTDSFELELQRGTIHSMEPGETYKYLGYQQSTSINHTNIKNTLKTKYKQRLNKILSTQLSARNIVKAINTYAIPILTYSFGIVKWSDTELNALNTTTRTTCNRHNIHDIHSAVQRFTLKRKLGGRGFIDIKNLHYTQIDNLRTYFIRKANDSTLHKAIVLLPHSGTPLQLNNNQFDPKTRILKQEQKLENWKNKALHGKYPHQLEQDHIDQTASTTWLTKGNIFSETEGFLVAIQDQVIKTRNYSKYILKESIETDKCRLCHRYTESIDHVTGGCSVLANKDYTHRHDNVAKYIHQQLALKHSLTETHTPYYKYKPKNVLENNKVKLYWDRDIVTDRTILSNRPDITITVKSTKTTYLIDIAVPNTNNLKQKHTEKIQKYIPLADEIKQMWHQETIKIVPIIISSTGVIPKTLHTALKTIDLHPKTYISLQKSIVLDTCSIVRRFLNTPDFTNSTKNHHSLTSPHNTTTEPEYLA

SEQ ID NO: 1018 - protein, 1360 aa, Pyrgus malvae
MRLRNRQIPQVGTREGESRPGPSGSGSPAYSGGGNALHMTAQARTDAANTNNQNHTSSHISSDPPSPISSTESLFQSPSSSPHSFQFQSTSRSTTISPLSCDVAQEALAISPVPTLGNNDPTRPSENNINNRVNHYTSSSLNHNTPARSALQEMLPATTLAGKCRQRMKWTEQINTELLRCYYIVTCKETNFTAWRPLLHERFIQKFPDLSHLSEQRLSDQIRVIHRNNRIPASKRELIKQSISVTTTPHCSNVHQPTNNDISTENGCNSNIDTITDIVVQNNSITAQSVTSLQTHNHPTQTHPIPINTEHVQIQDFETTNTTPESINYTKVENTFKEMLIKYTYTDPTLRPIIPKLKITRHVIKTVSTINQIVDKHLSTKNTLSLEEIHVVIYCAAQTVATLYTSRLNNFENHTKDNNANRQIKSRKPKWEKRIETKIETLRREIGQLTQYLNGNLSLKKQYKLNPHSRSRDDITTQLDTDKQKLQAYSKRLRRYKKSNERKYHNKLFNNNQKLFYQKLSTDQIQITQPPDKNDVHNYWTKLWSNPVQHNTHLSWSEIEEEEHANVNPMSELKIDVEDVIQAVKKTLNWKAPGPDKIQNYWLKYISATHKYIANTFNHLLHNPQDTPLFLTQGITYLKPKDNDTTNPAKYRPITCLPTIYKLLTSIISHKLNTHITTNQIIPEEQKGCSKGSRGCKEQLVIDTEVHYQVKKKHRNLAYCYLDYRKAFDSVPHSWLIHILKIYKVDSILINFLQHTLKNWTTKLHLRTENTTLSTPIIKILRGIFQGDSLSPLWFCLAINPLSKILNKSGYGYIIDREHNVKLTHLLYMDDIKLYASNRTQLNHLLKLTEKFSADIKMSFGTEKCKINSIVKGKYDEAQPFDLHIQRGTIDRMEPMETYKYLGYQQSTSVNHTDIKNTLKVKYKQRLHKILNTQLSARNIVKAVNTYAVPILTYSFGIIKWSDTELEALNTTTRTVSYKHNIHHIHSALQRFTLKRKLGGRGFIDIKNLHYIQIKNLREYFLTKADTSPLHNAIVNLSQSGTPLQLNNHAFDPKIKILTQDQKIEGWKNKALHGRYPHQLDQDHIDRNASCTWLTRGNIFSETEGFLIAIQDQIIKTRNYAKYILKESVLTDKCRLCHQSTETIDHITGGCSALASKEYTHRHDNVAKHIHQQLALKYKLLESYTPYYQYKPKHVIENNAAKLYWDRDIITDRTILSNRPDITLTLKSSKTTYLIDIAVPNTHNLRQKHTEKIQKYIPLADEIKQMWHQDTVRIIPIIISSTGLIPKTLLTALKILDLKENTYIPIQKSIIIDTCSLVRRFLNPTSLIINDEHNTNTNTTSHNTTHMHTTADTQEPGYLA

SEQ ID NO: 1019 - protein, 1286 aa, Pyrgus malvae
MTAQSRAVAANNTNHAPSHIHPHSSASNSSSPISSTHSLFPSPSSSPHSYQLQPSSRSTTTSPQSCNVAQEAYANRPMPIDDYTDPTRESENSPENRVNHNTHSLYFNPNTPARSALQDMLPATTLAGKSRQRMKWTDEINKELLRCYYIITQKETNLSAWRPQLHQNFTKTFPELSHLSEQRLSDQIRVIHRNNRISPDERERLKQSIPDTITSHLTSEHNNISTNNEQETTINNHTPRVNDDHPDINTIHDTPISRHAANTTQHSHTTLHYIDTEHIQTKDADDINKKSDKIDYEKIENIFTEMLIKYSGTDPIHRPTIPKIQITRNVIKTVNTTNEIVDKYLHTEDTTNLEQIHEIIYCAAQTIATLHNTYFNKSNNHINNTSSNNSNKLVEVRKPRWEKQLENKISSFRKDIGQHTQYLNGNLSLKKQQKLNPKNLSKDKIIEQLDYYKQKLQAYSKRLRRYKKSNERKSHNKLFNTNQKLFYQKLTSEPIHINQPPDKEELHNYWKNLWSNSVQHNIHKPWTEIEEEEIEKIDPMLEIEINKDDVSQATKKTLNWKAPGPDKIQNYLIKYLSSTHEYIPKSFSHLIHHPQDTPSFLTQGITYLKPKGNDTSNPANYRPITCLPTIYKLLTSIITHKLETHITRNQIISEEQKGCTKGSKGCKEQLIIDTEIHNQVKKKHRNLFFSYIDYQKAFDSIPHTWLIHILKIYKVDNRLIHFLQHTMSNWSTKLHLRTLNATLTTQPIKILRGIFQGDSLSPLWFCLAINPLSKILNKTGYGYLIDRDRNIKLTHLLYMDDIKIYATNRTQLDHLLTLTENFSSDIKMSLGTDKCKVNSIIKGQYEETHPFLLHKQEGTIDRMGAIETYKYLGYQQSTGFNHTEIKNTLKSNYKQRLHKIFKTQLSARNIVKAVNTYAIPILTYSFGVNKWSDTELDALNTLTRIIGNKYNFHHIHSALQRFTLKRKLGGRGFIDIKNLHYSQIDNLRNYFLTKANVSPLHKAIVNIPQSGTPLHLNNNEFDPKLKILKDDKKIETWKAKALHGKYPHQLDQEHIDHAASCTWLTKGNIFGETEGFLIAIQDQIIKTRNYAKYILKESINTDRCRLCQQSIETIDHITGGCSILANKDYTHRHNNVAKHIQQQLALKYKLLETYTPYYQYKPKNVLENSVAKLYWDRDIITDRTILSNRPDITLTLKSSKITYLIDVAVPNTHNLKQKHTEKNQKYIPLADEIKQMWHQEVVRIPSIIISSTGVIPKTLKTALKLLDLPENTFVPLQKSIIIDTVL

SEQ ID NO: 1020 - protein, 1370 aa, Mimoniades versicolor
MRLRNRQIPQAGTREGESRPEPSSSGSPTYSGEGNVSHRTTQFRTVVVDKSRSHITSSLSHPSSPSHPSSLSHSSSTSNPSPPSCPSTPTSTSMSSTHSLYQTSNSSNSSNSSPATPTSHCAAYEAQAITRAPTTDVTDPTRIIQNTTDNRVKHNPHSLSPNNITPIRSVLREIFPTTTLAGKRRQRMKWTEKINKELLRCYYVVTNSETNLTAWRPLLHQKFTESLPELSYLSEQRLADQIRVIHKNNRISALEREDIKKSITLLLPNTINTNQINITSETIHPTSIDSTPTLNTHESNVCLSSEMLNIQHTQTTIQKPNTIPEMHHSYNNTEDFESQNCETINKNHIDYKKLENTFNEMLIKHSGIDPTLRPTIPKLQITRNVIKSVNTINEIMQENLQTKNTITLEDIHEVIYCGAQAVISVHTKHVNKLDKNIDKPNRHGNKVTKPQWERRLENKITMLRKEIGQTTQFLKGNLTQKKQRRLNPNNRSNDEITEQLDTKKQKLQALSKRLRRYKISNQRKLHNLLFNNNQKLFYQKLNKEHIQITLPPNKDDVQKYWENLWSKPVYHNPHTPWTNIEKQDTINVSPMPNIIINKDDVSQAIRKTLNWKAPGPDKIQNYWIKYFSSTHQYIANTFNYILNNPQETPNFLTQGITYLKPKDKDTSSPDKYRPITCLPTIYKLLTSIISHKLDMHITKNQIIPEEQKGCRKGTKGCKEQLIIDTEIHNQVKLTHRNLFFSYIDYQKAFDSIPHSWLIHILKIYKVDDKLIQFLQHTIKNWTTKLNLRTNTTSFYTEAIKISRGIFQGDSLSPLWFCLALNPLSKILNNSGYGYMVDKNSNTKITHLLYMDDIKLYAANRQQLDHLLRLTENFSADIKMSFGTKKCKINSIVKGQYKQTEPFDITTQGEKIDSMEPKETYKYLGYQQSTSINHKYIKNTLKTKYKQRLHQIFNTQLSARNKTKAVNTYAIPVLTYSFGVIKWSDTELEALNTLTRTAANKYNIHHIHSAVQRFTLRRKLGGRGFIDIKNLHYTQIDNLRTYFLMKANENTLIRAITNLPQAGTPLELNNTQFNPKLKIIKEEKKINNWKQKSLHGKYPYQLELEHVDRKASCSWLTKGNIFAETEGFLIAIQDQIIKTRNYSKYIIKEIIETDKCRLCHQTTETIDHITGGCSMLAHKEYTHRHDNVAKHIHQQLALKHKLLESYTPYFQYKPKNVLENSTVKLYWNRDIITDRTILSNRPDITLTLKPSKTTYLIDVAVPNTNNIKQKHTEKVQKYIPLADEIKQMWHQEVVKIIPVIISSTGVIPKTLKKSIQQLDLHENIYIPLQKSIIIDTCSIVRRFLNATTLSLQQNAQHTDSNTTIPNSVQVV

SEQ ID NO: 1021 - protein, 1218 aa, Apodemia arnacis
MMPATTLAGKSRQRMKWTQNINKELLRCYYIVTQCERDLTAYRPLLHAKFVEIFPELNHLSEQRLADQIRVIHKNNRISTPERERIKSSVSQILDQTHNIHHSNSTDIQTVSNNPTSQHTSTDLFTNTGSLHHLTSTGTQQSIIITPTCQTAVNSEHTTQTPQTQESTEIRIEPIYYEKIKNTFTESLIKYTGTDPSLRPPLPKLQITRHTIKTVNTVNEIVNNHLQTKDTVYSLEELHEIIYSAALTVTIIHSRKITKSENHTHTQNNVMNKPKVAQWEKRITNKIVGLRKEIGQLTQHLNGNLSQKKQRQLNVNSKSRDEIVEHLDMNKQKLLAYAKRLRRYKKSNERKSHNNLFNNNQKLFYQKLNTEHIKITENPDIGTIQTYWKNIWSKPIQHETHTPWVEIEDQEIRSIDPMDQILIDEEDVTRSIKKTLNWKAPGPDKIQNYWLKYLTTSHKYIASTLNDLIRNPQKIPKFFTQGVTYLKPKDHDTTNPSKYRPITCLPTIYKLLTSIITHKLNIHISQHKIIPEEQKGCSKNSRGCKELLVIDSEIHSQVKHKHRNLYYSYIDYQKAFDSVPHSWLLHVLKMYKVDNNIIKFLQHAMKKWTTTLNLKTCNKILSTKPIKIARGIFQGDSLSPLWFCLALNPLSRILNRTDYGYEIDRDNNIKITHLLYMDDIKLYAASRNQLEQLLRLTEQFSNDIKMTLGTDKCKVNSIIKGQHNQTHPYDLELNRGLIESMEPTDTYKYLGYQQSTAIPHSDIKNSLRSKYKQRLNKILNTQLSARNKTRAINTYAIPILTYSFGIIKWSDTELNALNTATRVACYKHNTHHIHSSVERFTLKRKLGGRGFIDISSLHHSQIENLREYFYTKSHESSLHKAIVNISNPGLPLQLNNRLFDPKHKIVSEIQKLENWKKKALHGRYPHQLDQDHIDKNASSSWLTKGNLFGETEGFLVAIQDQIIKTRNYTKFILKQTIETDKCRLCHQTTETIDHITGGCSVLANKEYTHRHDNVAKHIHQQLALKFKLLDSYTPYYKYKPKNVLENNIAKLYWNRDIITDRTVLSNRPDITCTLKSTKTTYLIDISIPNTHNLKQKHAEKIQKYISLADEIKQMWHQETVTIIPVIISSTGVIPKTLNTSLKILDLHKNTYVTLQKSTILDTCAIVRRFLNSTSLALQNVQDTNTNTIHLTITHTPIRDTQHTSTPLQAPITSHTNTS

SEQ ID NO: 1022 - protein, 1273 aa, Gesta gesta
MSCDVAREATALSPEPTTDITNHTRDSQNTPNIRVHNTHSSSPQINTPARSVLQDMLPATTLAGKSRQRMKWTDQINKELLRCYYVVTRNETDLTAWRPRLHDKFSESFPELSHLSEQRLADQIRVIYKNNRIPVNERRDIKYAVSLLFPNSSSPLDTDTNNTHSPNIYDRHTSLEHTTQTNTYPNEQTPNNEHTLTSTQQHHSMPQNHINIEHIQTQSIEIEDIRTESQHYEGIEDTFTEMLIKYTGMDPTLRPTIPKVQISRNIIKTISTLNDLIRIHLQNKEPTLEEIQNTIYCAAQTITVTHNKHIEPKNKKTNKDNTVTKREKPQWEKRIENKITILRKEIGQLTQLKNGNLSWKKQQKLNPNNKSMDEMIDQLDKNTQKLQAYSKRLRRYKISNQRKSDNKLFNNNQKLFYQKLQAEKIHITHPPNINDVENYWKDIWSKPIHHNTHTPYLEDQEVENIDPMPNIVIDKDDVTQAIRKTLNWKAPGPDKIQNYWIKYFTATHEHLANAFNKLIQHPQESPSFLTQGITYLKPKDNDTTDPAKYRPITCLPTIYKLLTSIITSKLNTHITQNQIIPEEQKGCSKGSKGCKEQLVIDTEIHHQVKIKQRNLFYSYIDYQKAFDSIPHSWLISILKFYRVDDTLIQFLEYTMKNWTTKLSIRTQNTTHYTKPIKILRGIFQGDSLSPLWFCLSLNPLSRMLNKTGFGYVIDKENNTKITHLLYMDDIKLYAANREQLDHLLKLTENFSTDIKMSFGINKCKINSIIKGRHNETHSFNLNTQGGSIEAMEPIESYKYLGYQQSISISHTEIKNTLKTKYKQRLHKILNTQLSAKNKIKAINTYAVPILTYSFGIIKWSDTELRALNVATRTASNKYNIHHIHSAVQRFTLKRKLGGRGCIDIKNLHYTQIDNLRTYFQMKANTSTLHKAIVNLSQSGTPLQLHNSLYDPKLKIITDDEKIEHWKAKALHGKYAHQIEQDHVDRNASCAWLTKGNIFGETEGFFIAIQDQIIKTRNYAKFIIKEPVQSDKCRLCHHTTETIDHITGGCSVLANKEYTHRHDNVAKHIHQLLALKHNLIKSYTPYYQYKPKSILENATAKLYWDREIVTDRTVLSNRPDLTLTLKSSKTTYLIDIAVPNTHNLKNKHTEKIQKYLNLADEIKQMWHQETVRIVPIIISSTGVVPKNLKTALKLLDLHENTYIPLQKSIVIDTCSIVRRFLNPSSLTLHEEERNPNVIHALSSPTTHTRNLPNIHDTPNTRTTHQPIIQTHRKN

SEQ ID NO: 1023 - protein, 1194 aa, Tagiades litigiosa
MLPATTLAGKSRKRMKWTDPINHELLRCYYVVTNCEKNLTAFRPLLHKKFTETFPELIHLTEQRLADQIRVIHKNNRISIQDRATIKRSISQTYSEIQTITDNNQSTINNAQDSHIPQVSDNSLKTPTHIMQPSAIAQTITQSIHQNTVVAPLINEHIETRDIDLVIEETLTYRKIEDTFTETLIKYTGTDPTLRPAIPKLQTTLKFIKTVNTINDIIKIHLQNKAVVTLEEIHETIYCAALTVTILNKKCKTKLYNKSITNEKTSVRKPNKIPQWQKRLENKITELRKIIGKLTQYLKGNLSQKKQQKINLNNKSRDEIVDELDTFKQKLQAYSKRLQRYKLSNKRKSDNMLFNTNQKVFYRNLNNQNLQINEPPDVAKVQHYWENIWSKPIHHNPQPSWTAIEEREVQNVDPMPEIVINKFDIAQVIKNSLNWKAPGPDKIQNYWLKYFTATHEYIAKSFNHLLHNPMDIPPFLTQGITYLKPKDEDTSNPGKYRPITCLPTIYKLLTSIIAYKLNLHITHNKIIQEEQKGCSKGSMGCKEQLVIDTEIHNHAKQKHKNLYYAYIDYQKAYDSVPHSWLLHILKIYKIDNTLIQFLEHTMSKWNTKLHIHMNQTSFNTPSIKIARGIFQGDSLSPLWFCLALNPLSRILNRTGYGYVIDKESNTKLTHLLYMDDIKLYAMNRQQIDELIRLTEKFSSDIRMKFGIDKCKINSIIKGQHKETYSHKLELQAGIIESMDTKETYKYLGYQQTTGINHTEIKSTLKIRYKQRLYRILNTQLSARNKTKAINTYAIPVLTYSFGIVKWSDTELEALNTMTRSVCYKHNYHHIHSAVQRFTLKRKHGGRGFIDIKNLHYSQIDNLRSYFYTKAEECSLHNAIINLSHSGTSLQLNNRQFEPKHKIITEEQKLENWKKKALHGKYPHQLEQEHVDRNASCTWLATGNIFGETEGFMIAIQDQIIKTRNYSRHILKQAIDTDKCRLCHQVTETIDHITGGCSTLANKEYTHRHDNVAKHIHQQLALKYKLLDTYTPYYQYKPKNVIESSTVKLYWDRDIVTDRTILSNRPDITLTLKTTKTTYLIDVSVPNTHNLKQKHAEKIQKYIPLSDEIKQMWHQETVKIIPIIISSTGVIPKTLKAALKQLELPERTYIPLQKSIVLDTCSIVRRFLNPTSLPLTVNHHETNHTNTTTQNNLHT

SEQ ID NO: 1024 - protein, 806 aa, Astraptes hopfferi
MENVEPMPEISIDKDDVLLAIKKTLNWKAPGPEKIQNYWIKYLPATHQHIANAFNHILCSPQDTPCFLTHGITYLKPKDDDTTNPAKYRPITCLPTIYKLLTSIIAHKLNLHITRNHIIPEEQKGCCKGSKGCKEQLVIDTEIHTQAKQKHRNMYYSYIDYQKAFDSVPHSWLIHILKIYKVDNKLISFLLHAMKNWTTKLTLHTNNISLSTQKIKILRGIFQGDSLSPLWFCLALNPLSRILNKTGSGYVVDRENNIKLTHLLYMDDIKLFAANKQQLVHLLRLTENFSTDIKMTFGTNKCKINSIIKGQHHETDPFQLETQGGTIDSMEFRETYKYLGYQQSTSINHADIKNALKTKYKQRLHKIFNTQLSARNKIKAVNTYAIPILTYSFGIVKWSDTELEALNTATRTISNKHNIHHIHSAVQRFTLKRKLGGRGFIDIKNLHYTQIDNLRTYFLLKASESALHKAIAHLPQSGTPLQLNNIQFDPKLKILKDDQKIENWKKKALHGKYPHQLEQDHVDYNASCTWLTKGNIFAETEGFLVAIQDQIIKTRNYSKYILKEAIDSDRCRLCHQNTETIDHITGGCSVLANKEYTHRHDNVAKHIHQQLALKYKLLESYTPYYQYKPKNVLENNTTKLYWDRDIVTDRTILSNRPDITLTLKSSKTTFLIDIAVPNTHNLKQKHTEKIQKYIPLADEIKQMWHQEHVRIIPIVISSTGVIPKTLKNALKLLDLHENTYIPMQKSIVIDTCSIVRRFLNPTTLTLQTHQDTHSSTQNSTTRTQNTQIHTQTMHLIRSSSPTPIIS

SEQ ID NO: 1025 - protein, 805 aa, Cycloglypha thrasibulus
MPSIKISKDDVFQAVRKTLNWKAPGPDKIQNYWIKYLTATHEPLANAFNNIIQNPQDTPLFLTQGITYLKPKDNDTTNPSKYRPITCLPTIYKLLTSIISFKLNTHITRNHIIPEEQKGCNKGSRGCKEQLIIDTEIHHQVRVKQRNLFYSYIDYQKAFDSVPHSWLIDILKLYRVDNTLVHFLQHSMKNWTTKLYLQTQNTSLYTQTIKILRGIFQGDSLSPLWFCLSLNPLSKILNKTGYGYVIDRENDTKITHLLYMDDIKLYAANRDQLEHLIKLTEKFSTDIKMSFGTNKCKINSILKGQHNETNPFYLNMEGGMIESMESKDTYKYLGYQQSTSLNHTEIKNTLKTKYKQRLNKILSTQLSARNKIKAINTYAIPILTYSFGVIKWSDTELEALNTATRTASNKHNIHHIHSSVQRFTLKRKLGGRGCIDIKNLHYTQIENLRSYFYNKSKTSILHKTITNLSQSGTPLQLRNNLFDPKLKILKDDQKIETWKAKSLHGKYPHQLDQDHVDRDASCTWLTKGNIFGETEGFLIAIQDQIIKTRNYAKYILKEAIESDKCRLCHQSTETIDHITGGCSVLANKEYTHRHNNIAKHIHQQLAIKHNLINTYTSYYQYKPKSVLESTTVKLYWDRDIITDRTVLSNRPDITLTLKSSKTTYLIDIAVPNTHNLKNKHTEKIQKYLNLADEVKQMWHQETVKIVPIIVSSTGVVPKNLKSALKLLDLHENTYIPLQKSVVIDTCSIVRRFLNPSSLPFHNDQHTPNIVSHINTNTHTHNTSNTNHTLNALITQHSNHANISHF

SEQ ID NO: 1026 - protein, 1374 aa, Cecropterus dorantes
MRLRNRQIPQAGTREGESRPGPSSSGCPTYSGGGNVSHKTAQSSTVAVDKPLTPSHPSSPISSTHSLFPSPSSSPYSYQFQPSSSRSSTITSLSCDVAQEAHANSPVPTTGSINPTRVTQNNQSTRVIHSTHSPSHTTSTPARSVLQDMLPATTLAGKSRQRMKWTDEINKELLRCYYIVTKMETNLTAWRPQLHKTFSENVPALSHLSEQRLADQIRVIHKNNRIPAPEREQLKQSVSLLISSSLNSLSTQIITRNDDDVHSNINITLSTNNQLITDSHNQTLNPQHMETITHHATINTQACESSEHFQTQDFEPTNKRLDSVDCNKIQNVFTEMLTKYTGTDPTLRPNIPKPQTTRNFIKTVNSINEIIDQYLQTKEFIAIGEIHEIIYCAAQTVVNIHTNSDKILENCTKINNSNQKKPQWEQRIENKIIALRKEIGQLTQYLHGKLSQKKQKKLNPNNRSRDEIVEQLDNSKQKLQAYTKRLRRYKKSNERKSHNKLFNTNQKLFYKKLNSDQIHITQPPNKIDIQNYWKNIWSSPVQHNSNTSWTDIEEQEMEKIDPMPEITINKNDVLLAIKKTLNWKAPGPDKIQNYWIKYLPATHEHIANAFNHIIGNPQDTPHFLTQGITYLKPKDDDTTNPAKYRPITCLPTIYKLLTSIIAHKLNSHITRNHIISEEQKGCCKGSKGCKEQLVIDTEIHTQVKQKHRNLYYSYIDYQKAFDSIPHSWLIHILKIYKIDITLIQFLRHTMKNWTTKLTLHTKNISLSTQKIKILRGIFQGDSLSPLWFCLALNPLSRILNKTGYGYVIDKDTNVKLTHLLYMDDIKLYAANRKQLDHLLKLTENFSTDIKMTFGTNKCKINSIIKGQHQETDPFQLDTIGGIIDSMEFRETYKYLGYQQSTSINHSQIKDTLRTKYKQRLHKIFNTQLSARNKIKAVNTYAIPILTYSFGIVKWSDTELEALNTATRTISHKHNIHHIHSAVQRFTLKRRLGGRGFIDIKNLHYTQIDNLRSYFIFKSNESALHKTIVHLPQSGTPLQLNNSQFDPKLKILKDDQKIENWKKKALHGKYPHQLEQDHIDYNASCTWLTKGNIFGETEGFLVAIQDQIIKTRNYAKYILKEAIDTDKCRLCHQNTETIDHITGGCSVLANKEYTHRHDNVAKHIHQQLALKHKLLESYTPYYQYKPKNVLENNTAKLYWDRDIITDRTILSNRPDITLTLKSSKTTFLIDIAVPNTHNLKQKHTEKIQKYIPLADEIKQMWHQESVRIIPIVISSTGVIPKTLKTALKLLDLHENTYIPMQKSIVIDTCSIVRRFLNPTTLTLQTHQDTHSDTSTQESLPRVIIQNTQTHTHNATNTLIITHPNHTNTPESGYLA

SEQ ID NO: 1027 - protein, 1209 aa, Apodemia mejicanus
MMPATTLAGKSRQRMKWTHNINKELLRCYYIVTQCERNLTAYRPLLHAKFVEHFPELNHLSEQRLADQIRVIHKNNRISTPERERIKSLVSQTLDQTYNTQRTSRTGTQSTSNTISSQQPCIDPLIDTDSLHHLTPTNSQQSIVITPTCQTVENSVHAFQTLETQDSTGRMLDSKCYEKIKNTFTESLIKYKGTDPSLRPPLPKLQITFHTIKTVNTVNEIIDNHLQTKDTIYTLEELHEVIYSAALTVTIIHSGKNIKSDSDIIHTSNNVRDKPRISQWEKRIEKRIVGLRKEIGQLTQYLNGSLSQKKQRQLNFSCKNIDETVEYLDVKKQKLLAYAKRLRRYRKSNERKYQNNLFNNNQKLFYRKLNKENIKITENPDIAAIQTYWENIWSKPIQHATHTSWAEIEDQETRHIDPMNEITISEEDVTHSIKKTLNWKAPGPDKIHNYWLKYLTTIHKYIANTLNDLIHNPEKIPKFLTQGVTYLQPKDLDTTNPSKYRPITCLPTIYKLLTSIIANKLNSHISQHKIIPEEQKGCCRNSRGCKELLIIDSEIHNQVKYKHRNLYYSYIDYQKAFDSVPHSWLLHVLKIYKVDSNIIKFLQHTMTRWITTLNLKTYDKMLSTSPIKIARGIFQGDSLSPLWFCLALNPLSRILNRTDYGYKIDKDNNIKISHLLYMDDIKLYAANRNQLDQLLRLTEQFSNDIRMTFGTDKCKINSIIKGQHNQTHPYDLELNSGLIESMQFKDTYKYLGYQQNTTITHQDIKKSLTNRYKHRLNKILSTQLSARNKTKAINTYAIPILTYSFGIVKWSDTELNALNTVIRVSCYKHNIHHIHSSVERFTIKRKLGGRGFIDISSLHYTQIENLREYFYSKSQQCSLHKAIVNISNSGSPLQLNNRLFNPKDKIVSDTLKLENWKKKALHGRYPYQLDQDHIDKNASSSWLTKGNIFGETEGFLLAIQDQIIKTRNYSKFILKQTIETDKCRLCHQTTETIDHITGGCSVLANKEYIHRHDNVAKHIHQQLALKFNLLDSYTPYYKYKPKNVLENNIAKLYWNRDIITDRTILSNRPDITCSLKHTKTTYLIDISIPNTHNLKQKHTEKIQKYISLADEIKQMWHQETVTIIPIIISSTGVIPKTLSTSLKILELHKNTYIALQKSTILDTCAIVRRFLNSTSLAPQNAQDTNTDTNHLQILHTPIHDTQHSLTQHL

SEQ ID NO: 1028 - protein, 1331 aa, Hewitsoniella migonitis
MRLRSRNTLPQAGTRNGESRPEPTTSGCPTYSGGGTVSPKPAQSNTVADRNTTQSLNTPHPPIPSSPSHNSQYPHSSSSSSLLPSPSRIITVTPMSRDVVQEAHANSPEPINDITNPTCIFKANFIPTHVDTYTKKHHTTINTPARSVLQEMFPATTLAGKSRQRMKWTYEINRELLRCYYLATDCENNLTIYRPTLRKKFTEIFPELSHLTEQRLADQVRVIHRHNRISGAERKALKQSVAQTLTHTTSQSSLNNKQTLHDSEVNNTQTILQATQQSFGTTQEGDNITQEANMIGSQEICEPIQRPDVTVPRETINYNTIENTFTETLIKYTGTDPTRRPQIPKVQITKKSIKIVNTINDIIKIHLQNQEATIEKIHEIIYCAALTTTLLIAECDQKKECVKINNNKENSEDKQIIPKWKRRLENKIVTLRKTIGKLTQYLKGNLSQKNQYKVNPNNKNRDEIVDELDINKQKLQAYSKRLQRYKVSNKRKSDNISFNINQKLFYSSLNTENQKTTKPPNITEVQNYWENLWSKPAQHNFHTSWAAIEKQEVQRIDPMPHINITKSDVTQAIKNTSNWKAPGPDKIQNYWIKYLTSTHEHIAHSFNHLLCNPQNMPPFLTQGITYLKPKDKDTTNPEKYRPITCLATTYKLLTSIISHKLNSHLTHNKIIQEEQKGCSKGSMGCKEQLIIDTEIHNQVKQKHRNLYYAYIDYQKAFDSVPHSWLIHVLRIYKVDNTLIHFLQQTMAKWNTKLHIRNNNMALSTPNIKISRGIFQGDSLSPLWFCLALNPLSRILNNTEYGYNLERENYVKLTHLLYMDDIKLYAANRQQIERLIKLTEEFSTDIKMTFGIDKCKINSIIKGQHKETDPYKLKVQAGIIENMDPKELYKYLGYQQSTSINHTEIKSGLKIKYKQRLKNILNTQLSARNKTKAINTYAIPILTYSFGIIKWSDTELDALNSTTRTACNKYNFHHLHSAVQRFTLKRKLGGRGFIDIKNLHYSQIDKLRSYFYTKANSCSLHKAIINLPQSGTPLHLNNIQYKPKEKIVTDEQKIVTWKEKALHGRFPHQLDQEHIDRNASCTWLTKGNIFSETEGFLIAIQDQVINTRNYSRHILKKAIETDKCRLCHQASETIEHITGGCSTLANKEYTYRHDNVAKHIHQQLALKYKLLETYTPYYKYKPKNVIENDKAKLFWDRDIITDRTILSNRPDITLTLKSTKTTYLIDIAVPNTHNLKQKHAEKIQKYIPLADEIKQMWHQQNVRIVPIIISSTGVVPKTLKTALHLLDLPENTYIPLQKSIVIDTCSIVRRFLNPSSLPLSSNHDINLTNTIT

SEQ ID NO: 1029 - protein, 1034 aa, Cecropterus phalaecus
MLIKYTGTDPTLRPIIFKPQTTRNVIKTVNSINEIIDKYLKTKHSMNIGEIHEIIYCAAQTVVELHTKRVKTLENSSKSNNNNQRKPHWEKRIENKIITLRKEIGQLTQYLNGNLSQKKQKKLNPNNRSKDEILEQLDNSKQKLQAYTKRLRRYKKSNERKSHNKLFNTNQKLFYQKLNPEQIHITQPPDIIDIQNYWKNIWSIPVQHNTHTSWTEIEEQEMENIDRMPEITINKDDVLLAIKKTLNWKAPGPDKIQNYWIKYLPATHEHIANALNHILCNPQDTPYFLTQGITYLKPKDDDTTNPAKYRPITCLPTIYKLLTSIIAHKLNSHITLNHIIPEEQKGCCKGSKGCKEQLVIDTEIHTQVKQKHRNLYYSYIDYQKAFDSIPHSWLIHILKIYKVDIKLIQFLLHTMNNWTTKLTLHTNNMCLTTQKIKILRGIFQGDSLSPLWFCLALNPLSRILNKTNYGYVIDKDTNIKLTHLLYMDDIKLYATSRTQLDHLLRLTENFSTDIKMTFGTNKCKINSIIKGKHQETDPFYLETIGGTIDSMEFRETYKYLGYQQSTSINHTEIKNTLKTKYKQRLHKIFNTQLSARNKIKAVNTYAIPVLTYSFGIVKWSDTELEALNTATRMISHKHNIHHIHSAVQRFTLKRKLGGRGFIDIKNLHYIQIDNLRSYFLLKSDESPLHKAIVHLHQAGTPLQLNNKQFDPKLKIIKDDQKIEDWKKKALHGKYPHQLQQDHIDYNASCTWLAKGNIFGETEGFLVAIQDQIIKTRNYAKYILKEAIDTDKCRLCHQNTETIDHITGGCSVLANKEYTHRHDNVAKHIHQQLALKHKLLESYTPYYQYKPKNVLENSTVKLYWDRDIVTDRTILSNRPDITLTLKSSKSTFLIDISVPNTHNLKQKHTEKIQKYIPLADEIKQMWHQESVRIIPIIISSTGVIPKTLKTALKLLDLHENTYIPLQKSIVIDTCSIVRRFLNPTTLTLQTHQETDSGTPTQDSCPRANTQNTQTHTHDVTNTLIHTHPNHTNTHE

SEQ ID NO: 1030 - protein, 1356 aa, Astraptes naxos
MRLRNRQIPQAGTREGESRPGPSGSGCPTYSGGGNVSHKTAQSSTVAADKPHTLSHSSSPISSTHSLFPSPSSSPYSYQFQPSSSRTSTITPLSCDVAQEAHANSPVPTTDSTNPTRVLQNNQSNRVNHSTHSPSHITNTPARSVLQDMLPATTLAGRSRQRMKWTDEINKELLRCYYLVTQNESNLTAWRPQLHRIFTETIPVLSHLSEQRLADQIRVIHKNNRIPAPEREQIKQSVSLLISSNSNSLNTYTTSTNNNNQTLNSQRTETITHDSTTETQAHQSCENSEHFTITHHAITETQVQQSCESSEHFQAHDSEPINRPLDSVDCKKIEMLFKEMLIKYTGTDPTLRPTISKPQTTGNFIKNVNSINEIIDKYLQTKDSITIDEIHEVIYCAAQTITLIHTKSFKTLEDNLSNNNRNKRKPQWEKRIENKIITLRKEIGQLTQYLNGNLSQKKQQKLNPNNKSRDEIIEQLDNSKQKLQAYTKRLRRYKKSNERKSHNKLFNTNQKLFYKKLNSEQIQITQPPDKIDMQNYWKNIWSIPVQHNSHTSWTEIEEQEMENIDPMPEITIDKDDVVIAIKNTLNWKSPGPDKIQNYWIKYLPATHEHIAKAFNHILCNPQDTPYFLTQGITYLKPKDDDTTNPAKYRPITCLPTIYKLLTSIIAHKLNTHITLNHIIPEEQKGCCKGSKGCKEQLVIDTEIHTQVKQKHRNLYYSYIDYQKAFDSVPHSWLIHILKIYKVDNRLIKFLLHTMKNWTTKLTLHTNNISLSTQKIKILRGIFQGDSLSPLWFCLAINPLSRILNKTGSGYVIDRDNNIKLSHLLYMDDIKVYAANRQQLVHLLRLTENFSTDIKMTFGTNKCKINSIIKGQHHETDSFQLEKQGGKIDSMEPRETYKYLGYQQSTSINHTDIKNTLKNKYKQRLHKIFNTQLSARNKTKAVNTYAIPILTYSFGIVKWSDTELEALNTVTRTISNKHNIHHIHSAVQRFTLKRRLGGRGFIDIKNLHYTQIDNLRTYFLLKAHESALHKAITRLPQSGTPLQLNNRQFDPKLKIIKDDQKIENWKKKALHGKYPHQLHQDHIDYNASCTWLTKGNIFAETEGFLVAIQDQIIKTRNYSKYILKEVIDTDRCRLCQQNIETVDHITGGCSVLANKEYTHRHDNVAKHIHQQLALKHKLLETYTPYYQYKPKNVLENNIAKLYWDRDIVTDRTILSNRPDITLTLKSSKTTFLIDIAVPNTHNLKQKHTEKIQKYLPLADEIKQMWHQEHVKIIPVIISSTGVIPKSLKASLKLLDLHENTYIPIQKSVVIDTCSIVRRFLNPTTLTLQTHQDSSIPTHNTSTHIRNTDTRTHNSLNV

SEQ ID NO: 1031 - protein, 1328 aa, Cephise aelius
MRLRNRQIPQAGTREGESRSEPTGSGCSTYSGGSTVSHRTVQPRTVAVDKSHTPSPSSSPTSSTHSLFPSLSSSPYSFQQQSSSRSNTVTPLSCDVAQEAHANFPVPIHDITNTTRVTQDNQSNRVNHNTQSHIINNTPARSVLQEMLPATTLAGKSRQRMKWTDEINRELLRCYYIVTCNETNLTAWRSLLHRRFVESIPELNHLSEQRLADQIRVIHRNNRIPASEREQMKQSVYSLISVSESLSDHTVPENIDESNINNTLPIINLQSNVEALNQSHNIQHTSNTTHQTHITQVSQPLENSEHNQTQDLETINKSQNLIDYTKIENTFTEMLLNYAGTDPTLRPIIPKLQISRNVIRSVNAINEIVDKYLQTKDTITIEEIHEVIYCAAQTVTTLHTKYVKNTENTTNKNNSHRIGNQRKPQWEKRIENKIITLRKEIGQLTQYLNGNLNQKKQQKFNRNNISKDDLIEQLDNNKQKLQAYSKRLRRYKISNERKSHNKLFNINQKLFYQKLNAENISQVTQPPNKEDIQNYWKKLWSNPVQHNVHSPWAAIEEQEMENIAPMPEIIINKDDVSHAIKRTLNWKAPGPDKIQNYWIKYLPATHKHIANILNHIIRNPQETPTFLTQGITYLKPKDNDTANPEKYRPITCLPTIYKLLTSIISYKLNIHITQNHIIPEEQKGCSKGSRGCKEQLVIDTEIHTQVKQKHRNLYYSYVDYQKAFDSVPHSWLIHILQIYKVDNRLIHFLQHTMKNWTTNLSIRTNNTSLGTQKIRILRGIFQGDSLSPLWFCLAINPLSRILNKTNFGYVIDRHNNIKLSHLLYMDDLKLYAANREQLDQLLKLTEKFSTDIKMTFGTNKCKINSIIKGQHKNTDPFELRIQGGLIDSMVPKETYKYLGYQQSTSINHTDLKNELKTKYKQRLNKVLNTQLSARNKIKAVNTYAVPILTYSFGVVKWSDTELEALNTLTRTASSKHNIHHVHSAVQRFTLKRKLGGRGFIDIKNLHYTQIDNLRTYFLMKADESTLHKAIVQLSQSGTPLQLNNTQFDPKLKILTDEQKIENWKKKTLHGKYPYQLTQNHVDFNASCTWLTKGNIFGETEGFLIAIQDQIIKTRNYSKYILKETIDTDKCRLCHQVTETIDHITGGCSVLANKEYTHRHDNVAKHIHQQLALKYKLLESYTPYYQYKPKNVLENKTAKLYWDRDIRTDRTILSNRPDITLTLKSCKATFLIDVAVPNTHNLTQKHTEKVQKYIPLADEIKQMWHQESVTIVPIIISSTGVIPKTLKTALKILDLHENTYIPIQKSIIIDTCSIVRRFLNPTTLTLQNG

SEQ ID NO: 1032 - protein, 1346 aa, Hesperia comma
MRLRNRVLPQAGTHTGESRPGPSGSGCPTYSGGGTVSLRSAQSSTVAATGDYTSPRHHPNSSPISSTHSLFPSPSSSPRSYEIHETSRSTTTSPMSCDVAQEAMANSLAPTTDITNSTQILQNLTNRVDQNIHNTPTSSLDINTPARSVLQEMLPATTLAGKSRQRMKWTKEINIELLRCYYTITRCETDMTAWRPLLHQKFTEQFPELSHISEQRLADQIRVIHRNNRIPAIERECIKQSILPTLRTTNVIENIMEEVQTQGMITQNTTNLHTQSYSHDHQTLTPTQTILPLESNEHIQTQENEQIYTTVKAINYEQIENIFTEMIIKYTGTDPTLRPTIPKLRTTRQMIKTVNTINEIVNKYFQTKETITLVEVHEVIYCAAITVATLHDEKTVKIVKHTSPKPDNKTDKLKEPQWKRRIENKISSLRREIGQLTQYLNGNLTKKKQQKLNPSNKDRQEIINQLDTNKQKLQAQAKRLQRYNKSNQRKTDNIIFRNNQKLFYQRLNSDNITVTQKPDIAHVQKYWENIWSKPVQHNTHTSWTKIEEQEVENIQYMQEITVSKEDVTNAIKRTLNWKAPGPDKIQNYWIKYLTSTHIHIANTFNNIIKNPHEMPSFLTQAVTYLKPKDNDTINPANYRPITCLPTIYKLLTSIITHKINIHITTNKIIPEEQKGYSKGSMGCKEQLIIDAEIHNQVKVKNRNLYYSYIDYQKAFDSVPHSWLLHVLKIYKIDNNLIQFLQHAMSTWKTKLNLRTNSTTLSTPHIKIARGIFQGDSLSPLWFCLALNPLSRILNSSTHGYTLDRENNIKITHLLYMDDIKLYASSKQELDHLLRLTEKFSTDIKMSFGTTKCKINSITKGQHNKTDSFELELQGGLIDSMEPKETYKYLGYQQSTSINHGDIKNTLKTKYKQRLNKIFSTQLSARNIVKAVNAYAIPILTYSFGIIKWSDTELDGLNTVTRTISNKHNIHHIHSATQRFTLKRKLGGRGFIDIKNLHYTQIENLRTYFIHKANDSTLHRAIVNMPHSGTSLQLNNKQFDPKTKILKDEQKFENWKKKALHGKYPHQLDQDHVDRNASLAWLTNGNIFSETEGFFVAIQDQIIKTRNYSKYILKETIETDKCRLCHRYTESIDHITGGCSALANKEYTHRHDNVAKYIHQQLAIKYHLTDTHTPYYKYKPKNVLENRNVKLYWDRDIITDRTILSNRPDITLTIKSIKTTYLIDIAVPNTNNLKEKHTEKIQKYIPLADEIKQMWHQEVIKIVPVIISSTGIIPKTLHNALSTLDLHPKTYIPLQKSIILDTCSLVRRFLNPTSLTLSHLTDIITTTPTPTQTHNTQTDTHHSHSSQ

SEQ ID NO: 1033 - protein, 1359 aa, Erynnis tages
MRLRSGYKLPQAGTGANRTGESGPEPSSSGSPTYSGGDIVSQTSAQSQAVAVNNSPSSHTPTHSSSPISSTHSLFQSPSSSPQSYELTHSMSHSSSYSSISCDAAQEATAPSPEPTTDITNPTRDSQSTINIRVDHTIPSSAPQINTPARSVLQDMLPATTLAGKNRQRMKWTDQINRELLRCYYLVTHNETNLTAWRPSLHQMFTETYSELSHLSEQRLADQIRVIHKNNRVSVSERENLKRTVSLLLDTTNTSNHYIQTNNLHNQSPINNTHTIQDNITQTITNTNSHTLNTSPMLVSTQQINKTQTHVDINHIDTQTSEITNAQQEPISNDVIENTLTEMLIKYKDTDPLLRPTIPKLQISRRAIITVQNTNKIVGEHLKNIETVTLEDIQDIIYCAAQTITKLHNKYSKQTNIKRSNININNTILKQNKPQWEKRIENKITTLRKEIGQLTQLIKGNLSHKKQKKLNPNNKNFDELTEQLDTSKQKLQAYSKRLRRYKISNQRKSDNKLFNTNQKLFYQKLQTEQIHITQPPKPDDIQKYWKNVWSNPVQHNIHTSWNEIVEEETTTIDPMTEIEINKHDVTQAVRKTLNWKAPGPDKIQNYWIKYLTATHDYLANIFNHLIQNPQDTPSFLTRGVTYLKPKDHDTTNPAKYRPITCLPTIYKLLTSIISHKLSIHITQNNIITEEQKGCSKGSRGCKEQLVIDSAVHNQIKQKHRNLFYSYIDYQKAFDSVPHSWLIHILKLYKVNNRLIEFLQYTMGNWTTTLSLRAHNTTLSTHPIKILRGIFQGDSLSPLWFCLALNPLSKILNKSGHGFVIDRDKNIKLTHLLYMDDIKLYAANRHELDHLLQLTEQFSADIKMTFGTDKCKINSIVKGKHNETEVFGLCQQEGTIDNMIAKEAYKYLGYAQSTSINHTDIKTTLKSKYKRRLHIILNTQLSARNKVKAINGYAIPILTYSFGIIKWTDTELEGLNIATRSACNKHNIHHIHSALQRFTLKRKLGGRGFIDIKNLHYTQIHNLRTYFIAKANDSALHNAIINLPESGTPLQLNNRQYDPTLKILSDDKKIENWKNKALHGKYPHQIQQDHIDKSASCTWLTKGNLFGETEGFLVAIQDQVIKTRNYTKYILKQTIDTDKCRLCHQNTETIDHITGGCNVLANKEYTHRHDNVAKHIHQQLALKHKLLNTYTPYYQYKPKKVIENSIAKLYWDIDIRTDRTVLSNRPDITLTLKQSKTTYLIDVAVPNTHNLKQKHTEKIQKYISLADKIKQMWHQETVRIIPIIISSTGVIPKSLKSALKLLDLHENTYIPLQKSIIIDTCSIVRRFLNPTSLTLQDENHTNHHSVTHNSSTPHPHTQNT

SEQ ID NO: 1034 - protein, 1344 aa, Lycaena phlaeas
MRLRNKKVLPQAGTSVNRAGESRTRLTASGSPTYSGGGTVSQEAAQCQTVAAIGTTPVESTSHSSTPTSSRHSLFQSPSSSPQWSGYESTSSSSSSSLSCDVAQEASALYTEPITDTMQTTRISENYTLINTVDTNTPSSNSQIDTTARSVLREMLPATTLAGKSRQRMKWTNQINQELLRCYYIVTHCESNLTAYRPVLRQRFIQIFPELSNITEQRLADQIRTIHKNNRISASEREKIKQSVLHATNITQELIQPIINNDTHQINTNFSINNSREYTPDSHSLLENSQQILSITQTHDSITTRNIHTIPIESNDQNNTSEETINVDKIENAFNEMIIKYSGTDPTLRPTIPKLQITRATIKTVNIINDIVGKYLNNKITVTIEEIHEIIYCAAMAVISIHRKQEQICSNNASSTHRITANREKKPHWEKRLIDKISALRKQIGLLTQYLNGNLNRKKQQKLNPSNKSKDEMTDQLDICKQKLQANSKRLRRYKLSNKRKSDNKMFNNNQKLFYKNLNTENINITQAPNLSDLQKYWENIWSNATDHNHNTSWMLTEEQEVSDIEIMPEITIEKEDVTLTLKNTLNWKAPGPDKIQNYWLKYFTTTHQYLAQALNNLINHTHNIPEFLTQGITYLKPKHKDTTNPANYRPITCLPTIYKLLTSIISHKIQSHIVEYNIIPEEQKGCSKGSRGCKEQLIIDTEIHSQVKQKHRNLHYAYIDYQKAYDSVPHSWLLHILKIYKIDNRLIKFLQSIMAKWTTKLALKTNNATLSTPSIKITRGIFQGDSLSPLWFCLALNPLSRILNKTGYGYVIDRENGIKLTHLLYMDDIKLYAANRQELDHLIKITETFSDDIRMKFGIDKCKINSIIKGQHKNTTPHILELQEGTIDSLEHKDTYKYLGYLQSTSINHTDIKTTLKSKYKHRLNKILNTQLSARNKTKAVNTYAIPILTYSFGVIKWSDTELEALNTLTRISCYKHKIHHIHTAVQRFTLKRKFGGRGFIDIRNLHYSQIHNLRSYFLSKANNSNIHKAIVKISNSGTPLQLNNDQFDPQQKILKDEQKIENWKKKALHGKYPFVLQQEHVDKNASCTWLMKGNIFGETEGFLIAIQDQVIKTRNYARHILKEQIGTDKCRLCHQSTETIDHITGGCSVLANKEYTHRHDNVAKHIHQQLALIHKLLDTYTPYYKYKPKNVLENNTTKLYWNRDIITDRTILSNRPDITLTLKHTKITYLVDIAVPNTHNLKQKHTEKIQKYIPLADEIKQMWHQDTVTIIPIIISSTGVVPKTLNTALKTLQLPATTYIPLQKSIVLDTCSIVRRFLDPTMLSFNENRDITNVSTQQHTEH

SEQ ID NO: 1035 - protein, 1262 aa, Piruna aea
MSCDVAQEALANSPEPTTDITTLTRVPQNTTTNRVHHNTHSSPLNTNTPARSVLQDMLPATTLAGKSRQRMKWTDEINKELLRCYYLVTHNETNLTNWRPQLHHKFIENIPELNHLSEQRLADQIRVIHRNNRIPASEREVIKQSVSLLISTSNNSNQHIGTPNTETINQTNTVTNTYQPNTEARSLQQTLTITQQDNTTLQAHENIEHTPTQDFETTDSPQDPVDYEKIQNIFTEMLIKYTGTDPTLRPPIPKLQISRNVIKTLNTTNEIIYKNLLCKEIIKLEEIHDFIYCAAQTITTIHNKHLEINKNTTHNTNNAKAKAVTNHRKPQWEIRIQTKITMLRKEIGQLIQYVNGNLTQKKQQKLNPNNKNKDEIIEQLDKNKQKLQAYSKRLRRYKISNERKSHNKLFSSNQKLFYQKLNSEHIHITEPPRIEDLQNYWKHIWSKPVEHSTLTSWTEIEEQETINICPMPEIKIDKNDVTHAIKKTLNWKAPGPDKIQNYWIKYLTATHEPIANAFNYLIQNPQETPSFLTKGITYLKPKDKDTANPANYRPITCLPTIYKLLTSIISHKLNTHITQNEIIPEEQKGCSKGSKGCKEQLVIDTEIHNQVKQKHRNLFFSYIDYQKAFDSVPHSWLVYILKLYKVDNRLVQFLQYAMTNWTTKLHLRTNNSVLCTQPIKILRGIFQGDSLSPLWFCLALNPLSKILNKTGHGYVIDREKNIKLTHLLYMDDIKLYAANRKQLDQLLKLTEKFSTDIKMSFGTNKCKINSIIKGQHKETNTFNLNIQGGKIDSMEATDTYKYLGYQQSTSINHTDIKNTLKTKYKQRLHKILKTQLSAKNKIKAVNTYAVPILSYSFGVIKWSDTELEALNTATRTAFNKNNIHHIHSAIQRFTLKRKLGGRGVIDIKNLHYTQIDNLRTYFFAKANSSTLHKAIININLSGTPLQLNNNLYDPKSKIVKDEQKIENWKKKAIHGKYPHELDQDHIDRNASCTWLTKGNIFGETEGFLVAIQDKIIKTRNYSKYILRETIESDKCRLCHQSTENIEHITGGCSILANKEYTHRHDNVAKHIHQQLALKYKLLKSYTPYYQYQPKKVIENNTARLYWDRDIITDRTILSNRPDITLTLKSTKTTFLIDIAVPNTHNLKQKHTEKIQKYMSLADEIKQMWHQESVRIVPIIISSTGVIPKTLKSALKLLNLHENTYIPMQKSIIIDTCSIVRRFLNPTTLSLQDEQQTNPHTRTQHSPTRAITNTHNTSNTRDS

SEQ ID NO: 1036 - protein, 1263 aa, Anisynta dominula
MSSDVMQEALADYPASIIDIINPTCISEINPLSSHVDTYTQNHTTVNNTPARSVLQEMLPATTLAGKSRQRMKWTYQINRELLRCYYVVTNCEENLTAYRPLLHKKFIEILPELSHLTEQRLADQIRVIHRNNRIQAPERETIKQSVAQTLMNTVSPSNLNNSDALDIQAYTNNNQSLNNHTQILNEPVQTNNTQNVVMRECCDEQHVLQESIVTQIHNENLQQSTLISSQEIYEHTQTQHTATPPQESQNYQKIENTFTEMLIKYTGTDPTLRPSIPKTRTTQKFIKTVNTLNEIIKIHLQNQEEVTLEKVHEIIYCAAITATMLNSEYKKKKDLVKINGNNENSENRQKTPKWQRRLENKITMLRKIIGKLTQYLKGNLSQKKQHKLNPNIKSRDDLVDELDTYKQKLQAYSKRLQRYKISNKRKSDNILFNTNQKLFYRKLNTENLEITKPPNIAEVQHYWENIWSKSVNHNSQSSWAVIEEREVQNINPMPDINLNKYDVTQAIKKTLNWKAPGPDKIQNYWLKYFTSTHEHIANTFNYLLHNPHDIPPFLTHGITYLKPKDKDTTNPGKYRPITCLPTIYKLLTSIIANKLNSHLTHNKIIQEEQKGCSKGSMGCKEQLIIDTEIHNQVKQKHRNLYFSYIDYQKAFDSVPHSWLLHVLKMYKADNTLIQFLQHTMTKWNTKLHIRTNNNSLSTPIIKISRGIFQGDSLSPLWFCLALNPLSRILNNTGFGYNIERENDVKLTHLLYMDDIKLYAANRQQIEHLIKLTEEFSTDIKMMFGTDKCKINSIIKGQHKETDSYRLELQAGKIDSMDPKETYKYLGYQQSTSINHTEIKTALKTKYKQRLKRILSTQLSARNKTKAINTYAIPILTYSFGIVKWSDTELEALNTTTRTVCNKHNIHHIHSAVQRFTLKRKLGGRGFVDIKNLHCTQIDNLRSYFYLRANECALHKAIINLPHSGTSLQLNNTQFDPKHKIVKDEQKIENWKKKALHGRFPHQLDQEHIDRNASCTWLSKGNIFGETEGFLIAIQDQVIKTRNYSRHILKETIETDKCRLCHQTTETIEHITGGCSTLANKEYTHRHDNVAKHIHQQLALKYKLLETYTPYYQYKPKNVLENGTAKLYWDRDIITDRTILSNRPDITLTLKSTMTTYLIDIAVPNTHNLKQKQSEKIQKYIPLADEIKQMWHQENVKIVPIIISSTGVIPKTLKNALKLLELHENTYIPLQKSIVLDTCSIVRRFLNPTSLPLPSNHDTNTIS

SEQ ID NO: 1037 - protein, 1371 aa, Eantis tosta
MRLRSRQIPQAGTRKGESRPGPSGSGCPSYSGEGNVSHMTAQSQTAAVDTSPTHITSYPSTPTSSTQSLFRSPTSSPHSFQLENSPSSSTMSLLSDNVAREAQANSPVPTTDITNPTRTSLSISDNRVNQNTNSLPPNINTPARSVLQEMLPATTLAGKGRQRMKWTDQINRELLRCYYIVTHVETNLTAWRSQLHQKFTESTPELSHLSEQRLADQIRVIHRNNRISALDRENIKQSVSLLHFTSHNPNHTIDINNTLQTNNHQLSKTHSLTQTLTDNDTFIPDNHQTNQSLNTEHITPMTQVNVISQAYQTYNTIEHYETQNPDAINTLVGQIDYKTIENTFTEILIKYSGTDPTLRPAIPKLKTTRSAAKTVNIINKIIDKRIGDKSTIPLEEIHEIIYCAAQTVTTIHCRQINKPEHNTGNNNCSITKQKKPQWEKRLEDKINTLRKEIGQLTQYIKGNLTQKKQHKVNPHNRSKDEITEQLDKDKQKLHAYSKRLRRYKISNERKSHNKLFNTNQKRFYQNLNAENIHITQPPNKDELENYWQNLWSKPVQHNTHSSWTQIEEQETTNIDPMPEITIDKEDVSQALRKTLNWKAPGPDKIQNYWIKYLSATHGHIANSFNHLIHNPQNTPSFLTQGITYLKPKDNDTTNPAKYRPITCLPTIYKLLTSIISYKLSIHIAKNQIIPEEQKGCRKGSKGCKEQLIIDAEVHNQIKQKHRNLFFSYIDYQKAFDSVPHSWLIQTLKIYKVNNVLIEFLQYTIKNWKTKLNLRTDKTSLNSQTIKISRGIFQGDSLSPLWFCLALNPLSRILNKTGYGYVIDKASNIKINHLLYMDDIKLYAANRQQLDDLLTLTEKFSTDIKMTFGINKCKINSIIKGQYKETASFNLILQGGKIDSMEPKETYKYLGYHQSTTVNHTHTKDTLKTKYKQRLHKVLSTQLSARNKIKAINTYAIPILTYSFGVLKWSDTELEALNTVTRTLSYKHNIHHIHSAIQRFTLKRKLGGRGVIDIKNLHYTQIDNLRTYFKQKSNENPLFRAIVGLPHAGTPLQLNNSQFDPTLKIISDENKIDTWKKKALHGKYPHQLQQDHIDINASCSWLTKGNIFGETEGFIIAIQDQIIKTRNYSKYILKEAIETDKCRLCHQTTETIDHITGGCNVLANKEYTYRHDNVAKHIHQQLALKYKLVETYTPYYQYKPKSVLENNTAKLYWDRDIITDRTILSNRPDITLTLKTSKTTYLIDIAVPNTHNLKQKHSEKIQKYLPLADEIKQMWHQECVRIIPIIISSTGIIPKTLKIALKLLNLHESTYIPLQKSIIIDTCSLVRRFLNPSTLTLQEDQQLNDGNTAIHNTSIHPNTNNTLICIHNTTDT

SEQ ID NO: 1038 - protein, 1367 aa, Chiomara georgina
MRLRSGYKLPQASTGANRNGESRPEPKSSGSPTYSGGDIVSQTSAQSRTVAVNQPSSSYTPTHFSSTISSTHSLFLSSSSSPQSYEYDQPLSYSASTSSMSCDVAQEATATSPEPTHDITYPTRVFENNLRPRVLHTTQPSSPYMNTPARSVLQDMLPATTLAGKSRQRMKWTDQINRELLRCYYVVTHNETDMTAWRPLLYQKFAESFPELSHLSEQRLADQIRVIHRNNRIPASEREVIKNSVSWLIPTTSNLSQDIESTSMHEPNVTLVNNTSNMEPNGQTHSPTAQLRSTQQIHLNIEHVQTQDACITEGSKEPLNCENVENIFNEMLIKYLGTDPTLRPIIPKIQITRHTIKMMSIINKIIESHLLNRENSIEEIHNTIYCAAQTVIAIQNNNTLNTDNKSEKENNYIKNGNIVGEKGQPKWKKRIENKIILLRKEIGQLTQYKNGNLTQKKQLKLNPNNKTMNEIIDLLDVNIQRLQAYSKRLRRYKISNKRKSDNKLFNNNQKLFYQKLNTENIRVINAPNINDVESYWKDLWSKPVHHNTITSWTQEEDTIIIDPMPSILISKEDVSLSIRKTLNWKAPGPDKIHNYWIKYFTATHEPLANAFNNIIQNPQDTPSFLTQGITYLKPKDKDTTNPSKYRPITCLPTIYKLLTSIISFKLNTHITRNHIIPEEQKGCCKGSRGCKEQLVIDTEIHNHVRVKQKNLFYSYIDYRKAFDSVPHSWLIEILKLYRVDNTLIHFLQSTMKNWTTKLHLQTQNSLHCSQPIKILRGIFQGDSLSPLWFCLSLNPLSKILNNSGCGFVFNRENNSKITHLLYMDDVKLYAANRAQLEHLIRLTETFSTDIKMSFGTNKCKINSIIKGRHHETNPFYLDSEGGVIDSMEPKETYKYLGYQQSTSLNHTEIKNTLKAKYKQRLNKILSTQLSSRNKIKAINTYAIPILTYSFGVIKWSDTELEALNTATRTASNKHNIHHIHSAVQRFTLKRKLGGRGCIDIKNLHYTQVNNLRSYFQTKAETSTLHNAIVNLPQSGTPLQLHNSLFDPKLKIIKDDQKIELWKTKALHGKYPHQLEQEHVDRDASCAWLTKGNIFGETEGFLVAIQDQIIKTRNYAKYILKEAIESDKCRLCFQTTENIDHITGGCSVLANKEYTHRHDNVAKHIHQQLALKYNLVKAYTPYYQYKPKNVLENATAKLYWDRDIITDRTVLSNRPDITLSIKSSKTTYLIDIAVPNTHNLKQKHTEKIQKYLNLADEIKQMWHQKTVRIVPIIISSTGVIPKNLKSAFKLLDLNENTYIPLQKSIVIDTCSIVRRFLNPSSLTLQEEQLTSNPITHTSSVPNNTNIHNTNIQDTFNTRTNHESIHLNI

SEQ ID NO: 1039 - protein, 1348 aa, Telicota sp.
MRLRSRNTLPQAGTRNGESRPETTSSGSPTYSGGGTVSLGPAQSPTVADQEKNTLNTPSHTLSPSSTYNPYQSPSSSSTTHYSQYTPSSRSTTTSPMSNVVVQEAVADYPVPISGIINTTRSPEIDPSISRVGTYTHNHNHDHTPARSVLQDMLPATTLAGKSRQRMKWTYEINQELLRCYYIVTNCEENLTAYRAMLHKKFTEKHPELIHVTEQRLADQIRVIHKNNRIPAPDREKIKRSVSQSLIISNNISDNLTDPSNILQILDTINETDNAQHTSIDTLQSLISTPMDNATHPESTLVGHQESHEHSQTCDIITTSQNSLDYKIIENTFTEMLIKYTGTDPTLRPVIPKTQTTQKFIKTVNTINQIIKTHLQNQQEQITIEKIQEVIYCAAKTVTTLNLEQRSNIGPKKTNSINENLENRQKIPQWQKRLEKKITLLRETIGKFTQYLKGNLTLKNQRKINPTNKSRDEIIGELDDNKQKLQAYAKRLKRYKLSNKRKSDNILFNKNQKIFYRNLNTENIDTKNPPNIIEVQRYWENVWSKPVCHNPQSSWAAIEQQEIQHIDTMQEINIDKSDVIRAIKKTLNWKAPGPDNIQNYWLKYLTSTHEHIAKTFNHLLHNPQDMPSFLTQGITYLKPKDKDTTNPGNYRPITCLPTLYKLLTSIISHKLNSHLTHNKIIAEEQKGCSKGSMGCKEQLVIDTELHNQVVQKHRNLYYSYIDYQKAFDSVPHSWLLHVLHIYKADNTLIKFLQHTMTTWNTKLYIRTNSKSLNTPNIKISRGIFQGDSLSPLWFCLALNPLSRLLNNTGYGYKIDRENNIKLTHLLYMDDIKLYATNRQQIEQLIKVTEKFSTDIKMIFGIDKCKISSIVKGQHKETDSYRLHLQSGTIDSMDPKETYKYLGYQQSTSINHAEIKNTLKTKYKHRLKTIFNTQLSARNKTKAINTYAIPILTYSFGIVKWSDTELEALNTMTRSISNKHNYHHIHSAVQRFTLKRKHGGRGFIDIKNLHHTQIDNLRSYFYTKADQSFIHKAIINLTHSGTSLRLNNRQFDPKHKIVKDEQKLENWKKKALHGRYPHQLDQEHIDRNASFTWLTKGNIFGETEGFLIAIQDQVIKTRNYTRHILKESIETDKCRLCHQNTETIDHITGGCSTLAKKEYTHRHDNVAKHIHQQLALKYQLLDTYTPYYKYKPKNVLENSTTKLYWDRDIVTDRTILSNRPDITLTLKSTRTTYLIDIAVPNTHNLKQKHTEKIQKYIPLSDEIKQMWHQENVKIIPIIISSTGVIPKTLKAALKILNLPENTYIPLQKSIVIDTCSIVRRFLNPTSVPLLNNYDTNHTSATPQNPSIHP

SEQ ID NO: 1040 - protein, 1222 aa, Signeta flammeata
MIKTWLNMVLLWLGWLHPTSLQANLREGGVFHLIIIIIKSQHFTAYRPFLHKKFIETFPELSHLTEQRLADQVRVIHRNNRIRAPERENIKQSVTQTFINTDSLHNLNNNVDAPDIQACTNNNQSLTNHTRILHSPIQTSNTQITPSHALQSSIEIQIGNENLQQSTLIGSQEIYEHIQTQDTRISTTSQDSVTYKKIEDTFTEMLIRYTGTDPTLRPPISKSQTTQRFIKIVNTINDLIKIHLQNQEIVTIEKIHEVIYCAAITVTMLISESKKEKDPRKTDSNNENLESRQKTPQWKRRLENKITILRKIIGKLTQYLNGNLSQKKQYKLNPNNKSRDEITDELDTNKQKLQAYSKRLQRYKISNKRKSDNILFNSNQKLFYRNLNTENIEITKPPNIAEVQHYWENIWSKPVHHNTQSSWAVIEEKEVQNIDPMPDLNISKLDVKQALKNSLNWKAPGPDKVQNYWLKYFTSTHEHIANTFNYLLHNPQDIPPFLVQGITYLKPKDKDTTNPGKYRPITCLPTIYKLLTSIISHKLNSHLTLNKIIQEEQKGCSKGSMGCKEQLIIDAEIHNQVRQKHRNLYYSYIDYQKAFDSIPHSWLIHVLKIYKADNTLIHFLQHTMTKWNTKLYIRTNNTSLSTPTIKISRGIFQGDSLSPLWFCLALNPLSRLLNNTGYGYNIDRENDIKLTHLLYMDDIKLYAANRQQIEHLIKLTEEFSTDIKMKFGIEKCKINSIIKGQHRETDPYRLELQTGTIDSMDPKETYKYLGYQQSVSINHTDIKTTLKTKYRQRLKRVLSTQLSARNKTKAINTYAIPILTYSFGIVKWSDTELEALNTTTRTVCNKHNFHHIHAAVQRVTIKRKLGGRGFIDIKNLHYNQIENLRSYFYIRANESSFHKAIINFPHSGTPLQLNNRQFDPKNKIVSEEHKLEYWKKKALHGRFPHQLDQEHIDRNASYTWLSKGNIFGETEGFLIAIQDQVIKTRNYSRHILKEAIETDKCRLCHQTTETIEHITGGCSTLANKEYTHRHDNVAKHIHQQLALKYKLLETYTPYYKYKPKNVIENSAAKLYWDRDIVTDRTVLSNRPDITLTLKSTKTTFLIDISVPNTHNLKQKQIEKIQKYINLADEIKQMWHQENVKIVPIIISSTGVIPKTLKPALKLLELPENTYVPLQKSIVIDTCSIVRRFLNPTLLPLSSNPDPNHTNRTSQNIRHITQDTTCN

SEQ ID NO: 1041 - protein, 1337 aa, Helias cama
MRLRNRDIPQAGTSLPRGEEESGPGPSSPGCPTYSGGGNVSRMTAQSPAVAVEELLSSHIPSHSHLSPVSSTQSLFQSPISSPQSYEFQEPMSHSSSSSHISSDVAQEALANSPEPTTDITINPTRALHNDSSYRVNHIISSSLNTNTPTRSVLQEMLPATTLAGKSRQRMKWTDQINIELLRCYYLATHNETNLTAWRPVLHQKFAEKYPELKHLSEQRLADQIRVIHKNNRVTLIEREKLKHTVSLYLDSVDTSNKQSDTNNSQHTSTTQISQAIEDTYNCSDSQYIPNTRTTLVTSQQMNTLTQTNLNMGNIQTPVSEITDRQQEPIHNEMIENTLTEMLIKYKGTDPTLRPTIPKLHITQRVIKTIHNTNKIVDTHLQNMEAVTLEEIHDIIYCAAQTITKLHCKHTEQSNNSKDDINTSISKKVKPQWEKRLENNIITVRKEIGQLTQLVKGNLSQKKQRKINPSNKNIDEIVEQLDDKKQKLQAYSKRLRRYKISNQRKFDNKLFSTNQKLFYQKLHSDQILVTQAPQLDDIENYWKNLWSKPVQHNTPSSWKEIEEQETVHLNPMTEVNINKDDVTYAIRKTLNWKSPGPDKIQNYWIKYLPATHEHLANTFNHIIQNPQEVPSFLTQGVTYLKPKDNDTTNPAKYRPITCLPTIYKLLTSIISHKLNTHITQNKIMSEEQKGCSKGSRGCKEQLIIDSAIHNQVKHKHRNLFYSYIDYQKAFDSIPHSWLIYILKLYKIDTRLIQFLQHIMNHWTTRLSLRTKNTSLFTHPIKILRGIFQGDSLSPLWFCLSLNPLSKILNKTGRGFIIDKDKHITLSHLLYMDDIKLYATNRHQLDHLLKVTEQFSADIRMNLGIDKCKISSIIKGQYNKTEAFDLSKQEGKIDSMAPKEVYKYLGYAQNTSINHTEIKNTLKNKYKSRLLKILNTQLSARNKVKAINSFAIPILTYSFGIIRWSDTELEGLNIITRSTCYKHNIHHIHSAIQRFTLKRKLGGRGFIDIKNLHYTQLDNLRSYFYTKSSESTLHQAIINLPQSGTPLQLNNRQFDPKNKIINDDKKIEIWKNKALHGKYPHQLQQEHIDQEASCAWLTKGNIFSETEGFIIAIQDQIIKTRNYTKYILKQPINTDKCRLCHQNTENIEHITGGCNVLANKEYTHRHDNVAKHIHQQLALKHRLLDTYTPYYQYKPKKVLENSFAKLYWDRDIITDRTILSNRPDITLTLKSSKTTYLIDVAVPNTHNLKQKHTEKIQKYISLADEIKQMWHQDNVRIIPIIISSTGVIPKSLKTALKVLDLHENTYIPLQKSIILDTCSIVRRFLNPTSLTLQDEHPT

SEQ ID NO: 1042 - protein, 1307 aa, Venada nevada
MRLRNRQIPQAGTREGESRPGPSGSGCPTYSGGGNVSHRTAQSSTVAVDDNSRNPSHSSSPVSSTHSLFPSPSSSPYSYQFQPSSSRSSTITPLSCDVAQEAHANSVPTIDITKPTRAIQNNQPNRVNQNTPSPSHAINTTARSVLQDMLPATTLAGRSRQRMKWTDQINKELLRCYYEVTQNEANLTAWRTQLHQKFSETIPELSHLSEQRLADQIRVIHKNNRVPAPEREQIKHLVSLLMTSTLHNTDDYSTTSNTDRQINVTTTLSSNNQQSLTEPHSQIHNTQYTATITQHTITTAQAHQPFDISEHIHAQDCETTNNTLNSLHYNKIEDVFTEMLIKYAGSDPTLRPAIHKPEITHNFIKTLNIINEIIDQYLRTKDLITIEEIHEVIYCAAQTVLTMHTKYVKHFDNNINNNITHTIGNQRKPQWEKRIESKIMTLRKEIGQLTQYLKGNLTQKKQHKLNPNNRNRDEIIEQLDSDKQKLQAYSKRLRRYKISNERKSHNKLFNTNQKLFYQKLNTEQIQITQPPDINDIHNYWKNLWSIPVQHDTHAPWAKIEEQEMESIDPMPETTINKDDVTQAIKKTLNWKAPGPDKIHNYWIKYLPATHEHIANTFNRLLCNPQQIPSFLTQGITYLKPKDSDTTNPAKYRPITCLPTIYKLFTSIISYKLNTHITQNHIIPEEQKGCCKGSRGCKEQLVIDTEIHTHTKQKHRNLYYSYIDYQKAFDSVPHSWLIMILRIYKVDSRLIQFLQHAMKNWTTVLSLRTKHISLNTQKIKISRGIFQGDSLSPLWFCLALNPLSRILNRTGYGYVVDRDINTKLTHLLYMDDIKLYAANRQQLDHLLRLTENFSADIKMTFGINKCKVNSIIKGQHKGTEAFELDLQRGTIESMEPRETYKYLGYHQSTSINHTDIKNTLKTKYKQRLHKILNTQLSARNKIKAVNTYAIPILTYSFGIVKWSDTELEALNTATRTISNKHNIHHIHSAVQRFTLKRRLGGRGFIDIKNLHYTQIDNLRTYFLLKAKESALHKAIVHLPQSGTALQLNNTQFDPKLKILKDDKKIENWKNKALHGKYPHQLEQDHIDYNASCTWLTKGNIFGETEGFLVAIQDQIIKTRNYSKYILKEAIDTDKCRLCHQTTETIDHITGGCSTLANKEYTHRHDNVAKHIHQQLALKHKLLESYTPYYQYKPKNVLENNTTKLYWDRDIITDRTILGNRPDITLTLKSSKTTFLIDIAVPNTHNLKQKHTEKIQKYIPLADEIKQMWHQESVRIIPIIISSTGVVPKTLKTALKLLDLHVNTYIHRY

SEQ ID NO: 1043 - protein, 1184 aa, Cephise aelius
MLPATTLAGKSRQRMKWTEQINKELLRCYYVVTRCETNLTAWRPMLHQRFAESIPELSHLSEQRLADQIRVIHRNNRISVSERERIKQSVSLLTSSSSRSNESTDINNIERQSVLSAHMINDNQPNTDSNNQILNPLQTSTTMQEINLTTQMFQHIEDGEHTYPQFSKTTDRQLDPIDYEKIENTFFEMLIKYTGTDPIQRPTIPKLQITRNIIKCVNTVNEIIEKHLSNKHEITLEEIHEVIYCAAQTVITICNKNFNEFANITKENVNNEKINVKQKKSQWEKRLENKIVMLRKEIGQLTQYLNDNLTQKKQQKVNPNNRSKNEIIEQLDNNKQKLQAYSKRLRRYKKSNQRKSQNKLFHTNQKLFYQKLNTEQISITQTPHKNDLHNYWKNIWSKPVEHNTSSSWTDIEEQEVKNIDPMPRMTIDQEDVTQAIKKTLNWKAPGPDKIQNYWIKYFSATHSYIADTFNYIIENPQCTPAFLTQGITYLKPKDSDTTNPSKYRPITCLPTIYKLLTSIISHKLNTHITQNQIIPEEQKGCCKGSRGCKEQLIIDTEIHNQVKQKHRNLYYAYIDYQKAFDSIPHTWLIHILKIYRVHDTLIQFLQVTMKNWTTKLNLRTNNTFISTQPIKILRGIFQGDSLSPLWFCLAINPLSRILNNTGYGFVIDKGSNTKLSHLLYMDDIKLYAGTRHEIDHLLKLTENFSLDIKMSFGTNKCKINSIIKGQQKETGPFELATQGGAIDSMEPKETYKYLGYQQSTSINHTHIKNMLKTKYKQRLHKILNTQLSAINKVKAINTYAVPILTYSFGVIKWSDTELEALNTITRTTSNAHNIHHIHSSVQRFTLKRKIGGRGFIDIKNLHYTQIYNLRTYFLTKADESPLHKAIVNLPHSGTPLQLNNSQFDPKLKIITDEQKLENWKKKALHGKYPHQLEQDYIDRYASSAWLTKGNIFGETEGFLIAIQDQIIKTRNYSKYILKEQIETDKCRLCNKATETIDHITGGCSVLANKEYTHRHDNVAKHVHQQLALKYKLLESYTPYYQYKPKQVLENSAAKLYWDRDIITDRTILSNRPDITLTLKHSKTTYLIDIAVPNTNNLKQKHTEKIQKYIALADEIKQMWHQESVKIIPIIISSTGVVPKTLKTALKLLDLRENLYIPMQKSIVIDTCSLVRRFFNPTTLTLEDN

SEQ ID NO: 1044 - protein, 1329 aa, Zera sp.
MRLRNRIIPQAGTREGESRPEPSSSGCPAYSGVGNVSHMTVQSNTVTVNNDNITSLHIRSSSLSPSSTHSLFQSLPSSPHSYELDSTPSRSNTTTPLSYDVTQEANANSPASISDNTYHARVLQTNTDNRVHQHTPSSTLNTNTPARSVLQDMLPATTLAGKSRQRMKWTEQINKDLLRCYYVVTHNESNLTAWRPLLHRKFLEMVPELSHLSEQRLADQIRVIHRNNRIPAPEREAIKQSLFPTIPNPQNISNQNTPLNNTLNQSPLDTQSPSKHHNSYNTSSMTQQTENSRSQTYQHFTHTEHTETQTLEQTSTQLASTDYKTLENTFNEMLIKYTGTDPSLRPTIPRLQTSRISIKTTNAVNEIIDKHIQTKDKLPIEEIHIIIYCAAQTITSHTRTKINKFEGNGNTLKQNKPRWKIRLENKITLLRKDIGQLTQYLKGNLTHKKQQKLNPNNKSKNEIIELLDINKQKLQAYSKRLRRYKISNQRKTQNRLFNTNQRRFYQSLNSENIQITQPPDIEDLQNYWKTLWSKPVQHNTHTIWNEIEKHETENINPMQEITIDKNDVSQAVKRTLNWKAPGPDKIQNYWIKYFTSTHEHIAKAFNYLMHNPQETPPFLTYGITYLKPKDDDTSNPANYRPITCLPTIYKLLSSIISHKLHIHITQNQIIPEEQKGCRKGSKGCKEQLVIDSEIHNQVKQKHRNLFYAYIDYQKAFDSVPHSWLTHILKIYKVNNKLIHFLEHTMKHWTTKISLNTNKTSLCTHPIKIARGIFQGDSLSPIWFCLALNPLSKILNNTSNGYVIDRNTNIKITHLLYMDDIKLYAANRQQLEHLLQLTEKFSTEINMTLGTSKCKINSIIKGQHRDTDQFDLLMQGGKIDSMEPKETYKYLGYQQSTCINHTEIKNTLKAKYKHRLQQILNTELSARNKTKAINTYAVPILTYSFGIVKWSDTELEALNTTTRTLSYKHNIHHIHSAVQRFTLKRKLGGRGLIDIKNLHYTQIDNLRTYFLTKACENELFKAIVNVCQTGTPLQLINKQFDPQKKLLKDEQKIEEWKKKALHGKYPYQLEQDHIDRNASVTWLTKGNIFGETEGFMVAIQDQIIKTRNYSKYILKEGIESDRCRLCHQNTETIDHITGGCSILAQKEYTHRHDNVAKHIHQQLALKYKLVDSYTPYYQYKPNKVIENSAAKLYWDRDIITDRTILSNRPDITLTLKSTNTTYLIDIAVPNTHNLQQKHTEKIQKYLPLADEIKQMWHQETVRIIPVIISSTGVIPKTLKTALKLLNLNENTYIPLQKSIIIDTCSIVRRFLNPTSLTLQQDLQQNNHSTT

SEQ ID NO: 1045 - protein, 1328 aa, Atarnes sallei
MQLRNRKIPQAGTREGESRPGPSSPGSPTYSGGDDAPHSATQPLAVVVNKSPTHTITNSLTPVSSTHSLFETSSSSIHSFERRSSLQSTSSSLSCDASRNGTSDTPVPIADITSHTRETNQNTANRVNHDNHTPLIINTPVRSVLQDMLPATTLAGKSRQRMKWTNDINRELLRCYYIVTRNETDLTAWRSLLHKKFAETIPELHHLSEQRLSDQIRVIHKNNRVPTQEREVLKKEVSLLQIPTNNIDEIIAGNETTHLSTTSTQNNNLYTTTSNQTIDSNQIRPILQNTNTTTQKFQPVLNKAYNKTQNPDIYSQKGIIDINKIQDTFKEMLIKYTDTDPSCRPIIPKPKITRKLIKITQITNDIIYEYLQAKEIVTLKDIHETIYCAAQTITTMNAQNHNNSHPKKDNTNKPQWEIRLNNKIVTLRKEIGQLTQYLKGNLTRKKQLSLNQNNKSKDEIQEELDKKTQKLQAYSKRLRRYKISNQRKSQNRLFDINQKQFYQTLNNERIQITLPPLKEDIQNYWKNIWSKPTQHKTHALWEEVEKEETATIDSMPEIIIVKNDIEQAIRKSLNWKSPGPDKLHNYWIKYLTSTHEHIANTFNYLIQNPHKTPTFLTNGITYLKPKDDDTTNPAKYRPITCLPTIYKLLTSIIAEKINRHVTINKIIPQEQLGCKKGSKGCKEQLIIDTEIHNQVKQKHRNLFYAYIDYQKAFDSVPHSWLTHILKIYKVDNKLIQFLEHTMNNWATKLSLHSSTTSICTDVIKIKRGIFQGDSLSPLWFCLAINPLSRILNKTNYGYAIDREIKIKITHLLYMDDIKLYATNRQELDHLLRLTENFSADIKMSFGTQKCKINSIYRGQHKVTDSFNLNVQQGIIESMKPKETYKYLGYKQSISLNHTEIKNILKTQYKYRLHKILNTQLSARNKIKAINTYAIPVLTYSFGIIKWSDTDLEALNTTTRTISNKHNIHHIHSSTQRFTLKRKHGGRGVIDIKNLHYTQIENLRTYFLTNTKHNNLIKAIVNMPHSGTPLQFNNKEFDPKLKVLSDDQKVNLWKTKALHGKYPHQIEQDHIDQNASFSWLTKGNIFGETEGFMIAIQDQIIKTRNYSKYILKEPVHTDKCRLCNQSTETMDHITGGCGILAYKDYTHRHDNVAKHIHQQLALKHNLIQSYTPYYQYKPKTVMENTNTKLYWNRDIITDRTILSNRPDITLIMKHTKTTYLIDISVPNTHNLKQKHIEKIQKYMSLADEVKQMWHQDIVKIVPIIISATGVIPKNLKSALQLLELHENTYIPLQKSIIIDTCSIVRRFLNPTTLNMQLGEHNSCGTSTNN

SEQ ID NO: 1046 - protein, 1389 aa, Urbanus sp.
MRLRNRQIPQAGTREGESRPGPSGSGCPTYSGGGNVSHKTTQSHTVVVEKSPSHITTYSSSPISSTQSLFQSPNSSPQSYQFQHTSSRSTTISPLSCDVVQEAYATSPVPTADNINPTRVTGNNVHNRVNHNTHPSSPTTNTPARSVLQDMLPATTLAGKSRQRMKWTDQINRELLRCYYVVTHNETNLTAWRPQLHKNFSASFPELSHLSEQRLADQIRVIHRNNRITGPERENIKQQVSLLLSNLRRSVDHTSANNAEVLLNNTPTTNHIEAFTHSLNQTLNTQHALTPNQSYTQHSHIHSQPINTTTQTHNYPENSEHNQTQDPETINKPSEPIDYNKVESTFAEMLIKYSGTDPTLRPTIPKLQTTRNTIKTVNTINEIIHLHLSTKNSVTLEEIHEVIYCAAQTTTTLHTKHNKKSENHSNNNNPNKSFKQKKPQWETRIEKKIITLRKEIGQITQYLNGNLTQKKQQKLNPNNRSRNEIVEQLDKNKQRLQAYSKRLRRYKVSNQRKSHNKLFNTNQKLFYQKLNTEHIQITQNPNTDDVYNYWKNIWSIPVLHNTHPSWNEIEDQEIQNIEPMSEIYIDKDDVSQAVKKTLNWKAPGPDKIQNYWIKYLPATHEYIAKTFNHLLNNPQDTPTFLTHGITYLKPKDNDTTNPANYRPITCLPTIYKLLTSIISYKLNTHITQNRIIPEEQKGCSKGSRGCKEQLVIDTEIHNQVKHKHRNLHYAYIDYQKAFDSVPHSWLIEILKIYKVNVKLIELLQSMMKNWTTKLSLHTNNSSICTLPIKILRGIFQGDSLSPLWFCLAINPLSRILNKTGYGYVIDRESETRLSHLLYMDDIKLYAANRQQIDHLLKLTEKFSTDIKMTFGTNKCKINSIIKGQHKETHPFVLEIQGGTIDSMEPKETYKYLGYQQSISINHTHIKNTLKTKYKQRLHKILSTQLSARNKVKAVNTYAIPTLTYSFGIVKWSDTELEALNTITRTASNSHNIHHIHSATQRFTLKRKYGGRGFIDIKNLHYTQIDNLRTYFLTKAKESNLHRAISQLPQSGTPLHLNNSDFDPNLKILKDDQKIENWKKKALHGKYPHQLEQDHVDCNASCSWLTKGNIFGETEGFLVAIQDQIIKTRNYSKYILKETIDTDKCRLCNQTTESIDHITGGCSVLANKEYTHRHDNVAKHIHQQLALKHKLLKSYTPYYQYKPEKVLENNTVKLYWDRDIITDRTILSNRPDITLTLKSSKTTFLIDIAVPNTHNLKQKHTEKIQKYIPLADEIKQMWHQETVRIIPIIISSTGIIPKTLKIALKLLDLHENTYIPMQKSIVIDTCSIVRRFLNPTTLTLQTYQETRSNTTTQNSSNHTTTHNTQTHTHNSPNTLTYSNHINLHEAGYLA

SEQ ID NO: 1047 - protein, 1358 aa, Apyrrothrix chalybea
MRLRNRQIPQAGTCEGESRPKSSHLGSPAYSGEGNASRMTTQSGTVVVDNLRSHITPSLSIPSSPTSTPMSSIHSPFQTLNSSSDLSSSSTNTSSSCCAAQEAHAISRVPTTDVTNPTRVFQNSTDNRVNHNSHSLSPHNNTSARSVLREIFPTTTLAGKSRQRMKWTEQINKELLRCYYIVTNNETNLTAWRSLLHQKFSESFPELSYLTEQRLADQIRVIHKNNRIPALEREDIKKLMTSLLSTPISINQINNNTIHSTTISSPTSNTHELNVCPPSETFNTQRTQTMINKQHTTTKTHYLYNNTENVEKQNSEATNKDPIDYKKVENAFNEMLIKYSGTDPTLRPTIPKLQITRNVIKSINTINEIIDEHLRTKTTIILEEIHEVIYCAAQAVTLLHTKYNNKLDNDIDSPNRYVNKVKQPQWMIRLENKITILRKEIGQITQLLKGNLTQKKHRRLNPNNKSNDKITEQLDINKQKLQALSKRLRRYKISNQRKSHNILFNNNQKLFYQKLNEEHIQIILPPDKDDVQNYWENLWSKPVHHNTHASWTKIEEQETTDINPMPNILINKDDVSEAIRKTLNWKAPGPDKVQNYWIKYFFATHQYIANTFNHILSNPQETPSFLTQGVTYLKPKDKDTSNPANYRPITCLPTIYKLLTSIISHKLDIHITKNQIIPEEQKGCRKGTKGSKEQLIIDTEIHNQVKQTHRNLFYSYIDYQKAFDSIPHSWLIHILKIYKVDNKLIQFLQHTIKNWTTKLNLRTNKTSFCTPAIKIARGIFQGDSLSPLWFCLALNPLSKILNKSGYGYVVNRESNTKITHLLYMDDIKLYAANRLQLDCLLRLTENFSTDIKMSFGTNKCKINSIVKGQYKQTDPFDLSTQGEKIDSMEPKETYKYLGYQQSIAISHKDIKNTLKIKYRQRLYKIFNTQLSARNKTKAVNTYAIPILTYSFGVIKWSDTELEALNTLTRIAANKYNIHHIHSAVQRFTLRRKLGGRGFIDIKNLHYTQIDNLRTYFLMKANENTLIKAITDLPQAGTPLQLNNSQFNPKLKILKEEEKIINWKQKSLHGKYPHQLIQEHVDRKTSCSWLTKGNIFAETEGFLIAIQDQIIKTRNYAKYILKEAIETDKCRLCHQTTETIDHITGGCSMLAHKEYTHRHDNVAKHIHQQLALKHKLLESYTPYYQYKPKDVMENSTAKLYWNRDIITDRTILSNRPDITLTLKYSKTTYLIDVSVPNTNNIKQKHTEKVQKYIPLADEIKQMWHQEAVKIIPVIISSTGIIPKTLKNALQLLDLHENTYIPLQKSIIIDTCSIVRRFLNSTTLSLQENVQHTDRNATIQNSIHTVSNNTLRHTHNTSHT

SEQ ID NO: 1048 - protein, 1359 aa, Telicota sp.
MRLRSRNTLPQAGTRNGESRPESTSSGSPTYSGGGTVSLGPAQSPTVADHENNTQTHNTPSHSTSPSSSYNPYQSPTSSTTTHYSQYTPASRSTTASPMSSDVVQEAPANYPVPITDIMNSTRISEITSSSSRVDTYTHNHTSNINTPARSALQEMLPATTLAGKSRQRMKWTHEINRELLRCYYIVTNCEENLTAYRPLLHKKFIETLPELGHLTEQRLADQIRVIHKNNRIQAPERESIKQSVIQSFSNSDRLTDINQISTNLTQASHTSDRTNNTHHTATGTLEPTVTAQTQINSLMGDQEIYEHSQTQSVTLLTPHVANYKKIEDTFTEMLIKYTGTDPALRPSIPKKQTTKNFIKTVNTVNEIVRNHLQNHQEVITLEKIQEIIYCAAITVTTLNSDKKNNKDRNKILSKENNMKTVQKTPRWQTRLENKIKMLREIIGKLTQYLNGNLTVKKQHKLNPYNKPRDEIVGELDNNKQKLQAYSKRLRRFKLSNKRKSDNSLFNTNQKLFYRNLNTDNIDITQPPNLAEVQLYWENLWTKPVYHNPQPSWAKIEQQEVQHIDQMQEISINKSDVLNAIKKTLNWKAPGPDKIQNYWLKYLTSTHEYLAYTFNQLLRNPQDTPSFITQGITYLKPKDKDTTNPGKYRPITCLPTLYKLLTSIISHKLNTHLTHNKIIQEEQKGCSKGSMGCKEQLVIDTEIHNQVIRNHRNLYYSYIDYQKAFDSVPHSWLIHVLKIYKTDNTLIKFLQHTMTKWSTKLHIHTHNRSLSTPTIKISRGIFQGDSLSPLWFCLALNPLSRLLNNTGYGYKIGKENDTKLTHLLYMDDIKLYAANRPQIEHLIKITEQFSTDIKMTFGTDKCKINSIIKGQFKETHPYTLDLQLGTIDSLDSKESYKYLGYQQSTSINHTEIKTTLRSKYKKRLNMILNTQLSARNITKAINTYAIPILTYSFGIIKWSDTDLEALNTITRTICNKHNYHHIHSAVQRFTLKRKLGGRGFIDIKNLHYSQIDNLRSYFYIKANECSIHKAIINIPHSGTPLQLNNKQFDPKDKIVNDEEKLENWKKKALHGRFPHQINQDHIDRNASHAWLLKGNIFGETEGFLIAIQDQIIKTRNYSRHILKETIETDKCRLCHQTTETIEHITGGCSTLANKEYTHRHDNVAKHVHQQLALKYKLLDMYTPYYKYKPKNVLENRTAKLYWDRDIVTDRTILSNRPDITLTLKATKTTYLIDIAVPNTHNLKQKHTEKIQKYIPLADEIKQMWHQENVKIVPIIISSTGVIPKTLKDALKLLELPENTYIPLQKSIVIDTCSIVRRFLNPTSLALNNTGETNHANRIPPIPTTYRLTHNESNSQSRLI

SEQ ID NO: 1049 - protein, 791 aa, Tagiades litigiosa
MPKIVVNKFDVTQAIKNTLNWKAPGPDKIQNYWLKYFTSTHEYIANSFNHLLHNPQDIPPFLTQGVTYLKPKDKDTSNPGNYRPITCLPTIYKLLTSIITHKLSQHITHNNIIQEEQKGCSKGSMGCKEQLVIDTEIHNQVKQKHRNLYYAYIDYQKAYDSIPHTWLLHVLKIYKIDATLIQFLEQAMTNWNTKLYIHLNNIAMNTPSIKIARGIFQGDSLSPLWFCLALNPLSRILNKSGHGYSIDRENNTKLTHLLYMDDIKLYASNRQQIEQLIGLTEKFSTDIRMKFGIDKCKINSIIKGQHKDTHSYRLESQSGTIESMDTKENYKYLGYQQSNGINHTEIKTTLKTKYKQRLNKILNTQLSARNMTKAINTYAIPILTYSFGIVKWSDTELEALNTTTRTVCNKHNYHHIHSAVQRFTLKRKLGGRGFIDIKNLHYLQVENLRSYFYSKAKECQLHNAIINLPHSGTPLQLNNKQFAPKNKINKDEQKIENWKKKALHGKFPYQLQQEHVDRNASCTWLSTGNIFGETEGFMIAIQDQIIKTRNYARHILKETIDTDKCRLCHQSTETIDHITGGCSALANKEYTHRHDNVAKHIHQQLALKYKLLNTYTPYYQYKPKHVIENNTVKLYWDRDIVTDRTILSNRPDITLTLKSTKTTYLIDVAVPNTHNLKQKHAEKIQKYIPLSDEIKQMWHQETVKIIPIIISSTGVIPKTLKIALKQLELPEKTYIPLQKSIILDTCSIVRRFLNPTSLPLTSSHHDTNHTNTTLQNNPSHNTQRITHNPHT

SEQ ID NO: 1050 - protein, 1393 aa, Telegonus anausis
MRLRNRQIPQAGTREGESRPGPSSSGCPTYSGGGNVSHKTAQSNTVAVDKFHTPSHSSSSTSSTHSLFPSPSSSPYSYQLQSSSSSSSSSSSSSRSSTITPLSCDAAQEALAHYPVLIADSINPTRVLEDNVYNRVNRDTHSLSPIINTPARSVLQDMLPATTLAGKSRQRMKWTEEINRELLRCYYIVTQNETNLTAWRPQVHQKFSVTFPELRHLSEQRLADQIRVIHRNNRISVQERESIKQSVSLLLSTTNRCNDDSITNNIEASLNTSLTTNNNEPTTLSPSEILDSQHTITLNQSHTQHLHIHSHEINTTTRTSYLHENSEHNETQNPETTNKPLHPIDYNKIKSTFTEMLIKYTGTDPTLRCTIPKLQITRNSIKTVNTMNEILDIHLNTKDLVTLDEIHEIIYCAAQTIVTLHSKHSKKSEGSNYNNNPNAIKQKKPHWEIRIEKKITTLRKEIGQLTQYLNGNLTHKKQRKLNPNNKSRNEIEEQLDNNKQKLQAYSKRLRRYKLSNQRKSHNKLFSSNQKLFYQKLNTEQITITQNPNKDDLHNYWKNIWSKPIQHNTHASWNEIEDQEIEKIEPMTEVHISKDDVSQAIKKTLNWKTPGPDKIQNYWIKYLPATHGFLANIFNHLMNNPQDTPSFLTHGITYLKPKDNETTNPAKYRPITCLPTIYKLLTSIISQKLNTHITQNHIIPEEQKGCSKGSKGCKEQLIIDTEIHNQVKHKHRNLYYAYIDYQKAFDSIPHSWLLQILKIYKVDVRLIEFLQDTMKNWTTKLSLRTNNTTISTQSIKILRGIFQGDSLSPLWFCLAINPLSRILNKTGYGYVIDRESKIRVTHLLYMDDIKLYAASRQEIDHLLKLTENFSTDIKMIFGTDKCKINSIIKGQQKETHPFDLETQGGTIESMQPKDTYKYLGYQQSTSINHTHIKYTLKTKYIHRLHKILKTQLSARNKVKAVNTYAIPILTYSFGIIKWSDTELEALNTITRTASNKHNIHHIHSAIQRFTLKRKFGGRGFIDIKNLHYTQIDNLRTYFLTKAQESKLHKAIVHLTHPGTPLQLNNCEFDPNLKIIKDEQKIQDWKKKALHGKYPHLLEQDHIDYTASCTWLTKGNIFGETEGFLVAIQDQIIKTRNYSKYILKETIDTDKCRLCHQTTETIDHITGGCSVLANKEYTHRHDNVAKHIHQQLALKYNLLESYTPYYQYKPKNVLENKTTKLYWDRDIITDRTILSNRPDITLTLKSTKTTFLIDIAVPNSHNLKQKHTEKIQKYIPLADEIKQMWHQESVRIIPIIISSTGVVPKTLKTALKLLDLHENTYIPMQKSIVIDTCSIVRRFLNPTTLTLQPCQNTHTNTVTQNASTHTHNTQTHNAPNTLIISHPNLTNSHESGHLA

SEQ ID NO: 1051 - protein, 1368 aa, Telegonus cellus
MRLRNRQIPQAGTREGESRPGPSSSGCPTYSGGGNVSHKTAQSSTVAVDKPHTPSHPSSPMSSTHSLFPSPSSSPYSYQFQSSSSRSSTITPLSCDVAQEAHANSPVPTTDSTNPTRVMQNNQSNRVIHSTHSPSHTTNTPTRSVLQDMLPATTLAGRSRQRMKWTEEINKELLRCYYIVTQNESNLTAWRPQLHKIFAETIPVLSHLSEQRLADQIRVIHKNNRIPAHEREQIKQSVSLLISSASNILNNQATAGNIDHQLITDNNQLITDSDNQILNLQHTVTNTQDAITETQVYRSCESSEHMQTQDSEPTNRPLDSIDYKKIQEVFREMLIKYTGTDPTLRPTIAKPQTTRHFIKTVNSINEIIDKYLQTKDLITIDKIHDVIYCAAQTVTSIHTKCVKTLEKSTNNNKISQRKPQWEKRIENKIIMLRKEIGQLTQYLRGNLSQKKQQKLNPNNKSRDEIIEQLDKSKQKLQAYTKRLRRYKKSNERKSHNKLFNTNQKLFYQKLNSEQIQITQPPDKIDIQKYWQNIWSIPVQHNAHNSWTEIEEQEMENIEPMPEITIDKDDVLLAIKKTLNWKAPGPDKIQNYWIKYLPATHEHIANSLNHILCRPQDTPCFLTQGITYLKPKDDDTTNPAKYRPITCLPTIYKLLTSIIAHKLNFHITRNHIISEEQKGCCKGSKGCKEQLVIDTEIHTQVKQKHRNMYYSYIDYQKAFDSVPHSWLIHILKIYKVDNKLITFLLHTMKNWTTKLTLHTNNISLSTQKIKILRGIFQGDSLSPLWFCLALNPLSRILNKTGSGYVIDRENNIKLTHLLYMDDIKLFAANNQQLLHLLKLTENFSTDIKMTFGTNKCKINSIIKGQHHETDPFQLETQGGTIDSMEFRETYKYLGYQQSTSINHADIKNTLKTKYKQRLHKIFNTQLSARNKIKAVNTYAIPILTYSFGIVKWSDTELEALNTATRTISNKHNIHHIHSAVQRFTLKRRLGGRGFIDIKNLHYTQIDNLRTYFLFKSNESALHKAIAHLPQSGTPLQLNNRQFDPKLKILKDDQKIENWKKKALHGKYPHQLEQEHIDYNASCTWLTKGNIFGETEGFLVAIQDQIIKTRNYSKYILKEAIDTDRCRLCHQNTETIDHITGGCSVLANKEYTHRHDNVAKHIHQQLALKHKLLESYTPYYQYKPKNVLENNTAKLYWDRDIVTDRTILSNRPDITLTLKSSKTTLLIDIAVPNTHNLKQKHTEKIQKYIPLADEIKQMWHQEHVRIIPIVISSTGVIPKTLKTAFKLLDLHENTYIPMQKSIVIDTCSIVRRFLNPTTLTLQTHQDTHSSTLTQNLITRTHNTQTHTHNAPNTLVTHPNHTNIHELGYLA

SEQ ID NO: 1052 - protein, 1195 aa, Gorgopas trochilus
MLPATTLAGKSRQRMKWTNEINRELLRCYYLVTHIETNLTAWRPLLQQKFAEQIPELSHISEQRLADQVRVIHKNNRISMPEREEIKKTVSSLISSSSNSSQNIDTNNMINQNANTSTTTNLFSNTDSLHPTPNLDHTEITTHQSITPLLSFQHLNMEHTETQAPAEINQPLHPIDFEKVQNTFTEIYIKYSGTDPTLRPKIPKLHINRNVIKTVNATNEIVGKHLQTRDTITLEEIHEVIYCAAQTITLLHNKHNYKLENNTEETNNSKHRRLNWENRLENKITILRKEIGQLMQYLKGNLTPKKQRKINPNNKSKEEITEQLDTAKQKLQAQSKRLRRYKISYERKSHNKLFNTNQKLFYQKLNNEYTPISESPDKDDIEKYWKNLWSKPVQHNTHSSWTELEEQEMSSIELMPEITIDKDDVSHAIRNTLNWKAPGPDKVHNYWIKYLSSTHKYIASTFNYLIHNPQETPSFITQGITYLKPKDTNTTNPAQYRPITCLPTIYKLLTSIISYKLNTHITRNQIISEEQKGCRKGSQGCKEQLIIDTEIHNQVKRKHTNLFYAYIDYQKAFDSIPHSWLIHILKIYKVDNKLTEFLQHTMKNWTTKLNLQTNKTLLCTQPIQILRGIFQGDSLSPLWFCLALNPLSKILNKSGFGYVIDKDNDVKITHLLYMDDIKLYAPNRQQLNNLLTLTENFSSDIKMRFGINKCKINSIIKGKHNQTDPFELNTEGVKIDSMDLKETYKYLGYQQTTSINHTDIKNTLRTKYKQRLHRVLNTQLSARNKVKAVNTYAIPILTYSFGIIKWSDTELEALNTLTRTASNKHNIHHIHSAVQRFTLKRKLGGRGFIDIKNLHHAQIDSLRTYFTTKSNGNELLAAILNLQQSGTPLQLNNSEYDPKLKILKDEQKIDSWKKKALHGKYPHQLEQEHVDRNSSCSWLTKGNLYGETEGFMVAIQDQIIKTRNYTKYIIKERIETDKCRLCHQATETIDHITGGCNVLANKEYTHRHDNVAKHIHQTLALKYKLLESYTPYYQYKPKNVIENSIAKLYWDRGIITDRTILSNRPDITITLKATKTTYLIDIAVPNTHNLKQKHAEKVQKYIPLADEIKQMWHQETVKIIPIIISSTGIIPKTLKTALHLLDLQKNNIPLQKAIIIDTCSIVRRFLNPTTLAFQPEYSHTTNSIIPSQIHNTPHT

SEQ ID NO: 1053 - protein, 1366 aa, Yanguna cosyra
MRLRNREIPQAGTRQGESRPGPSGSGCPAYSGEGNASRMTTQSRTVVVDNSIPHTTSSLSHPSSPISTSMSSTHSLFQTPNSSPDLYEQSVSSSSSNTPSSCCAVQEAHAISHAPTTDVTNPTRVFQNNTDNRVNHNSHSLSPQNNTPTRSVLREIFPTTTLAGKRRQRMKWTEQINKELLRCYYVVTNIETNLTAWRSMLHRKFSESFPELGYITEQRLADQIRVIYKNNRIPALERDEIKKSITPLLSTPISPNQINLPNNSIHPNTIINTPTSNTHESNVSPSNETFNTQHTQTIIQKHNTITETHNLYNNMEHTEHQNLEAANKDSIDYKKLEYTLNEMLIKYSGTDPSLRPTIPKLQITRNVIKSVNIINKIIDEHLSTKTTITLEEIHEVIYCAAQAVTSIHTKYVNKLDNNMDNSNRLTNKVNKPQWERRIENKITMLRKEIGQITQFLKGNLTQKKHRKVNPNKRSNDEISEQLDNNKQKLQALSKRLRRYKISNKRKSDNILFNTNQKLFYQNLNEEHIQITLPPDKDDVQNYWKNLWSKPVQHNTHTSWAEIEEQETTDINPMPEILINKDDVYQAIRKTLNWKAPGPDKIQNYWIKYFSATHQYIANTFNHIISNPQETPSFLTKGVTYLKPKDKDTSNPANYRPITCLPTIYKLLTSVISHKLDMHITKNQIILEEQKGCRKGTKGCKEQLIIDTEIHNQVKQTHRNLFYSYIDYQKAFDSIPHSWLIHILKIYKVDNKIIQFLQHTIKNWTTKLNLHTNKISFCTQAIKISRGIFQGDSLSPLWFCLALNPLSKILNKSGFGYIVDRESNTKITHLLYMDDIKLYAANRLQLDHLLKLTENFSTDIKMSFGINKCKINSIVKGQYKRTDPFDLSTQAEKIYSMEPKETYKYLGYQQSTAINHRDIKNTLKTKYRQRLYKIFNTQLSARNKTKAVNTYAIPILTYSFGVIKWSDTELEALNRLTRTAANKYNIHHIHSAVQRFTLSRKLGGRGFTDIKKLHYTQIHNLRTYFLTKANENTLIKAITNLPQAGMPLQLNNSQFNPKLKILKDEEKINSWKQKSLHGKYPHQLEQEHVDRKTSCSWLTKGNIFAETEGFLIAIQDQIIKTRNYSKYILKEIIETDKCRLCYQTTETIDHITGGCSMLARKEYTHRHDNVAKHIHQQLALKHKLLESYTPYYQYKPKNVMENCSVKLYWNRDIITDRTILSNRPDITLTLKSSKTTYLIDIAVPNTNNLKQKHTEKVQKYIPLADEIKQMWRQEIVKIIPVIISSTGVIPKTLKNTLQLLGLHENTYIPLQKSIIIDTCSIVRRFLNATTLSLQQDAQHTDPNATMQNSMHVITNNTLINTHNTTHT

SEQ ID NO: 1054 - protein, 1328 aa, Aricia agestis
MRLRNRIIPQAGTGAESKGESRPGPSGPGSPSYSGGDTVPHTSVQSNTVTDNIVPRKSTIQSYPSSPTSSISLFSSPSSSPKSYMFDTNSSSSRSHTLSPMSEDAARVASAIYPASTSDITLSTSTLQNNLPHLVDHNIPQSHLSNTPTRSVLQDMLPPTTLAGKCRQRMKWTDLINKELLRCYYIVTSCETNLTSFRPLLHQKFIESFPELSHISEQRLADQIRVIHRNNRIPAHVREQIKQSVSETFEESNSQNTLQDITSQTSLVCNIQTNSQRLIDDSSSSHTATLISHPPLTLPTPSDIIEHVVMLDSDDTIPSIDPNPTDNQKIEDIFKETLIKYAGTDPSLRPIIPKLQVTRNIIKTVNVLNKIISKHLEEKVTPDIDEIHSTIYCAALTTTTLHTTTKLINPSEQNKTLKTTDYIPKWQLRIENRIKNLRKEIGQLTQYLSGNLNAKKRQKINPKNYTTDQLVDQLDKLKQMLQAHSKRLRRLKISNDRRRHNTLFLNNQKVFYQNLNSENIKIIQPPNIQEVKTYWESIWSKPAQHNDQASWIASETQEYQNINMMPEIIINKEDVTYAIKKTLNWKAPGPDKIHNYWIKYFSATHHYIANIFNYFIQDPQTIPAFLTQGITYLKPKDNDTTNPTKYRPITCLPTLYKLLTSIITQKLNTHIIQNKIIPEEQKGCAKGSMGCKEQVIIDTEIHNQAKQKRRNLYYSYIDYQKAFDNVPHSWLIHVLKIYKVDIKLINFLQYLMSTWSTRLTLRTNEENLCTSPIKIKRGIFQGDSLSPLWFCIALNPLSKILSKSCHGYTLDKLNNIKVTHLLYMDDLKLYASDRQQLEHLLKITEKFSTDIKMKFGIEKCKINCINKGHHTQTEPLNLEFQEGMIDSMQAIDTYKYLGYIQSITINHKEIKNTLKSKYKQRLNKILATQLSGRNKIKAINTYAIPILTYSFGIIKWTDTELETLNTTTRMLCYKRNIHHIHSAVERFTLKRKLGGRGIIDIKNLHYNQIDNLRTYFLNKAKTSQLHKAIANLPHKGTPLQLNNDLFNVKHKILKDADKIQKWKSKALHGKYPHHLEQDHVDQIASCSWLTRGNIFSETEGFLIAIQDQIIKTRNYSKYILKESIDTDKCRLCHLTTETIDHITGGCSALANKGYTHRHDNTAKHIHQLLAIKYKLIDSHTPYYKYKPQNVLENSNVRLYWDRDIVTDRTILSNRPDITLTIKPEKTTYLIDIAVPNTNNLKQKHNEKIQKYIPLADEIKQMWHQEAVKIIPIIISSTGVIPKTLAASLKTLDLHKNTYIQMQKSIIIDTCSLVRRFLNPSSSFLTPQS

SEQ ID NO: 1055 - protein, 1432 aa, Thymelicus sylvestris
MKSSNKQNKNFKTKLFVNSTVQTRSYNLRSQSKSYEVIPQADASCNSMEIGYRDEISCQEKNGQRHYNNHKETTKSTPSSQISSTYSLFQSPSSSPHSVENQSISRSDCPTYSGGGNVSLRSAQSNTVAVTDNSSPISSTHSLFQSPSSSPHSYESHQSPRSTTTSPMSYDVAQEALANSLVPTNDITNSTRVLPNDSTNYVDHHNSQSSLLDTNTPVRSVLREMLPATTLAGKSRQRMKWTKEINIELLRCYYTVTMCETDMTAWRPLLHKMFIEQFPELSHITEQRLSDQIRVIHRNNRIPLTERESIKQTIPQTLPSTNNINYSIGEDTCNIYTHSSQNPTTLVTHTIQDTPNTQTLNQTYECQSQSNPPLENNEHIHTQEKGPTNTPVSSLVYEQIENVFNEMIIKYTGTDPTLRSRIPKLHTTRQMIKTVNTINGIVDNHLKNKDTITLEDVHDVIYCAAQTVVTFHTKQPKIIVDQIPSTSNNKTNEHREPQWKKRIEKKITLLRKEIGQLTQYLNGNLTEKKQNKLNLNNRNRQEIVAQLDTNKQKLQAQAKRLNRYKKSNKRKSDNILFQNNQKLFYQKLNAENITVTQQPDIAHIKTYWENIWSKPVQHNTHTTWTEIEEQEMENIEPMPEITISKEDVTHTIKKTLNWKAPGPDKIQNYWIKYLTSTHIYIANTLNNLIKNPHDLPTFLTQGVTYLKPKDNDTTNPAKYRAITCLPTIYKLMTSIITHKINSHISINKIIPEEQKGCSKGSMGCKEQLIIDAEIHNQVKHKNRNIFYSYIDYQKAFDSVPHSWLLYVLKIYKIDNSVIHFLQHAMSKWTTKLNLKTNTTTLSTSQIKIARGIFQGDSLSPLWFCLALNPLSRILNNTPYGYIINRENRTRITHLLYMDDIKLYASNRQELDHLLRLTEKFSTNIKMTFGTSKCKINSITKGQHSRTNSFELELQGGTIDSMEPRETYKYLGYQQSTSLYHTDIKNTLKNKYKQRLNKVLSTQLSARHMVKAVNSYAIPILTYSFGIIKWTDTELNALNTLTRTISNKHNIHHIHSASQRFTLSRKLGGRGFIDIKNLHYTQIDNLRTYFLQKATNSTIHKAIVNMPHPGTPLNLNNNHYDPKTKIQNVAQKIKNWKDKVLHGKYPYQLEQDHVDKNASTAWLTNGNIFSETEGFIVAIQDQVIKTRNYSKYILKETIETDRCRLCHKYTESLDHITGGCSVLANKEYTHRHDNVAKYIHQQLALKYKLTDTHTPYYKYKPMSVLENNTVKLYWDREIITDRTILSNRPDITLTLKSKKTTYLIDIAVPNTNNLKQKHIEKIQKYVPLADEIKQMWHQDTIQIIPLIISSTGIIPKTLHTALKTLDLHPKTFIPIQKSIVIDTCSIVRRFLNPTLLTLQNMPDSNTLTFTSSHTQAMSTDTHSAQNTHNHQSS

SEQ ID NO: 1056 - protein, 1334 aa, Agara belti
MRLRNRQIPQAGTREGESRPGPSGSGSPAYSGGGIVSHSTTQSSTVVADKSPSHIIPHPSSPKSSIHNRPHSSSPLICPTITTPLSKDVAQEAHANSPEPINDITSTTRATDSNQLNRVHHETHTLTPNPNTPARSVLQDIFPATTLAGKSRQRMKWSNQINIELLRCYYIVTRNESNVTAWRSQLHQMFAERVPELNHLSEQRLADQIRVIHKNNRIPASERENIKHSVSLLISTPNSTSDQNITSNTVERTNTITTHITTNHHSNTDSLYETLNSPHILTTTEPIGITTQTSQSLENREHNPQIQKSQITNKTPEYIEYNKLESTFMETLIKFAGTDPTLRPTIPKIHITPVFVKTVNTTNEIIDKYLSTKDQITLTEVHDVIYCAALTIVTLYTKPIDKLHNNTHDNSNTIRKQKKPNWEKRIETKIKKFRKEIGQLTQYLNGNLNKKKQQKLDKNHKNQDEIIEKLDSNKQKLQAYSKRLRRYRKSNERKLQNKLFHNNQKVFYQKLNAEQIEITQPPNNMDIQDYWKNLWSKSVQHNTHSSWAEIERQEMENIHPMPEINIDVDDVTQAVRNTLNWKAPGVDKIQNYWIKYLTSTHKYIANTFNHLLHNPQETPSFLTQGITYLKPKDDDTTNPAKYRPITCLPTIYKLLTSIISNKLNTHITQNKIIPEEQKGCCKGSRGCKEQLVIDIEIHNHAKVKHRNLFFSYIDYQKAFDSVPHSWLIHILKIYKVDYRLINFLQHSMKNWTTILNLRTKNTSLSTCPIKILRGIFQGDSLSPLWFCLALNPLSRILNKTDCGYVIDRNKNIKLTHLLYMDDIKIYATNRQQLDHLLKLTDKFSTDIKMAFGINKCKINSIIKGQHKNTHPYELQTQGGTIESMEAKETYKYLGYHQSTTINHTDIKETLKHKYNQRLKKILGTHLSARNKIKAVNTYAVPILTYSFGVIKWSDTELEALNRATRTASNRHNIHHIHSAVERFTLKRKLGGRGFIDLKNLHYTQIDNLRNYFLLKANDSTLHKAIVNIPQPGTPLLLNNSQFDPKLKIIKDEQKINNWKKKALHGKYPHQLEQDHVDQSASCTWLTKGNIFGETEGFLVAIQDQTIKTRNYCKYILKETIQTDKCRICHQVTETIDHITGGCCVLANKEYTHRHDNVAKHIHQQLALKHKLLKEYTPYYQYKPKSVLENNMAKLYWNRDIVTDRTVLSNRPDITLSLKSSKTTYLIDISVPNTHNIKQKHTEKIQKYLNLADEIKQMWHQEHVQIIPIIISSTGIVPKTLKTALNILGLNTNTYIPLQKSIVIDTCSIVRRFLNPTSVPLDNYTTTHEGTKSHE

SEQ ID NO: 1057 - protein, 807 aa, Aspitha agenoria
MKSYWEKIWSEPQTHTTNPSWISIEEKEIQQIDPMPLVTIDLEDIRTATSKMLNWKAPGPDKIQNYWLKYLTATHKTIADIFNNLIQNPEIVPEFMVQGVTYLKPKESDTSDPANYRPITCLPTLYKLLTSIITSKINTHITLNKIIDEEQKGCRKGSRGCKEQLVIDTEIHNQIRKKHRNLYFAYIDYKKAFDSVPHSWLIYILKRYKIDFTIVKFLQHAMTKWSTILNITTEYKCLKSTPINISRGIFQGDSLSPIWFCLAINPLSKILNNTGHGYIIDRPNKIKLTHLLYMDDIKLYASTRQQLNDLLQLTETFSTDIKMEFGITKCKINSIVKGTYKQTEPYNLTLHSEQICSMEPNDYYKYLGYKQNVAIEHTKIKQDLTVQYKQRLNKIFKTQLSARNKVKAVNTYAVPILTYSFGIIKWTDTDLDALNILTRTTANKHNIHHIHSATERFTLKRKLGGRGFIDIKNLHYKQIENLRTYFINKAIDSPLHKAIINIPQSGTPLQLNNKQFDPKLKITKDEQKINNWKNKALHGKYPHQLEQDHVDKNASCTWLTKGNIFGETEGFLVAIQDQTIKTRNYCKYILKEAIKTDKCRLCHQVTETIDHITGGCCVLANKEYTHRHDNVAKHIHQQLALKHKLLKEYTPYYQYKPKSVLENNMAKLYWNRDIITDRTVLSNRPDITLSLKSSKTTYLIDISVPNTHNIKNKHTEKIQKYLSLAEEIKQMWHQEHVQILPIIISSTGIVPKTLKTALNILDLNTNIYIPLQKSIVIDTCSIVRRFLNPSSIPLDNYTTTHESNKSH

SEQ ID NO: 1058 - protein, 1331 aa, Ectomis octomaculata
MRLRNRQIPQAGTREGESRPGPSGPGCPSYSGGGNVSHKTAQHNAAAADKSHDTTHPSSPTSSTHSLFTSPSSSPYSYQFQSSSSSLSTIITPRSCDVVQESRSTSPVPITDSINPTRVKKSNPSFRVSHTTDQTIHISNTPARSVLQDMLPATTLAGKSRQRMKWTDDINKELLRCYYIVTQNETNLTAWRPQLRQRFVASVPELNHLTEQRLADQIRVIHKNNRVSAPERERIKQSVSPLISISNNQIHHTMTDNVNVTDNIHITHSDNSQSKQTPDPLILDPHYTTNTTKSSTIQLCEPILSSEHIQTQYMETSNRITDPIEYEAIENIFKEMLIKYAGTDPILRPTIPKLQITRNVIKTVNSINKIIALYLETKEKITLEDIHEIIYCAAQAVTTLHCKKIKNFKNNSTHNKSYKNISLRVPQWERRIQNKITILRKEIGQLTQYLNGNLTQKKEQKLDPNNKSKSALLEELDKNKQKLQAYSKRLRRYKISNERKTHNKLFNTNQKLFYQKLNSEQIQVTQTPHKDEIQDYWESIWSRSVQHNRHTPWVKIEEQEMENINPMPNIIIDKDDVSQAIKKTLNWKAPGLDKIHNYWIKYLSATHEHLANTFNRLICNPQETPSFLTQGITYLKPKDTDTTNPEKYRPITCLPTIYKLLTSIISYKLNTHITQNHIIPEEQKGCCKGSRGCKEQLVIDTAIHNQVKDKHRNMCYSYIDYQKAFDSVPHSWLLHVLKIYKVDDRLVQFLRHTMKNWTTRLNLHTVNTSICTQNIKILRGIFQGDSLSPLWFCLALNPLSRILNSTDFGYIVNKDTNTKLTHLLYMDDIKLYAPNRHQLEKLLELTENFSRDIKMTFGTDKCKINSISKGHYKQTDPYKLQTKEGIIDKMEHKETYKYLGYQQSTSINHSDIKTELKMKYKQRLQKIFKTQLSGRNKVKAVNMYAVPVLSYSFGIIKWSDTELEALNTITRTTSNTYKIHHIHSALQRFTLKRKLGGRGFIDIKNLHYTHIDNLRTYFLTKAKESALHKAIVNLPQSGAPLHLNNSEFNPKLKILSDEQKIEDWKKKALHGKYPNQLHQKHIDNNASCSWLTKGNIFGETEGFLVAIQDQIIKTRNYAKYILKEIIDSDKCRLCHKTTETIDHITGGCSTLANKEYTYRHDNVAKHIHQQLALKYKLLDSYTPYYQYKPVSVLENNTTKLYWNREITTDRTILSNRPDITLTLKHCKTTYLIDIAVPNTHNLTQKHTEKIQKYIPLADEIKQMWHQESVKIIPIIISSTGVVPKSLKIAFKLLNLPENTYIPIQKSIVIDTCSIVRRFLNPTNITNAITQD

SEQ ID NO: 1059 - protein, 1320 aa, Aspitha aspitha
MKMSKPTLQNKRYNLRSHPRIQNAMSTPTTHSEVMNEGALISKNSKKTTTEPTQSRSPSTTSSLESLFESPTSSLRSYEESEQYQSRSTTLSPISDVVTTPKKRFLNNRNAPNRHKQQTIVEEETPNNVESHNHSRLRQTNPTRSVLQAMKPTTTLAGRDRQRMKWTNEVNHHLLRCYYIVTNLEKNLTGYRTQLREKFIAHFPELHFITEQRLSDQIRVIHRNNRIPLDERTQIKLNVETYLNLNTNIDSTHTLQILPLTDPSQCPQNISTSSYSETTSLKPSNDTSQTPQAPKTITAEHIIDTENEANETTELGNMFKESLIKFKNSDPVSRPLIPKLQITYNTRKYINNLNNLIEKYLTENSVKTVEEIHEIIYCAAFTLATFNTKKPTIDRTNQQNDKPNNSVPDWERRLENRITKLRKEIGRHTQYLKENLSQKKKFKLNPSSKEKQEIIDKLDTLKQKLQALAKRLKRYRKANLRYKQNKLFESNQKVLYQNLNPQHQIKNTPNLEEMKSYWEKIWSEPQTHTTNPSWISIEEKETQQIDPMPLVTIDLEDIRTATSKMLNWKAPGPDKIQNYWLKYLTATHKTIADIFNNLIQNPEIVPEFMVQGVTYLKPKESDTSDPANYRPITCLPTLYKLLTSIIASKINTHMTLNKIIDEEQKGCRKGSRGCKEQLVIDTEIHNQVRKKHRNLYFAYIDYKKAFDSVPHSWLIYILKRYKIDFTIVKFLQHAMTKWSTILNITTEYKCLKSTPINISRGIFQGDSLSPIWFCLAINPLSKILNNTGHGYIIDRPNKIKLTHLLYMDDIKLYASTRQQLNDLLQLTETFSTDIKMEFGITKCKINSIVKGTYKQTEPYNLTLHSEQICSMEPNDYYKYLGYKQNVAIEHTKIKQDLTVQYKQRLNKIFKTQLSARNKVKAVNTYAVPILTYSFGIIKWTDTDLDALNILTRTTANKHNIHHIHSATERFTLKRELGGRGFIDIKNLHYKQIENLRTYFINKAIDSPLHKAIINIPQSGTPLQLNNKQFDPKLKITKDEQKINNWKNKALHGKYPHQLEQDHVDKNASCTWLTKGNIFGETEGFLVAIQDQTIKTRNYCKYILKEAIKTDKCRLCHQVTETIDHITGGCCVLANKEYTHRHDNVAKHIHQQLALKHKLLKEYTPYYQYKPKSVLENNMAKLYWNRDIITDRTVLSNRPDITLSLKSSKTTYLIDISVPNTHNIKNKHTEKIQKYLSLAEEIKQMWHQQHVQILPIIISSTGIVPKTLKTALNILDLNTNIYIPLQKSIVIDTCSIVRRFLNPSSIPLDNYTTTHESNKSH

SEQ ID NO: 1060 - protein, 1260 aa, Thymelicus lineola
MSCDVAHEAHANSLVPTIDITNSTRILPNDSTNCVDHHNPQSSLLHTNTPVRSVLREMLPATTLAGKSRQRMKWTKDINIELLRFYYAVTLCETNMTAWRPLLHKKFIERFPELSHITEQRLSDQIRVIHRNNRISLTERDNLKQMISETLRSANNIHNTIEEDISNTYAHNNQHPTTQDTLTIQNTPNIQQTLNQIHELQSTTPIQTNQPLETSEHIQTQVNDPTNTPDGSPNYGQIENVFTEMIIKYTGTDPTLRPRIPKLITTRQMIKTVNALNNIVDNHLKNKETIMLEDIHDVIYCAAITVVTFHTKQPKIIIDQVSSTPNNKITKQKEPQWKIRIEKKITSLRKEIGQLTQYLNGNLTQKKQNKLNLNNQNRQEIVNQLDTKKQKLQAQAKRLNRYKKSNQRKSDNILFKNNQKVFYQKLNSENITVTQPPDIAHIQNYWENIWSKPVQHNTHRTWTEIEKQEMENIEPMSEITIDKDDVTHAIKRTLNWKAPGPDKIQNYWIKYLTSTHIHIANTLNNLIKNPHDMPAFLTHGVTYLKPKDNDTTNPAKYRPITCLPTIYKLLTSIITHKINSHISVNKIIPEEQKGCSKGSMGCKEQLIIDAEIHNHVKQKNRNLFYSYIDYQKAFDSVPHSWLLHVLRIYKIDNSVIHFLQHAMTKWTTQLNLKTNTTSLSTSRIKIARGIFQGDSLSPLWFCLALNPLSRILNNTPYGYTINREYNIKLTHLLYMDDIKLYASNKQELDHLLRLTEKFSTDIKMTFGTSKCKINSITKGQHCKTDSYALELQGGTIDSMEARETYKYLGYQQSTSLNHTDIKDTLKTKYRQRLNKVLNTQLSARHIVKAVNTYAIPILTYSFGIIKWSDTELNALNTLTRVICNKHNIHHIHSATQRFTLNRKLGGRGFIDIKNLHYTQIENLRTYFMRKATESTIHKAIVNMPYCGTPLQLNNTSYDPKTKIQNVEQKIKNWKDKALHGKYPHQLEQDHVDRNASTAWLTNGNIFSETEGFIVAIQDQVVKTRNYSKFILKEAIETDRCRLCHKYTESLDHITGGCTILANKEYTHRHDNVAKYIHQQLALKYKLTDTHTPYYKYKPKSVLENNTVKLYWDRDIITDRTILSNRPDITLTLKSKKTTYLIDIAIPNTNNLKQKHIEKIQKYVPLADEIKQMWHQDTIQIIPLIISSTGIIPKTLHSALKTLDLHPKTYIPIQKSIVIDTCSIVRRFLNPTLLTLQNVPDTQAMSTDTHSEQNTYNHQSS

SEQ ID NO: 1061 - protein, 1360 aa, Hesperia comma
MRLRNRVLPQAGTHTGESRPGPSGSGCPTYSGGGTVSLRSAQSSTVAATGDSSPLHHPTSSPTTSTHTLFQSPSSSPRSYEIHQTSRSTTTSPMSCDVAQEATANSLAPTIDITNPTQILQNNSPNCVDHDIVSSNIDINTPARSVLQEMLPATTLAGKSRQRMKWTKEINIELLRCYYAVTLCETDMTAWRPLLHQKFLEKFPELSHISEQRLSDQIRVIHRNNRIPTIDRECIKQTILQTLSSTNNDNTITEGQEASSICTYNRQQVLTEEVTTTENTVTIQHTHSHTDEHQTITPANTNRPLEMTEHVQTQGNESRNTSLKSIDYEQIENIFYEMTIKYTGMDPSLRPTLPKLQTTRQMIKTVNCVNKIVAKHFENKEISKLEEIHEVIYCAAITVATLHVKQPTKTIDHTNVTPNTKTHKQNEPQWKRRIENKITLLRKEIGQLTQYLKGNLTQKKQHKLNPTNKNRQEIVEQLDTLKQKLQAQAKRLNRYKKSNQRKSDNVLFNNNQKSFYQKLNSENITIKLPPDLTKVKKYWENIWSKPVQHNTHATWAEIEEKEMQNIEPMNEIIISKDDVTHAIKRTLNWKAPGPDKIQNYWIKYLTSTHTHIANAFNYLIKNPHHIPTFLTQGVTYLKPKDNDTTNPAKYRPITCLPTIYKLLTSIITHKVNSHISINKIIPEEQKGCCKGSMGCKEQLIIDAEIHNQVKHKNRNLYYSYIDYQKAFDSVPHCWLLHVLKIYKIDNSLITFLEHAMSKWTTKLNLRTNTSTLSTSHIKIARGIFQGDSLSPLWFCLALNPLSRILNNTTYGYTIDREHKIKLTHLLYMDDIKLYASNKQELDHLLRLTEKFSTDIKMTLGTTKCKINSITKGQHCKTDSFELKLQGGTIDSMEPRETYKYLGYQQSTHLNHTDIKNTLKTKYKQRLNKILSTELSARNMVKAVNTYAIPVLTYSFGIVKWSDTELDALNTTTRTISHKHHIHHIHSALQRFTLNRKSGGRGFIDIKNLHYTQIENLRKYFIHKANDSTLHKAIVNIAHPGTPLQLNNSRFDPKTKILKQEQKIEIWKKKALHGKYPHQLEQDHVDRIASTAWLTNGNIFSETEGFLVAIQDQVIRTRNYSKFILKEAIETDKCRLCHKYTESIDHITGGCGGLANKEYTHRHDNVAKYIHQQLALKYKLTDTQTPYYKYKPKNVLENTDAKLYWDRDIITDRTILSNRPDITLTLKSTKTTYLIDISIPNTNNLKQKHSEKIQKYIPLADELKQMWHQEAVKIVPIIISSTGIIPKTLHAGLKMLDLHPKTYIPLQKSIVLDTCSIVRRFLNPSSLSPQNTLDNINSIQNAQSHSHSPISYQTLDPEYLA

SEQ ID NO: 1062 - protein, 968 aa, Thymelicus sylvestris
MNIMVTFHTKQPKIIVDQIPSTSNNKTNEHREPQWKKRIEKKITLLRKEIGQLTQYLNGNLTEKKQNKLNLNNRNRQEIVAQLDTNKQKLQAQAKRLNRYKKSNKRKSDNILFQNNQKLFYQKLNAENITVTQQPDIAHIKTYWENIWSKPVQHNTHTTWTEIEEQEMENIEPMPEITISKEDVTHTIKKTLNWKAPGPDKIQNYWIKYLTSTHIYIANTLNNLIKNPHDLPTFLTQGVTYLKPKDNDTTNPAKYRPITCLPTIYKLMTSIITHKINSHISINKIIPEEQKGCSKGSMGCKEQLIIDAEIHNQVKHKNRNLFYSYIDYQKAFDSVPHSWLLYVLKIYKIDNSVIHFLQHAMSKWTTKLNLKTNTTTLSTSQIKIARGIFQGDSLSPLWFCLALNPLSRILNNTPYGYIINRENRTRITHLLYMDDIKLYASNRQELDHLLRLTEKFSTNIKMTFGTSKCKINSITKGQHSRTNSFELELQGGTIDSMEPRETYKYLGYQQSTSLNHTDIKNTLKNKYKQRLNKVLSTQLSARHIVKAVNSYAIPILTYSFGIIKWTDTELNALNTLTRTISNKHNIHHIHSASQRFTLNRKLGGRGFIDIKNLHYTQIDNLRTYFLQKATNSTIHKAIVNMPHPGTPLNLNNKHYDPKTKIQNVAQKIKNWKDKVLHGKYPYQLEQDHVDKNASTAWLTNGNIFSETEGFIVAIQDQVIKTRNYSKYILKETIETDRCRLCHKYTESLDHITGGCSVLANKEYTHRHDNVAKYIHQQLALKYKLTDTHTPYYKYKPMSVLENNAVKLYWDREIITDRTILSNRPDITLTLKSKKTTYLIDIAVPNTNNLKQKHYEKIQKYVPLADEIKQMWHQDTIQIIPLIISSTGIIPKTLHTALKTLDLHPKTFIPIQKSIVIDTCSIVRRFLNPTLLTLQNMPDSNTFTFTSSHTQAMSTDTHSAQNTHNHQSS

SEQ ID NO: 1063 - protein, 1373 aa, Cecropterus toxeus
MRLRNRQIPQAGTREGESRPGPNSSGCPTYSGGGNVSHKTAQSSTVVVDKLHTPSHPSSPISSTHSLFPSPSSSPYSFQLQSSPSSSRSSTITSLSRDVAQEAHADSPVPTTDSTNPTRVTQNKQPSRVTHNTHSPSHTTNTPARSVLQDMLPATTLAGKSRQRMKWTDEINKELLRCYYLVTQNESNLAAWRPQLHRMFAQNVPVLSHLSEQRLADQIRVIHKNNRIPVSEREVIKQSVSFLIPSSSNSLNNQVVARNDDDHSNINTTLTTNNQLISNSHNQTLNAQHTLTITHDTIENTQVYQSCERSEHMHIRDSEEIHKQLGSVDYKKIQEVFREMLIKYSGTDPTLRPIISKPQTTRNVIKTVNSINEIIDKYLKTKHSMTLEEIHEVIYCAAKTVVELHTNRVNTLDNSSKSNNNNQRKPHWEKRIENKIITLRKEIGQLTQYLNGNLSQKKQKKLNPNNRSKDEIIEQLDNSKQKLQAYTKRLRRYKKSNERKSHNKLFNTNQKLFYQKLNSEQIHITQPPDIIDIQNYWKNIWSIPVQHNTHTSWTEIEEQERENIDPMPEITINKDDVLLAIKKTLNWKAPGPDKIQNYWIKYLPATHEHIANAFNHILCHPQDTPSFLTQGITYLKPKDDDTTNPAKYRPITCLPTIYKLLTSIIAHKLNSHITLNHIIPEEQKGCCKGSKGCKEQLVIDTEIHTQVKQKHRNLYYSYIDYQKAFDSIPHSWLIHILKIYKVDIKLIQFLLHTMNNWTTKLTLHTNNISLSTQKIKILRGIFQGDSLSPLWFCLALNPLSRILNKTDYGYVIDRDTNTKLTHLLYMDDIKLYAPSRTQLDHLLRLTENFSTDIKMTFGTNKCKINSIIKGKHQETNPFHLETTGGTIDSMEFRETYKYLGYQQSTSINHTEIKNTLKTKYKQRLHKIFNTQLSARNKIKAVNTYAIPVLTYSFGIVKWSDTELEALNTATRMISHKHNIHHIHSAVQRFTLKRRLGGRGFIDIKNLHYTQIDNLRSYFLYKSDESPLHKAIVHLHQAGTPLQLNNRQFDPQLKIIKDDQKIEDWKKKALHGKYPHQLQQDHIDYNASCTWLAKGNIFGETEGFLVAIQDQVIKTRNYAKYILKEAIDTDKCRLCHQSTETIDHITGGCSVLANKEYTHRHDNVAKHIHQQLALKHKLLESYTPYYKYKPKNVLENNTVKLYWDRDIVTDRTILSNRPDITLTLKSSKTTFLIDISVPNTHNLKQKHTEKIQKYIPLADEVKQMWHQESVRIIPIIISSTGVIPKTLKTALKLLELHENTYIPLQKSIVIDTCSIVRRFLNPTTLTLQTHQDTDSDTPTQDSCPRVNTQNTQTHTHDVTNTLIHTHSNHTNTHE

SEQ ID NO: 1064 - protein, 1355 aa, Lobocla nepos
MRLRNRVLPQAGTHTGESRSGPSGSGRPTYSGGGGTVSLRSAQSSTVAATGDKSSPLHHSPASSISSTHSLFQSPSSSPHSYELHQAYKSTTTSPMSSDVAQEPPVNSLVPTTDITHPTQILPNNLSNCVDHNIRNTPTSSLDINTPARSVLQEMLPATTLAGKSRQRMKWTKEINIELLRCYYTVSLCETDMTAWRPLLYQKFIEQFPELSHISEQRLADQIRVIHRNNRIPVNQRECIKQTILQTLPSTNNIDNTIDEEVLTQDTPTIQNTSNTQHTQSHIRENRTITLPQTTRALETSEHIQTQENEQVNTAVKPINYEQIENIFTEMIIKYTGTDPTLRPTIPKLQTTRQMIKTVNTINKIVDKHIQNKETITLVEVHEVIYCAAITVATLHDKKSIKTVEHTSFTSNSKTNKQKEPQWKRRIENKIASLRKEIGQLTQYLNGNLTIKKQHKLNPNNKNRQEMVDQLDTNKQKLQAQAKRLHRYNKSNQRKSDNILFKNNQKIFYHKLNSENITVTQQPDTAHVQKYWENIWSKPVQHNTHTSWTEIEEQEMENIEPMQEITIDKDDVTHAIKRTLNWKAPGPDKIHNYWIKYLTSTHIHIANTLNNIIKNPHEMPAFLTQAVTYLKPKDNDTINPEKYRPITCLPTIYKLLTSIITHKINLHITTNKLIPEEQKGCSKGSMGCKEQLIIDAEIHNQVKVKNRNLYYAYIDYQKAFDSVPHSWLLHVLKIYKIDNNLIQFLQHAMSKWKTKLNLRTNTTTLSTSHIKIARGIFQGDSLSPLWFCLALNPLSRILNSTTRGYTIDRENKIKLTHLLYMDDIKLYASNKQELDDLLRLTEEFSTDIKMTFGTSKCKISSITKGQHSGTDSFELELQGGTIDSMEPRETYKYLGYQQSTSINHGDVKNTLKIKYKQRLNKIFSTQLSARNTVKAVNTYAIPILTYSFGIVKWSDTELDALNTVTRTISNKHNIHHIHSAVQRFTLKRKLGGRGFIDIKNLHYTQIENLRKYFIRKAHDSTLHEAIVNMPHSGTSLQLNNERFDPKTKILKEEQKIESWKKKALHGKYPHQLEQDHVDRNASIAWLTNGNIFSETEGFLIAIQDQIIKTRNYSKYILKEAIETDKCRLCHRYTESIDHITGGCNALASKEYTHRHDNVAKYIHQQLALKYHLTDTHTPYYKYKPKNVLENRNVKLYWDRDIITDRTILSNRPDITLIVKPIKTTYLIDIAVPNTNNLKQKHTEKIQKYIPLADEIKQMWHQETIKIVPIIISSTGIIPNTLHTALRTLDLHPKTYIPLQKSIILDTCSMVRRFLNPTSLSLQNAPDITTTLISTRTHNMQTDTHLTHYHHSPSSQ

SEQ ID NO: 1065 - protein, 1336 aa, Passova gellias
MRLRNRKLPQAGTREGESRPGPSGSGCPAYSGGGIDSHSTTQSSTVVADKSSSHAHTTPYPSSPKSSTHNKTHSSSPLTCPTIITPLSKDVAQEAHAKSPVPINDITPTTRVPDISQLNRVHHETHTSTPNTITPAKSVLQDIFPATTLAGKSRQRMKWSNQINTELLRCYYIVTRNESNVTAWRPQLHQMFTERVPELNHLSEQRLADQIRVIHKNNRIPASEREIIKQSVSLIISIPNGTTNQTITSNTVNQSNTTTTHTTTNHHSNTDSLYETPNPSHILTTTEPISITSQASQSLENREYNPQMKRSKMTYKSPEPIEYNTLESTFMEMLIKYAGTDPTLRPTIPKIHITPVFIKAVNTINEIINKYLSTKDQITLTEIHEVIYCAALTIGTLYTKPTDKLHNNTQDNSNAIRKQKKPNWEKRLEKKIIKFRKEIGQLTQYLNGNLNKKKQQKLDKNHKNHDDIIEKLDSNKQKLQAYSKRLRRYRKSNERKSQNKLFHNNQKLFYQKLNTDQIDITQPPNNTDIQNYWKNLWSKPVQHNTHSSWAEIERQEMENIHPMPEITIDIDDVTQAVRNTLNWKAPGPDKIQNYWIKYLTSTHKHIANTFNHLLHNPQETPSFLTQGITYLKPKDDDTTNPAKYRPITCLPTIYKILTSIISNKLNTHITQNKIIPEEQKGCCKGSKGCKEQLVIDIEIHNQVKLKHKNLFFSYIDYQKAFDSIPHSWLIHILKIYKVDYRLINFLQHTMKNWTTILNLRTKNTSLSTCPIKILRGIFQGDSLSPLWFCLALNPLSRILNKTDCGYVIDRDKDIKLTHLLYMDDIKIYAANRQQLDHLLKLTDKFSTDIKMAFGISKCKINSIIKGQHKNTHPYELQTQGGTIENMEAKETYKYLGYHQSTTINHTDIKETLKHKYNQRLKKILSTHLTARNKIKAVNTYAVPILTYSFGVIKWSDTELEALNRATRTASNKYNIHHIHSAVERFTLKRKLGGRGFIDLKNLHYTQIDNLRTYFLLKANDSTLHKAIVNMLQPGTPLLLNNSEFDPKLKITKDEQKINNWKKKALHGKYPHQLEQDHVDQNASCSWLTKGNIFGETEGFLVAIQDQTIKTRNYCKYILKESIQTDKCRLCHQVTETVDHITGGCCVLANKEYTHRHDNVAKHIHQQLALKHKLLKEYTPYYQYKPKSVLENNMAKLYWNRDIITDRTVLSNRPDITLTLKSSKTTYLIDISVPNTHNIKQKHTEKIQKYLNLAEEIKQMWHQEHVQIIPLIISSTGIVPKTLKVALNILGLNTNTYTQLQKSIIIDTCSIVRRFLNPTSVPLDNYITTHEGTKSHE

SEQ ID NO: 1066 - protein, 1348 aa, Ectomis octomaculata
MLHKPSDQRSSSKKKYAMRLRNRQIPQAGTREGESRPGPSRSGCPTYSGGGNVSHRDAQSCTAAAQNSNIISHPSSPISSTHSLFPSPSSSSFSHQSQSSSSSSLPSVTPLSCGVAQEAQANRPVPTTDITKCTRTTVNILPKRVNHYTHPSTHITNTPARSVLQEMLPATTLAGKSRQRMKWTDEINRELLRCYYIVTQNETNLTAWRPSLHRRFVAAIPELNHLSEQRLADQVRVIHKNNRISVSEREQIKQSISEQISTLNNSSHRTITCDVEQQSSTKYKLSDENLLLVSDSQNEAFNPQNITHTHITQQLDPLPQHMDSSELNQNATEYEEIENIFTEMLIKYTGIDPTHRPPIPKPQITRNVIKTINTMNEIIDLYLRSKLVVTIENIHETIYCAALTVSTIHTKKLGNNTNNKNNNIERKPRWQKRIESKIVNLRKDIGQLTQYLNGNLSQKKKQKLYPNNIDRDAIIDQLDKNKQKLQAYSKRLRRYKISNERKSHNKLFNMNQKLFYKKLNSEPTHITQPPHSEAIQSYWENIWSNPVHHNMHSSWTKIEEQEMENITPMSELTIDTDDVLRAIKKTLNWKAPGPDKVQNYWIKYLPATHQYIANSFNHLINNPKDTPSFLTQGITYLKPKDSDTSNPAKYRPITCLPTIYKLLTSILSYKLNTHITQNKIIPEEQKGCSKDSKGCKELLVIDTEIHAQVKQKHKNLYYSYIDYQKAFDSVPHSWLLHVLKIYKVDNRLTQFLQHTMKNWTTELSLRTNNATINIKNIRILRGIFQGDSLSPLWFCLALNPLSRILNNTDFGYVISGENNTKLTHLLYMDDIKLFAANRQQLDILLRLTENFSKDIKMTFGINKCKINSIIRGQYKKTDPYDLEVQGGAINSMEPRETYKYLGFKQSTYVTHTEIKNELKAKYKQRLHKIFNTQLSARNKVRAVNTYAIPILSYSFGVIKWSDTDLEALNTMTRTVSNIHKIHHIHSAVQRFTLNRRQGGRGFIDIKNLHYHQIDNLRTYFLTRATESNLHKAIVNLSQSGTPLQLKNCQFDPKLKILSDEKKVENWKNKALHGKYPYQLQQNHIDYNASCTWLTKGNIFGETEGFMVAIQDQVIKTRNYSKYIIKEAIDSDKCRLCHHTTETIDHITGGCNVLANKEYTHRHDNVAKHMHQQLALKYKLLNSYTPYYKYKPKNVLENNTTKLYWNRDIITDRTILSNRPDITLTLKHCKTTFLIDIAVPNTHNLTQKHTEKIQKYIPLADEIKQMWHQESVKIIPIIISSTGVVPKSLKTGLKLLDLHENTYIPMQKSIIIDTCSIVRRFLNPTTLSIQMTQDTVPDPTHTRALTHNT

SEQ ID NO: 1067 - protein, 1395 aa, Cecropterus confusis
MRLRNRQIPQAGTREGESRPGPSSSGCPTYSGGGNVSHRTAQSSTVAVDKSLTPSHPSSPISSTHSLFPSPSSSPYSFHFQPSSSRSSTITSLSCDVAQEALANSPVPTTDSTNPTRVTQNNQPSRVTHSTHSSSHTTNTPARSVLQDMLPTTTLAGKSRQRMKWTDEINKELLRCYYIVTQNETNLTAWRAQLHRSFAENVPVLSHLSKQRLADQIRVIHKNNRIPAPEREQIKQSVSFLISSSSNSLNNQTITTNDDDDDHSNINATFTTNNQVISDSHNQTRNPQHTITITHDAITNTQAYQSCESSEHVQTQDFEPINRLSDSVDYKKIQEVFREMLIKYAGTDPTLRPNISKPQTTRNVIKTVNSINEILDKHLQTRDFITIEEIHEVIYCAAQTVVKIHTNRVKTLENGTKSNNNNERKPHWEKRIENKIVTLRKEIGQLTQYLNGNLSQKKQKKLNPNNGSKDEIIEQLDNSKQKLQACTKRLRRYKKSNERKSHNKLFNTNQKLFYQKLKSEQIHITQPPNKIDIQNYWKNIWSIPVQHNTHTSWTEIEEQEMENIDPMPEITINKDDVTLAIKNTLNWKAPGPDKIQNYWIKYLPATHEHIAHALNHILCNPQDTPYFLTQGITYLKPKDEDTTNPAKYRPITCLPTIYKLLTSIIAHKLNSHITRNHIIPEEQKGCCKGSKGCKEQLVIDTEIHTQVKQKHRNLYYSYIDYQKAFDSIPHSWLIHILKIYKVDIRLIQFLLHTMKNWTTKLTLHTNNISLSTQKIKILRGIFQGDSLSPLWFCLALNPLSRILNKTNYGYVINKDTNIKLTHLLYMDDIKLYAANRKQLDHLLKLTENFSTDIKMTFGTNKCKINSIIKGQHQKTDPFQLETIGGTIDNMEFRETYKYLGYQQSTSIDHTEIKNTLKAKYKQRLHKIFNTELSARNKTKAVNTYAIPILTYSFGILKWSDTELEALNTVTRTISHKHNIHHIHSAIQRFTLKRRLGGRGFIDIKNLHHTQIDNLRTYFLLKANESALHKAIVHLPQSGTPLHLNNKQFDPKIKILKEDQKIENWKKKALHGKYPHQLDQDHIDYNASCTWLTKGNIFGETEGFLVAIQDQIIKTRNYAKYILKEAIETDKCRLCHQNTETIDHITGGCSVLANKEYTHRHDNVGKHIHQQLALKHKLLESYTPYYQYKPKTVLENDTAKLYWDRDIITDRTILSNRPDITLTLKSSKTTFLIDIAVPNTHNLKQKHTEKIQKYLPLADEIKQMWHQETVRIIPIIISSTGVIPKTLKTALKLLDLHENTYIPMQKLIVIDTGSIVRRFLNPTTLTLQTHQDTHSGTPTQDSLPRATLQNTQMHTHNATKHSSSSTTSHKHMNQVTWRKSVPLSYKSDIQSSTKNM

SEQ ID NO: 1068 - protein, 1331 aa, Lysandra bellargus
MRLRNRNIPQAGTGAKCNGESRPGPSGLGSPSYSGGDNVSPHSAQSGTAAENIVSTTSSTLPYPTSPTSSVSLFPSPRSSPRSYMFDKSSSLSRSTSHSPMSDVVAQEASATYPMPISDTISSTSTSQNIEIHPVDHHTLQSHLINTPVTSVLQDMLPPTTLSGKRRQRMKWTDQINRELLRCYYTVTSCETNLTAFRPLLHQKFIEHFPELRHISEQRLADQIRVIHRNNRIAPHERELIKQYVANLTQTSDIFSIQSSSQSTDIICLSPANPYTESTQSNTNATAPHHPPAQTSYQLNTLDSYDIVEDTTTQEINISNTPPTDSNLIDNEKIENVFKEMVIKYSGSDPSLRPIIPKLRISRSVIKTITVLNNAIGKYLEEKVTTDIEEIQSAIYCAAITATTLHVKLRKTNTNKPTNKTIDYNNPKWQIRIEHRIKQLRKEIGQLTQYLKGNLNTRNQQKVNPNNYPIDQFADKLDNLKQKLQANSKRLRRLKISNERRRHNMLFTNNQKIFYQNLSVENIKITEPPDLEKVKSYWENLWSNPALHEEQSPWIDAETEEWQNIDNMPDIIIHREDVTHAIKKSLNWKTPGPDKIHNYWIKYFTSTHSYIANSFNLFIQDPQSIPPFLTQGITYLKPKDNDTTNPTKYRPITCLPTMYKLLTSIIAQKLNTHITQNNIIPEEQKGCAKGSMGCKEQVIIDSEIHNQAKQNHKNLHYSYIDYQKAFDSVPHSWLLHVLKIYKVNSKLIHFLQYIMTTWSTRLNLRTVHGDLNSSSIKIKRGIFQGDSLSPLWFCLALNPLTKILNKSGYGYTINKTNNTKITHLLYMDDIKLYASDRQQLEHLIRLTEKFSLDIKMTFGINKCKINCIIRGKHTQTEPLNLEQQNGIIDSMQTKETYKYLGFSPSIAINHIDIKNTLKSKYKQRLNKILATQLSARNKVKAINTYAIPILTYSFGIIKWSDTELDALNTTTRTLSYKHNIHHIHSAVERFTLKRKLGGRGVIDIKNLHYNQINNMRSYFLNKAQTSQLHDAIVRLPHKGTPLQLSNSQFNPTLKILKDSDKIQKWKSKALHGKYPHQLEQEHVDQSASHSWLCKGNLYSETEGFMIAIQDQIIKTRNYSKFILKESLDTDKCRLCHLSAETIDHITGGCSTLATKEYTHRHDNAAKHIHQLLAIKYKLIYTHTPYYKYKPRNVLENRTVKLYWDRDIVTDRTILSNRPDITLTIKPEKTTYLIDIAVPNTNNLKQKHNEKIQKYIPLADEIKQMWHQDVVKIIPIIISSTGVIPKTLAAVLKALDLHKNTYIQIQKSIIIDTCSLVRRFLNPSSSFPTLQS

SEQ ID NO: 1069 - protein, 1352 aa, Carystus phorcus
MRLRNRKLPQAGTHTGESRPGPSGSGCPTYSGGGTVSLRSAQSSTVAPIDNSSPPHSLTSSTHSLFQSPSSSPHSYELQQSSPSTTTSPMSCDVAQEAVANSLVPIPDINHPTRRIQNNPLNCVDHYTQSPLIDTNPPARSVLQDMLPATTLAGKSRQRMKWTKEINTELLRCYYTVTLCETDMTAWRPLVHQMFLEQFPELCHISEQRLSDQIRVIHRNNRIPPTEREHMKQMISRTLPHTHNRNNVIDEQVTLNTHDQNTQAFTTQRTQSSPENTPNTLHIQNQTCERQIIRPTQNNRQLETSEHILTQENVQVNSSVTSIKFEQIENTFTEMLIKYSGTDPTLRPTIPKLQTTRQMIKTVNIVNEIVDKYFQNKDTITLVEVHEVIYCAAITVATSHGKQSNIDHISSSLNNKIHKHKEPPWKRRIENKITSLRKEIGQLTQYLNGNLSQKKQHKLNVKNKDRQEIIDQLDKNKQKLQAQAKRLNRYNKSYQRKTDNILFEKNQKLFYQKLNSENITLTQTPDIVQIQKYWEDIWSKPVHHNTHISWTDIEEQEMENIEPMSEITIGKDDVTLAIKRTLNWKAPGPDKIQNYWIKYFTSTHIHIAKTFNNIIRNPHEMPLFLTQGLTYLKPKDKDTTNPANYRPITCLPTIYKLLTSIITNKINSHISTNKIIPEEQKGCSKGSMGCKEQLIIDAEIHNQVKVKNKNLYYSYIDYQKAFDSVPHSWLLHVLKIYKINNTLIQFLQQAMTKWKTKLSLRTNTTTLTTSHIKIKRGIFQGDSLSPLWFCLALNPLSRILNNTTYGYIIDRANKIKLTHLLYMDDIKLYASNKQELDHLLRLTEKFSTDIKMTFGINKCKINSITKGHYNKTDSYELEIQGGTINSMEPKETYKYLGYQQNTSINHTDVKNTLKTKYKQRLNNILRTKLSARNIVKAVNTYAIPILTYSFGIIKWSETELNALNILTRTLSNKHNIHHIHSAVQRFTLRRKLGGRGFIDIKNLHYAQIENLRTYFMRKAKDSTLHKAIVNMSQSGTPLQLKNSVFDPKTKIVKEEQKLESWKNKALHGKYPHQLEQDFVDRNASTTWLTKGNIFSETEGFLVAIQDQVIKTRNYSKFILKEAIETDKCRLCHRYTESIDHITGGCNVLANKDYTHRHDNVAKYIHQQLALKYKLTDTYTPYYKYKPRNVLENNTVKLYWDRDIITDRTILSNRPDITLTLKLTKITYLIDIAVPNTNNLKEKHTEKIQKYIPLAEELKQMWHQDIIKIVPITISSTGIVPKSLHTSLKILDLHPKTYIPLQKSIILDTCSIVRRFLNPATLIFHNTSNITTTCTPIQTHNMQTDTHLTQNRP

SEQ ID NO: 1070 - protein, 1333 aa, Doberes anticus
MRLRSRQIPQAGTREGESCPGPSSSGSPTYSGGGNVSHMTAQSQAVVVNNEKPPSYIKDSSSPISSTDTLFQTPRSSPHSYETQHSPSQSSTTTTLSCDVAQEAHTDSPAPTTDNSNPTRASQNNTHNRVNHNSHSLSSIINTPARSVLQEMLPTTTLAGKSRQRMKWTDQINRELLRCYYVVTHNESNLTAWRPLLHQRFVESIPELSHLSEQRLADQIRVIHRNNRIPNHEREDIKQSVSIFLSISNGPNQIINTSDTLQQSSTNATPTNNIYQSNTDSLNQTTHSQYTLPITQTNSTTNTNQSFQNIEHFETQSTETINKTLGSIDYKKIENTFTEMLIKYTGTDPTLRPTIPKLQITRSVINTVNVTNKIIDQHLRTKDTITLKEIHEVIYCAAQTITTLHTKLYVNTPINNLCNPKSNVVKQNKPQWEKRLENKISILRKEIGQLTQYLKGNLTQKKQLKLNPNNRSRDEIIEHLDSHKQKLQAHSKRLRRYKISNQRKSHNRLFNTNQKLFFQQLNAEQIQITQPPDKDDIENYWKNLWSKPVQHNTHSTWTETEEQEMVNIDPMPEITIDKDDVSQAIRKTLNWKAPGPDKIQNYWIKYLSATHEHIAITFNHLIHNPQETPPFLTQGITYLKPKDNDTTNPAKYRPITCLPTIYKLLTSIISHKLNIFITQNQIIAEEQKGCTKGSKGCKEQLIIDTEIHNQVKHKHRNLFYSYIDYQKAFDSVPHSWLIHILKIYKIDNTLIRFLQYTIKNWTTKLNLRTNKTSLTTQPIKILRGIFQGDSLSPLWFCLALNPLSKMLNKTGYGHVVDRDNNTKITHLLYMDDIKLYASNRLQLDHLLRIIENYSTDIKMTLGTNKCKVSSIIKGQFKETDPFNLDIQGGKIDSMDPKETYKYLGYQQSACISHTDIKNTLKNKYKQRLHKILNTRLSARNIVKAINTYAIPILTYSFGVIKWSNTELEALNTATRTISNKHNIHHIHSAVQRFTLKRKLGGRGVIDIKNLHYTQIDNLRTYFLTKSNESTLHKAIVNLPQAGTPLQLNNNQFDPKLKILDDVQKIDSWKQKALHGKYPHQLEQDHIDRNASCSWLTKGNIFGETEGFLVAIQDQIIKTRNYSKYIIKEAIESDKCRLCHQTTETIDHITGGCNILANKEYTHRHDNVAKHIHQQLALKHKLVDSYTPYYQYKPKNVLENNTAKLYWDRDIITDRTILSNRPDITLTLKSSKTTYLIDIAVPNTHNLQKKHIEKIQKYIPLADEMKQMWHQETIRIIPIIISSTGVIPKNLKTALQLLDLNENTYIPMQKSVIIDTCSIVRRFLNPTSLTLQQD

SEQ ID NO: 1071 - protein, 1213 aa, Spathilepia clonius
MKWTDEINKELLRCYYIVTQNESNLTAWRPQLHRTFAETVPELSHLSEQRLADQIRVIHKNNRIPAAEREQIKQSVSLLVSSITNSSYDQTNTNIDQDSNINSTLLTSTPQISTDSHKKTLTSEHTVTITQHATGTTQTYLSCENSEHMQTQDAESTNTLTDLGQYKEIENVFREMLIKYTGTDPTLRPTIPKPQISRKFIITVNSINKIIDKYLGSKDSITIEEIHEVIYSAAQTVTSIHVTFIKTPKNSTNNINTYVIGSERKPHWEKRIESKITMLRKEIGQLTQYVKGNLSQKKKQKLNPNNIGKDEIIEQLDKYKQKLQAHTKRLRRYKKSNERKSHNKLFNTNEKLFYQKLNADQIQITQHPDKIDIENYWQNVWSVPAQHNKHTTWTEIEEQEMENIDPMPKITIDKNDVFQAIKRTLNWKAPGPDKIQNYWIKYFTATHIHIANTFNHLLYNPEDTPYFLTQGITYLKPKDKDTINPAKYRPITCLPTIYKLFTSIIAQKLNTHITRNHIISEEQKGCCKGSRGCKEQLVIDSEIHTQVKQKHRNLHYSYIDYQKAFDSVPHSWLIHILKIYKVDNTLIRFLMLTMKNWTTKLNLSTSSISLCTQKIKILRGIFQGDSLSPLWFCLAINPLSRILNRTGSGYVIDKDTNIKLTHLLYMDDIKLYAANRQQLENLLRLTENFSNDIKMTFGTDKCKINSIIKGQHQETDPFQLQKQTGTIDSMEFRETYKYLGYHQSTSINHTDIKNTLKIKYKHRLHKIFNTQLSARNKTKAVNTYAVPILSYSFGIVKWSDTELEALNTATRTISNKHNFHHIHSAVQRFTLKRRLGGRGFIDIKNLHYTQIDNLRTYFLLKANESALHKAIVHLHQSSTPLQLSNSQFDPKLKILKDDHKIENWKKKALHGKYPHQLQQDHIDSNASCTWLTKGNIFGETEGFLVAIQDQIIKTRNYSKYILKEAIDTDKCRLCHQATENIDHITGGCSVLANKDYTHRHDNVAKHIHQQLALKHKLLDSYTPYYQYKPKNVLENKVSKLYWDRDIITDRTILSNRPDITLTLKSTKTTFLIDISVPNTHNLKQKHTEKIQKYIPLADEIKQMWHQESVRIIPIIISSTGVIPKTLKTALKILDLHENTYIPMQKSIVIDTCSIVRRFLNPTTLTLQNHQDTHPNTATQNSSSHNTTHNTHTHTHNTPNTLVIIHHRHTNSRE

SEQ ID NO: 1072 - protein, 1374 aa, Autochton potrillo
MRLRNRLIPQAGTRQGESRPGPSSTGCPTYSGGGNVSHKTAQSHTVVVERSPSHITSHSSSPISSTHSLFQSPSSSPRSDQSSYSSLRSTTTTPLSCDVAQEAYANSPVPTTDTTNPTRVLENNLHNRVNHNTHSSSPNINTPARSVLQDMLPSTTLAGKSRQRMKWTDHINRELLRCYYTVTHNETNLTAWRPQLHEKFAEIFPELGHLTEQRLADQIRVIHRNNRITAPERELIKQSVTSLQPTSHRSNDCINTNNIESPLNTPLAPTHYLSQTLNPQQALSSDHSHSRHAHTHPQLIDTTTRIYYSTKNSEHIHTHNSETNKRLDSINYNKIENTFTEMLVKYTETDPTLRPTIPKLQTNRNTIKTVNTVNEIVGIHLSTKHSVTLEEIHEVIYCAAKTIATLHTKHKNQKSENINNNKSTKITTQKKAQWEIRIEKNIATLRKEIGQLTQYLNGNLSQKKQQKLNPNSRDTNKIIEQLDKNKQKLQAYSKRLRRYKVSNQRKSDNKLFTSNQKLFYQKLDTEQIKITQSPNKDDIHNYWTNIWSKPVVHNTHPPWIEIQDQEIENIAPMSKIFVHKDDVSQSIKKTLNWKAPGPDKIQNYWIKYLPATHEYIAHTFNHIINNPQDTPGFLTQGVTYLKPKDNDTTNPAKYRPITCLPTIYKLLTSIISYKLNTHITQNHIIPEEQKGCSKGSRGCKEQLIIDTEIHNQVRQKHRNLYYAYIDYQKAFDSIPHSWLIHILKIYKVDFTLIHFLQDTMKNWTTKLSIRTDNTTICTHPIKILRGIFQGDSLSPLWFCLAINPLSRILNKTGYGYVIDRECNIRLTHLLYMDDIKLYAASRQQIDHLLKMTENFSTDIKMKFGTNKCKINSIIKGQQKETDPFELQIQGGTIDSMEPKETYKYLGYHQGTSVNHTRVKNALKTKYKQRLHKILNTQLSGRNKVKAVNTYAIPILTYSFGIIKWSDTELESLNTLTRTASNTHNIHHIHSAVQRFTLKRHLGGRGFIDIKNLHYTQIDNLRTYFITKAKESILHKTIVHLSQSGTPLQLNNNEFDPKLRILKDEQKIENWKRKALHGKYPHQLEQDHIDYIASCSWLTKGNIFGETEGFLVAIQDQIIKTRNYAKYILKETLDTDKCRLCHQTSETIDHITGGCSVLANKEYTHRHDNVAKHIHQQLALKHNLLESYTPYYQYKPKNVLENKTVKLYWDRDIITDRTILSNRPDITLTLKSSKTTFLIDIAVPNTHNLKQKHTEKIQKYIPLADEIKHMWHQESVRIIPIIISSTGVIPKALKTALKLLDLHENTYIPMQKSIVIDTCSIVRRFLNPTSLTLQTSQDTLSNTITQNPLTHTHYTQTHTPHASNTSITNQTHNHT

SEQ ID NO: 1073 - protein, 1373 aa, Helias cama
MRLRSGYKLPQASTGANRNGESRPELASSGCPTYSGGDTVSQTSAQSQTVADNKSSSLHTSTQTSSPISSTHSLFQSPNSSPQSYELNHSLSHSSLNSSMSCDVAQEADATSPEPTTDINNPTRVSQNNLNTRVHNTIHFSSPHINTPARSVLQDMLPSTTLAGKNRQRMKWTDQINRELLRCYYVVTHCETDMTAWRLLLHQKFAESFPELQHLSEQRLADQIRVIHRNNRVQATERESIKIAVSSLISTTSSLSQDVATNIMHQPTSNIANTTVDHTTQPHFGQNCETIDTRYRLSTTQEHLTQQTQLNYEHYEHTETQNTEITNTTQEPIHQERIENILNEMLIKYTDVDPTLRPTIPKVQTSRNIIKTTATINKIIKNRLENKETTIEEIHNIIYCAAQTTIAVNNNYAEVGNQSKNNTIGNKGKPQWEKRIENKIVTLRKEIGQLTQYKNGNLSLKKQNKLNPNNKSIDEIIDKLDENKQKLQAYSKRLRRYKISNKRKSDNKLFNNNQKLFYQKLHTENIQVINPPSIDDVESYWKDLWSKPIHHNTHSPCIDEEDSANIDPMPSIIVTKDDISQAVGKTLNWKAPGPDKIQNFWLKYFTATHEPLANTFNNLIQHPQDCPPFLTQGITYLKPKDNDTTNPAKYRPITCLPTIYKLLTSIISSKLNTHIIQNHLIPEEQKGCSKGSRGCKEQLVIDTEIHHNVRVQQRNLFYSYIDYQKAFDSVPHSWLIYVLKLYRVDKTLIQFLEHIMKTWSTKLNLRTQNTSHCTRLIKILRGIFQGDSLSPLWFCLCLNPLSKILNKTNYGYVIDRKNNIKITHLLYMDDIKLYASNREQLDHLLKLTEKFSTDIKMSFGINKCKINSIIKGRHNETNSFNLNLQEGIIKSMEPKETYKYLGYQQSTSLSHTEIKNTLKTKYKQRLQKILTTQLSARNKIKAINAYAVPILTYSFGIIKWSDTELTALNTMTRTTSNKHNIHHIHSAVQRFTLKRKLGGRGCIDIKNLHYTQIDNLRTYFQVKANTSSLHKAIINLPQSGTPLQLHNNLFDPKLKIIKDDQKVEAWKAKALHGKYPHQLEQDHVDRNASCTWLTKGNIFGETEGFLIAIQDHIIKTRNYAKYILKEPIESDKCRLCHQTTETIDHITGGCSILANKEYTHRHDNVAKHIHQQLALKHNLIKSYTPYYQYKPKNVIENATAKLYWDRDIITDRTVLSNRPDITLTLKSSKTTYLIDIAVPNTHNLKHKHTEKIQKYLNLADEIKQMWHQDTVKIVPIIISSTGVVPKNLKSALKLLDLNENIYIPLQKSIVIDTCSIVRRFLNPSSVTFQDEHRNPILIVDTLSTSDITHNRNTSNTHNTLNTRIIHHISHAHI

SEQ ID NO: 1074 - protein, 1350 aa, Timochares trifasciata
MRLRNREIPQAGTSPTREEESCPGPSGSGCPTYSGGGNVSRMTAQSPAVAVDNSPSSNSPTPLLSSSPTSSTQSLFQSPISSPQSFEFRIARSDSSFTSHTSADVAQVAFAYPPEPTTDISNPTRVVHHVTSNRVNHNITSYTPNTNIPARSALQEMFPATTLTGKSRQRMKWTDPINTELLRCYYLTTHNETDLTSWRPLLHQKFTEIYPELSHLSEQRLADQVRVIHRNNRIPFHEREKIKHTVSLLLHPTNSSNSQFDTNISQHESNIHTITSTEDINSNTHLLSNTLNTQHSLDNTQQINTITQTYVNIEHIQTQVSHTGVGQQESIHNEAIENVLTEMLVKYKGTDPTLRPTIPKLQITHSAIRTITNTNKVVNKYLQNLGTVTIEDIHDVIYCAAQTITKLHEKPTEATNTFKNNSQKYFKAQKPKWEKRIEDKITILRKEIGQLTQLVKGNLSLKKLKKLNPSNKNVDKIVEELDNNKQKLQAYSKRLRRYKISNQRKSDNKLFNTNQKLFYQKLHTDQIHITQPPKPEDIQNYWKSLWSKPAQHNTYTLLNEIEEQETMDIGPMTEISINKEDIYHAVRKTLNWKAPGPDKIQNYWIKYLTATHEHLANTFNHLIQNPQETPSFLTQGVTYLKPKDHDTTNPAKYRPITCLPTIYKLLTSIIAQKLNSHITLNKIMTEEQKGCTKGSRGCKEQLIIDSAVHSQVKQKHRNLFYSYIDYQKAFDSVPHSWLLHILKLYRVDNKLVLFLQHTMNHWTTRLSLKTLNTSLNTNPIKILRGIFQGDSLSPLLFCLALNPLSRILNKTGYGYIIDREKNIKLSHLLYMDDIKLYASDRHQLDYLIRVTEQFSANIKMSFGIDKCKINSIVKGQYNKTEALELRKQEGTINSMNEKEVYKYLGYAQSTSINHTDIKNTLKNKYKCRLRSILNTQLSARNKVKAINSYAIPILTYSFGIIRWSDSELDALNILTRSTCNKHNIHHIHSAIQRFTLKRKLGGRGFIDIKNLHYTQIDNLRTYFYEKSNESALHNAIVNLPQTGTPLQLNNKQLDVKLKILCDDKKVENWKNKELHGKYPYQLQQDHIDHEASCAWLTRGNIFAETEGFLVAIQDQVIKTRNYTKYILKQTIDTDKCRLCHQNTENIDHITGGCSVLANKEYTHRHDNVAKHIHQQLALKHKLLDTYTPYYQYKPKKVIENSIAKLYWDRDIITDRTILSNRPDITLTLKHSKTTYLIDIAVPNTHNLKQKHTEKIQKYISLADEIKQMWHQETVRIIPIIISSTGVIPKSLNSALKLLDLHENTYIPLQKSIIIDTCSIVRRFLNSTTLTLQDEHRTNRNIQVLSTLHTT

SEQ ID NO: 1075 - protein, 1369 aa, Telegonus cellus
MRLRNRQIPQAGTREGESRPGPSGSGCPTYSGGGNVSHMTTQSQAVVVENSPSHITTYTSSPTSSTHSLFQSPSSSPHSFQFHHSSSRSTTVTPLSCDVAQEAHANSPVPTTDIINPARVSVNNVHNRVNHNTHSSPPFTNPLARSVLQDMLPATTLAGKSRQRMKWTDEINRELLRCYYVVTHNETNLTAWRPQLHQKFSASFPELNHLSEQRLADQIRVIHRNNRITGPEREHIKQSVSLLLSNLRRSVDHTSTNIVEDSLNIPHISNSSELTTHSPNQTLDPHHAHTINHPHTQNTHVQSQRINNTTQIYNSSENSEHNQTQNPETTNKPLEPIDYNIIENTFTEMLIKYTGTDPTLRPTISKFQTTRNSIKTVNTINEIVDIHLRTKNSVTLEEIHEVIYCAAQTTVTLHTKYDKKLEKHSTNKSPNDLIKQKKPQWETRIEKKIITLRKEIGQLTQYLNGNLSQKKQQKLNPNNRSRNDIIEQLDNNKQKLQAYSKRLRRYKISNQRKSHNKLFTTNQKLFYQKINTEQIQITQNPNIDDVQNYWKNIWSNPVLHNTHHSWNEIEDEEIQNIEPMTEIYIDKEDVSQAIRKTLNWKAPGPDKIQNYWIKYLPATHEYIANTFNCLLNNPQDTPSFLTHGITYLKPKDNDTTNPAKYRPITCLPTIYKLLTSIISNKLNTHITQNHIIPEEQKGCSKGSRGCKEQLIIDTEIHNQVKHKHRNLYYAYIDYQKAFDSIPHSWLIQILKIYKVNVKLIEFLQDIMKNWTTKLSLRTNNTSICTHPIKILRGIFQGDSLSPLWFCLAINPLSRILNNTGYGYAIDRGSDIRLTHLLYMDDIKLYAASRQQIDHLLKLTEKFSTDIKMSFGTNKCKINSIIKGQQKETHPFELETQGGTIDSMEPKGTYKYLGYQQSTSISHTQIKNNLKTKYKQRLHKILNTQLSARNKVKAVNTYAIPILTYSFGIIKWSDTELDALNTTTRTASNSHNIHHIHSATQRFTLKRKFGGRGFIDIKNLHYTQIDNLRTYFLTKAKESNLHKTISQLAQPGTPLQLNNSEFDPKLKILNDDQKIENWKKKALHGKYPHQLQQDHIDRNASCSWLTKGNIFGETEGFLVAIQDQIIKTRNYSKYILKEAIETDKCRLCHQTTETIDHITGGCSVLANKEYTHRHDNVAKHIHQQLALKHTLLKSYTPYYQYKPKNVLENNIAKLYWDRDIITDRTILSNRPDITLTLKSSKTTFLIDIAVPNTHNLKQKHTEKIQKYIPLADEIKQMWHQENVRIIPVIISSTGVIPKTLKNALKLLDLHENTYIPMQKSIVIDTCSIVRRFLNPTTLTLQTYQDSHSNIATHNSSTHNTTHNTQTHTQN

SEQ ID NO: 1076 - protein, 1319 aa, Noctuana lactifera
MKKSITRKYSLRPLPGGRRGTSGVGAGCDSIRTVDGLELSRRAPAGNVPEITTADIISTTSSLISSTHSLFQSPNSSPHSYENPSTSRSSSISPLSLNVARGPSAKSLVPIDDNNKSTQGSTRDTINICVDTNQISLDNNNHDIPATSVLREMFPATTLGGKSRQRMKWTDEINRQLLRCYYKVTKCETDLTAYRPLLHHMFIDIYPELQHLTQQRLSDQIRVIHKNNRISLSERLHIKQEVAKLISTTNIESQNNIPHNNNPQTQNNHIQDNVTLTSVVLDETLHTTNIYTQTGSLLSQNNITHPTDILTQPTLTIETIQDNSSIEINYEKIEEAFSENLRIYKNTNPVLRKIIPKLQISRATIKTVNTMNQILHTYLQDKETLPIEELHLIVYCAAITITSLHNIKTNKKNTNRNKHKQKQPTWKSRITTHIETLRKNIARMTQYLKGNLSLKKQRKLNPKNLDTDQLIDELDKYKQKLSAYTKRLRRYEESNRRKAENNLFQNNQKIFYRQLNSNHINITQAPDETHVQKFWENIWSTPENHNEYAEFIELEKKESENIESMPPVVIDIDDIKYATQKIHNWKAPGPDKIQNYWLKYFTSIHNHIANAYNTLIQEPHNMPTFLTQGITYLKPKDSDTTNPAKYRPITCLPTLYKLLTSIITHKLNTHISYNNIIPEEQKGCCKGSMGCKEQLVIDTEIHNQVKQKHRNLFFSYIDYQKAFDSVPHSWLIHVLKLYKIDDNLINFLQQIMTFWTTTLNIHTHNKTLITNPIKICRGIFQGDSLSPLWFCLAINPLSKILNNTNYGYTLDKQNNIKITHLLYMDDIKLYAANKQQLKHLLTLTEQFSKDIKMSFGLDKCKINSVIRGKYKETESHILTLQEGTIHNMLFKETYKYLGYEQSTTINHTEIKAKLKTIYKHRLKTILRTKLSARNKTKAINTYAVPILTYSFGIINWSETELNALNTLTRTTCNKHNIHHIHSAVERFTIKRKNGGRGFIDIKNLHYSQVHNLRLYFQNKAKNSLLHKSIVNLNTSGTPLKLNDTQYNPNLKIQTEEEKIENWKKKTLHGKYPQQLLQPHIDKDASNTWLTKGNIFGETEGFLVAIQDQVIKTRNYSKYILKDKIETDRCRLCYQTTESIDHITGGCSSLANKEYTYRHDNVAKHIHQQLAIKYNLIHTYTPYYQYKPKNVLENNEAKLYWNRDIITDRTILSNRPDLTLTLKLTKTTYLIDVSVPNTNNLKQKFTEKIQKYLPLADEIKQMWHQDSVRVIPIILSSTGIIPKSLFAALQSLQLPKTTYIPIQKSVVLDTCSIVRRFMNP

SEQ ID NO: 1077 - protein, 1354 aa, Ochlodes sylvanus
MRLRNRVLPQAGTHTGESRPGPSGSGRPTYSGGGTVSLRSAQSSTVAATGDNSSPLHHSPSSSISSTHSLFQSPSSSPHSYELHQASRSTSTSPMSSDVAQEPLVNSLVPTTDITHPTQIQSNNFSNCVDHNIHNTPTSSLDINTPARSVLQEMLPATTLAGKSRQRMKWTKEINLELLRCYYTVSLCETDMTAWRPLLYQKFIEQFPELSHISEQRLADQIRVIHRNNRIPVIEREYIKQTILQTLPSTNNMDNTIDEEVPTQGMPTTQNTPNTQHTQSHTRDHQTITLAQTTRALETSEHIQTQENEQVNTAVKPINYEQIENIFTEMIIKYTGTDPTLRPTIPKLQTTRQMIKTVNTINEIVDKHFQNKEIITLVEVHEVIYCAAITVATLHDKKSIKTVEHTSFTSNNKTNKQKEPQWKKRIENKIASLRKEIGQLTQYLNGNLTIKKQHKINPNNKNRQEIVGQLDTNKQKLQAQAKRLHRYNKSNQRKSDNILFKNNQKIFYHKLNSENITVTEQPDIAHVQKYWENIWSKPVQHNAHTSWTEIEEQEMENIEPMQEITIDKDDVTHAIKRTLNWKAPGPDKIHNYWIKYLTSTHKHIANTLNNIIQNPHEMPSFLTQAVTYLKPKDNDTINPEKYRPITCLPTIYKLLTSIITHKINLHITANKIIPEEQKGCSKGSMGCKEQLIIDAEIHNQVKVKNRNLYYSYIDYQKAFDSVPHSWLLHVLKIYKIEKNLIQFLQHAMSKWKTKLNLRTNTTTLSTPHIKIARGIFQGDSLSPLWFCLALNPLSRILNSTTHGYIIDRENKIKLTHLLYMDDIKLYASNKQELDELLKLTEKFSTDIKMTFGTSKCKINSITKGQHSGTDSYKLELQGGTIDSMEPRETYKYLGYHQSTSINHGDVKNTLKIKYKQRLNKIFSTQLSARNTVKAVNTYAIPILTYSFGIVKWSDTELNALNTVTRTISNKHNIHHIHSAVQRFTLKRKLGGRGFIDIKNLHYTQIENLRTYFIRKAQDSILHKAIVNMPHSGTSLQLNNKRFDPKTKIIKEEQKIECWKKKALHGKYPHQLEQDHVDRNASIAWLTNGNIFSETEGFIVAIQDQIIKTRNYSKYILKEAIETDNCRLCHRYTESIDHITGGCNALASKEYTHRHDNVAKYIHQQLALKYHLTDTHTPYYKYKPKNVLENRNVKLYWDRDIITDRTILSNRPDITLIVKSIKTTYLIDIAVPNTNNLKQKHTEKIQKYIPLADEIKQMWHQETIKIVPIIISSTGIIPNTLHTALRTLDLHPKTYIPLQKSIILDTCSIVRRFLNPTSLSLQNASDITTTLISTRPQNMQTDTHSTHCHQSPPSQ

SEQ ID NO: 1078 - protein, 1358 aa, Ochlodes sylvanus
MRLRNRVLPQAGTHTGESRPGPSGSGRPTYSGGGTVSLRSAQSSTVAATGGNSSPLHHSNSSPISSTHSLFQSPSSSPRSYETHQTSRSTTTSPMSCDVAQEALANPLVSTTDITNPTQILQNNSANCVDHNIHPSLIGINTPARSVLQEMLPATTLAGKSRQRMKWTKEINIELLRCYYTVTLCETDMTAWRPLLHQKILERFPELSHISEQRLSDQIRVIHRNNRIPAAEREFIKQTISQTLPSTNNICTTIEEQEASNTYTYNRQQLTTQDSPTVENSPTIQHTLNHTHEHQIITPAYTIRPLETSEHVQTQGNESTNTSVRSIDYKQIENTFNEMTIKYTGTDPTLRPTIPKLQTTRQMIKTVNFVNKIVDKHFQNKETSTLEEIHEIIYCAAITVATFHSKKIIDQTSFTVNNKTHKQKEPQWKTRIENKITLLRKEIGQLTQYLKGNLTHKKQLKLNPNNKNRQEIIDQLDNNKQKLQAQAKRLNRYKKSNQRKSDNILFKHNQKVFYQKLNSENITVTQPPDLAQIQKYWENVWSKPVQHNTHTHWTEIEEKEMQNIEPMPEIIISKDDVTHAIKRTLNWKAPGPDKIQNYWIKYFTSSHIHLANTFNYLIKNPHDIPTFLTQGVTYLKPKDTDTTNPAKYRPITCLPTIYKLLTSIITHKINSHISINKMIPEEQKGCSKGSMGCKEQLIIDAEIHNQVKHKNRNLYFSYIDYQKAFDSVPHSWLLHVLKIYKIDNSLIQFLQHAMTKWTTKLNLRTNTTTLSTSNIQIARGIFQGDSLSPLWFCLAINPLSRILNNTTYGYTIDRENKTKLTHLLYMDDIKLYASNRQELDQLLRLTEKFSSNIKMTFGISKCKINSISKGQHCETDSFELELQGGTIDSMEPRETYKYLGYQQSTYLNHTDIKNTLKTKYKQRLNKILSTQLSARNIVKAVNTYAIPILTYSFGIVKWSDTELNALNTLTRTLSNKHNIHHIHSASQRFTLNRKLGGRGFIDIKNLHYNQIQNLRTYFIRKANDSTLHKAIINIPHSGTPLQLHNNLFDPKTKILNEEQKIEHWKKKALHGKYPHQLEQDHVDRNASTAWLTNGNIFSETEGFLVAIQDQIIKTRNYSKYILKEAIETDKCRLCHRYTESIDHITGGCSILANKEYTHRHDNVAKYIHQQLALKYKLTDTQTPYYKYKPKNVLENNNVKLYWDRDIITDRTILSNRPDITLTLKSTKTTYLIDIAVPNTNNLKQKHAEKIQKYIPLADELKQMWHQEAIKIVPVIISSTGIIPKTLHTALKMLDLHPKTYIPLQKSIVLDTCSIVRRFLNPTSVILHNTQDISSTQNAQTHHLHPLITHHTLDPEYLA

SEQ ID NO: 1079 - protein, 1300 aa, Blastobasis lacticolella
MRRSIRIKNKNSAQCSTAAENGSAGNSSPISSTRSLFSTPSSSPKSFQNPTSSRSTTASPMSYDVTQEAPANYPESIYDIINAARNNANVESNYGAETDTYNIDTNTPARSVLQEMLPATTLAGRSRQRMKWTDLINRELLRCYYTVTQCETNLTAYRPLLHKMFIETFPELHHLSEQRLADQIRVIHRNHRISLAERERIKQLISLSVTEEIADTVHDTSLIDTLSPPIDSEVTTGNYATHNVSVNVEQYATSTQQTVTIEDLDTYTQTTEPESLHINFNTIEDTFTEMLIKYSHTDATLRPTIPKLQITRKSIKTVNTVNDILHKHLENRETVDIDNIHEVIYCAAMTVTTLHAKPKNKVNSNIHTANSTESNNSNKDKKQQWEKRLENKITILRKEIGQLIQYLNGNLTQKKQRKINPNNQSKDEIVNQLDTYKQKLQAYSKRLRRYKLSNQRKSDNNLFRTNQKLLYRNLNTENIHISQPPNIKDVQNFWENIWSKPVEHNRNTPWSRIEEQDASNIEPMAEVFISKDDVTQAIMKTLNWKAPGPDKIQNYWIKYFTSTHEYIANAFNHLLHNPQDTPSFFTQGITYLKPKDDDTTNPAKYRPITCLPTIYKLLTSIISHKLNHHIAHNNIIPEEQKGCSKGSMGCKEQLVIDTKIHNQVKQKKRNLYYAYIDYQKAFDSVPHSWLIEVLKMYKTDNGLIQFLQYTMANWTTTLNIHTKNKTLNTEHIKISRGIFQGDSLSPIWFCLALNPLSKILNGTDYGYNIDRENTNKLTHLLYMDDIKLYAANRQQLDHLLKLTEDFSRDIKMTFVTDKCRINSIIKGQHKDTEPYDLEQQLGKIDNMEPRETYKYLGYLQCTSINHTEIKSGLKTKYKQRLTKILKTKLSARNKTKAVNTYAIPVLTYSFGIIKWSDTELEALNTLTRTTCNKHNMHHIHSAVQRFTLKRKLGGRGFIDIKNLHYTQIDNLRTYFQTKANQSTLHKAIVNIATSGTPLQLNNSQFDPKQKILQDNQKIENWKKKAIHGKYPHHLDQDHVNRTASCTWLTKGNLFSETEGFLIAIQDQIIKTRNYSKYILKEAITTDKCRLCHQTTETIDHITGGCRILANKEYTHRHDNVAKHIHQQLALKHNLLDTYTPYYKYKPKKVLENNTTKLYWDRDIITDCTVLSNRPDITLTIKSIKTTYLIDVSVPNTHNLKQKHTEKIQKYIQLADEIKQMWHQETVRIIPIIISSTGVVPTSLSAALKTLQLPDTTYIPLQKSIVIDTCSIVRRFLNPTSLSYAITAENNDVPSTLTLLS

SEQ ID NO: 1080 - protein, 1366 aa, Epargyreus clarus
MRLRNRQIPQAGTREGESRPGPSGSGCPTYSGGGNVSHKTAQSNTVAVDNPHSQSHPSSPVSSTHSLFPSPSSSPYSYQFHPSSSRSSTITPLSCDVAQEAHAISPVPATDNINAARDIQNDQISRVNPHTNSPSHTIHTPARSVLQDMLPATTLAGRSRQRMKWTDEINKVLLRCYYIVTQNESNLTAWRSQLHRTFAESIPELSHLSEQRLADQIRVIHKNNRIPATEREQIKHSVSLLISSTSNRLTDHSTARHTYHQSNINTSPLTINHQSTTDSHSNTLNLQHTITITHHATTTSQAYQSCESIEHMQTQDSEPTNRSLELVDFEIIENIFREMLIKYTGTDPTLRPTILKPQTTRNFIKTLNSINEIIHKYLQNRELITIEQIHEVIYCAAQTVTTIHTKHVKTLEYITNNNNRKQKKPQWEKRIENKIATLRKEIGQLTQYLNGNLSLKKQQKLNPSNRSRDEIVEQLDSNKQKLQAYTKRLRRYKKSNERKSHNKLFNTNQKLFYQKLNTEKIEITQPPEKIDIESYWKNIWSIPVQHNTHTTWAEIEEQEMENIDPMPEITIDKDDVLVAIKKTLNWKAPGPDKIHNYWIKYLPATHEHIANALNHILCKPEDTPFFLTQGITYLKPKEGDTTNPAKYRPITCLPTMYKLLTSIIAHKLNSHITRNHIIPEEQKGCCKGSRGCKEQLVIDTEIHNQVKQKHRNLYYSYIDYQKAFDSVPHSWLIHILKIYKVDNRLIQFLLHTMKHWTTKLTLHTNNISICTQTIKILRGIFQGDSLSPLWFCLALNPLSRILNKTSSGYVIDRKNNVKLTHLLYMDDIKLYAANRQQLDHLLMLTENFSTDIKMTLGTDKCKINSIIKGKHHETNPFQLESQGGTIDSMEFRESYKYLGYQQSTSINHADIKHTLKTKYKHRLHKIFNTQLSARNKIKAVNTFAIPVLTYSFGVVKWSDTELEALNTATRTISNKHNIHHIHSAVQRFTLKRKLGGRGFIDIKNLHYTQIHNLRTYFLLKANESAVHKAIVDLPQPGTPLQLNNRQFDPTQKILKDDQKIENWKKKALHGKYPHQLDQDHIDYAASCTWLTKGNIFGETEGFLIAIQDQIVKTRNYSKYILKEAIDSDKCRLCHQTTETIDHITGGCSVLANKEYTHRHDNVAKHIHQQLALKHKLLQSYTPYYQYKPKNVLENSAAKLYWDRDIITDRTILSNRPDITLTLKSSKTTFLIDISVPNTHNLKQKHTEKIQKYIPLADEIKQMWHQDTVRIVPIIISSTGVIPKTLKTALKVLNLHENTYIPMQKSIVIDTCSIVRRFLNPTTLTLQTHQDTHPNTTQTSTTHNTHTHNPPNTPIITHPNHSNTIHE

SEQ ID NO: 1081 - protein, 1275 aa, Oxynetra stangelandi
MPREGRTLAALRYTAPMTNGALVLIKYAMRLRSRQLPQAGTREGESRPGPAGPGCPTYSGGGNVSHKTTQSHTVVVKSPTHVNSQPSSPVSSTYSLFQSPSSSPYSYQTQEISSRSTTITPLSHDVAQEAHAISPMPINDITHPTRMTQNNTSDRVRHNTRTPSPDTNTPVRSVLQDMLPATTLAGKSRQRMKWTDQINRELLHCYYTVTQNGTHRTAWRSLLHQMFTLKAPELSHISEQRLADQIRVIHRNNRISALEREQIKQSVSSLVTTLSSSSDENTTNIIHPSAINTTDKTETHKPIINSLSQTFNSLHPLTSIQQISTTTRTPQSPDITEHITQTYDSGATNKESNQIDFNKIENTFTEMLIKYTGTDPTLRPVLPKLQTTRKFIKTVNTTNKIIDTYLRSKESITLEELHEVIYSAAQTITTLHTTPVDKSRNNTRDNRKVGNKPKQPHWEMRIESNIMKLRKEIGQITQYLNGNLAPKNQQKLNPNNLSKDEIIENLDKKKQKLQAYSKRLRRYKKSNERKSQNKQFNTNQKLFYQKLNAEQIEITQPPNNIELQNYWKNVWSKPIQHNIHPAWIEIEEQEMENICPMPEIIIETNDVAQAIRKTLNWKAPGPDKIQNYWIKYLSSTHEFIAKIFNHLIHSPQDTPAFLTQGITYLKPKDNDTTNPAKYRPITCLPTIYKLLTSIITHKLNIHITQNQIIPEEQKGCCKGSRGCKEQLVIDTEIHNQAKLKRRNLFYSYIDYQKAFDSIPHSWLIHILKIYKVDYRLVQFLQYSMKNWTTKLNLHTKNMSICTNSIKILRGIFQGDSLSPLWFCLALNPLSRILNRTNNGYMIDRENNIKLTHLLYMDDIKLYAANRQQLDHLLRLTEKFSTDIKMTLGTTKCKINSIIKGQHIYTTSFELEVQGGTIESMEPKETYKYLGYQQSTSINHKEIKNSLKIRFKQRLKKILNTQLSARNKIKAVNTYAIPILTYSFGIIKWSDTEIQALNTLIRTTSNKHNIHHIHSAVERFTLKRKLGGRGFIDLKNLHYTQIDNLRTYFLTKANESTLHKAIVNISQPGTPLQLNNDQFDPKLKVVKDESKIEKWKKKALHGKYPNQLDQDYIDRNASCTWLTKGNIFSETEGFLVAIQDQIIKTRNYSKYILKEAIETDKCRLCHQASETIEHITGGCSILANKEYTHRHDNVAKHIHQQLAIKHKLLETYTPYYQYKPKSVLENSKARLYWNRDIITDRTVLSNRPDITLTLKTPKITYLIDISVPNTHNLKQK

SEQ ID NO: 1082 - protein, 1365 aa, Apodemia walkeri
MRLRNRNIPQAGTLEGESRPESLGSGSPSYSGGGNVSSITAQSRTAADNHSFSCITSHTSSYSPSQSLESTESSYTSLQLSSPRLNTLSPLSCDVAQEASAHSPVPTTDITNSTRAILITPSNCVDINSHSPTFNIDTPVRSALQEMMPATTLTGKSRQRMKWTHTINTELLRCYYIVTHCETDLTAYRPLLHCKFVEIFPELSHLSEQRLADQIRVIHKNNRIPAPERERIKTQISQMLDQTHNTSGTGIQTTSNNTNTQHTSTFTDTQGSYHLISTDSQQSIIITPTCLTVENSEYATLTLETQESNEKTSDSIYYEKVKNKFIENLIKYKGTDPSLRPPLPKLQTTCQTIKTVDAINEIIDNHLQTKEMTYTLEELHEIIYSAALTITIMHSKKNTNLENYITQRNKEQGRKVVDKPRIPLWEQRIDKKITGLRKEIGQLTQYLNGNLSQKKQRQLNVNNKSRDEVIEHLDNNKQKLLAYAKRLRRYKKSNERKSDNNLFNNNQKLFYQKLNKENIKITENPDMETMRTYWENIWSKSVHHVTNTTWAEIENQEVRDIDPMNEIIISEEDVTRSIKKTLNWKAPGPDKIHNYWLKYLTTLHKYIASTFNELIHNPQKVPKFLTQGVTYLKPKDHDTTNPSKYRPITCLPTIYKLLTSIIAHKLNSHISQHKIISEEQKGCCKNSMGCKELLIIDSEIHNQVKYKHRNLYYSYIDYQKAFDSVPHSWLLQVLKIYKVDNNIINFLQHAMSQWITTLNLKTHDKMFSTSPIKIARGIFQGDSLSPLWFCLALNPLSRILNRTDYGYKIDRDNNIKITHLLYMDDIKLYAATRNELDQLLRLTEQFSNDIRMTLGTNKCKINSIIKGKHNQTHPHDLELNRGLIESMESIDTYKYLGYQQSTAISHKDIKKSLTNRYKQRLNKILSTQLSARNKTKAINTYAIPILTYSFGIIKWSGTELNSLNIATRVASYRHNTHHIHSSVERFTLKRKLGGRGIIDINSLHYSQIENLREYFYSKSHESLLHKGIVNIYNSGSPLQLNNRLFNPKEKIVSDNQKLENWKKKALHGRYPYQLDQDHIDKNASSAWLTKGNLFGETEGFLIAIQDQVIKTRNYSKFILKQTIETDKCRLCHQTTETIDHITGGCSVLANKEYTHRHDNVAKHIHQLLALKFKLLDSYTPYYKYKPKNVLDNDIAKLYWNRDIITDRTILSNRPDITCTLKSTKTTYLIDISIPNTHNLKQKHTEKIQKYISLADEIKQMWHQETVTIIPIIISSTGVIPKSLNTSLKILELNKNTYVALQKSTILDTCAIVRRFLTSTSLALQNAQDTITNTNHSPITHTSTHHTQHSSHHRHTPINSHMDTSR

SEQ ID NO: 1083 - protein, 1046 aa, Emesis tegula
MSSSNNHLERINTTYIQDFTSTLLNSREQSLIDLNLTVVTSQNTIDTGTQHHNIIAQPSLSPMIENSENNIQTTDSQIITRNLDKISFETIFNTFQEMLIKYTGTDPTLRPLIPKIQTTRNTINTVNIVNNIVGKHLHAMNPNTIEELHEVIYSAASTVTTLHTKRVPRLETNTHTTKNKIDKQNKSPWEKRLDSKIAMLRKEIGQLTQFLKGNLSYKKQLKLSIYNKNGDEIINRLDNHKQKLQAYSKRLKRYKKSNQRKSDNNLFNTNQKLFYQRLHTNAIKITQPPDIDTIQTYWKNIWSKPVKHNTHAPWTEIEEQEMSNVGLMAKIVIDEEDIALALRKTLNWKSPGPDKLQNYWLKYLTTTHKYIARTLNDIIFNPYKMPTFFTQGITYLKPKDNDTTNPSKYRPITCLPTFYKLLTSIIASKLNTHISQHNIIPEEQKGCCKGSKGCKELLVIDTEIHNQVKQKHRNLYYSYIDYQKAFDSVPHSWLIHILKIYKVDNNLTQFLQYAMTKWTTTLTLKTSDRTLCTQPIKIARGIFQGDSLSPLWFCLSINPLSRILNRTDCGYKIDRENNIKLNHLLYMDDIKLYAGTRNQLDQLLRLTEQFSTDIKMTLGTDKCKINSISNGQYKQTETFTLELHGGLIESMEPKDTYKYLGYNQSTCINHSDIKNQLKNKYKQRLQKILNSQLSARNKTKAVNTYAIPILTYSFGIVKWSDTELNALNRATRVASYRYNIHHIHSSVERFTLKRKLGGRGFIDILDLHYSQIDNLRSYFLTKANNSAIHNAIINISLTGTPLQLNNSSFDPKHKRISDPQKLENWKKKALHGKFPHQLDHNHIDRIASCNWLTRGNIFGETEGFLIAIQDQVIKTRNYSKYILKENLETDKCRLCHKNTETIEHITGSCSVLAYKEYTHRHDNVAKHIHQQLALKYNLINQYTPYYKYKPKQVLESETVKLYWNRDIITDRTILSNRPDITLTLKTLKTTYLIDISIPNTHNLQQKHSEKIQKYIPLADEIKQMWRQQTVTIVPIILSSTGVIPKT

SEQ ID NO: 1084 - protein, 1354 aa, Apodemia duryi
MRLRNRDIPQAGTFNGESRPESLDSGSPSYSGGGNVSFIPAQPRTVADNHSLLHITSHPSSSYSSTQSPGSTENSYEFLPSPQSNIISPTSCVVVQEALATSPVPITDITNSTQIMHIESTNCVDINTHSLTHNINTPVRCALQDMMPATTLAGKSRQRMKWTHNINKELLRCYYIVTQCERNLMAYRPLLHAKFVENFPELNHLSEQRLADQIRVIHKNNRISTPERERIKSLVSQTLDQTYNTQRTSRTGTQSTSNTISSQQPCIDPLIDTDSLHHLTPTNSQQSIVITPTCQTVENSVHAFQTLETQDSTGRMLDSKCYEKIKNTFTESLIKYKGTDPSLRPPLPKLQITFHTIKTVNTVNEIIDNHLQTKDTIYTLEELHEVIYSAALTVTIIHSGKNIKSDSDIIHTSNNVRDKPRISQWEKRIEKRIVGLRKEIGQLTQYLNGSLSQKKQRQLNFSCKNIDETVEYLDVKKQKLLAYAKRLRRYRKSNERKYQNNLFNNNQKLFYRKLNKENIKITENPDIAAIQTYWENIWSKPIQHATHTSWAEIEDQETRHIDPMNEITISEEDVTHSIKKTLNWKAPGPDKIHNYWLKYLTTIHKYIANTLNDLIHNPEKIPKFLTQGVTYLQPKDLDTTNPSKYRPITCLPTIYKLLTSIIANKLNSHISQHKIIPEEQKGCCRNSRGCRELLIIDSEIHNQVKYKHRNLYYSYIDYQKAFDSVPHSWLLHVLKIYKVDSNIIKFLQHTMTRWITTLNLKTYDKMLSTSPIKIARGIFQGDSLSPLWFCLALNPLSRILNRTDYGYKIDKDNNIKISHLLYMDDIKLYAANRNQLDQLLRLTEQFSNDIRMTFGTDKCKINSIIKGQHNQTHPYDLELNSGLIESMQFKDTYKYLGYQQNTTITHQDIKKSLTNRYKHRLNKILSTQLSARNKTKAINTYAIPILTYSFGIVKWSDTELNALNTATRVSCYKHNIHHIHSSVERFTIKRKLGGRGFIDISSLHYTQIENLREYFYSKSQQCSLHKAIVNISNSGSPLQLHNRLFNPKDKIVSDTLKLENWKKKALHGRYPYQLDQDHIDKNASSSWLTKGNLFGETEGFLLAIQDQIIKTRNYSKFILKQTIETDKCRLCHQTTETIDHITGGCSVLANKEYIHRHDNVAKHIHQQLALKFNLLDSYTPYYKYKPKNVLENNIAKLYWNRDIITDRTILSNRPDITCSLKPTKTTYLIDISIPNTHNLKQKHTEKIQKYISLADEIKQMWHQETVTIIPIIISSTGVIPKTLSTSLKILELHKNTYIALQKSTILDTCAIVRRFLNSTSLAPQNAQDTNTDTNHLRILHTPIHDTQHSLTQHL

SEQ ID NO: 1085 - protein, 1262 aa, Potamanaxas melicertes
MSGDVAQEAITAVLPEPTTDITYHTRDLQNNLNIRVHHTSQSLSPHTNTPARSVLQDMLPATTLAGKSRQRMKWTDQINKELLRCYYVVTHNETDLTAWRPLLHQRFAESFPELGHLSEQRLADQIRVIHRNNRIPAPEREVIKSAVSLLLSCRNNQDMDINDTHQSTINVEHTTIDRITEPDTDPTNQILNTQHIINNIVDNSTTQVYINTEHSQTQNTEIADRPQESPHYEKIENIINEMLIKYTGMDPTLRPTIPKVQITRNMIKTISAINKILEIHLQNKETTIEEIHNTIYCAAQTVIALHNRCTDVGNKTNNNDKTIVKKEKPQWERRLENKIATLRKEIGQLTQHVNGNLTQKKQQKLKLNGKSMEEIIDLLDKNKQKLQAYSKRLRRYKISNKRKSENKLFNSNQKLFYQKLNTENIVNTNPPNIDDVECYWKDMWSKPVHHNRITSWEEEEETANIDPMPTITINRDDVSQAIKKTLNWKAPGPDKIQNYWIKYFTTTHEPLAKAFNHLIQHPQESPTFLTQGVTYLKPKDNDTTNPSKYRPITCLPTIYKLLTSIISTKLNTHITRNNIIPEEQKGCVKGSRGCKEQLVIDTEIHHHVRIKQRNLFYSYIDYQKAFDSVPHSWLIFVLKLYRVDNTLINFLEHSMENWTTKLSLRTQNTTDNTQPIKITRGIFQGDSLSPLWFCLSLNPLSKILNKTGYGYIIDRENNIKITHLLYMDDIKLYAANREQLEHLLKLTEKFSTDIKMNLGTNKCKINSIIKGRHNETNSFNLNLQGGRIESMELKETYKYLGYQQSTSLNHTEIKNNLKTKYKQRLNKILSTQLSARNKIKAINTYAVPILTYSFGIIKWSDSELAALNMATRTASNKHNIHHIHSAVQRFTLNRKVGGRGYIDIKNLHYTQIDNLRTYFLTKANTSALHKAIIKLPQSGTPLHLHSNIFDPKHKIIKDDKKIEDWKAKALHGKYPNQLEQDHVDRNASCTWLTKGNIFGETEGFLVAIQDQIIKTRNYAKYILKEAIESDKCRLCHQSTETIDHITGGCSVLATKEYTHRHDNVAKHIHQQLALKYNLIKQYTPYYQYKPKNVIENTKAKLYWDRDIITDRTVLSNRPDITLTLKSSKTTYLIDIAVPNTHNLKHKHTEKIQKYLNLADEIKQMWHQELVRIVPIIISSTGVVPKNLKSALKLLDLHENTYIPLQKSIVIDTCSIVRRFLNPSSLTLQDEQRNTLTLATRTQNTNNTLNTQIIHHHNHSHLS

SEQ ID NO: 1086 - protein, 1193 aa, Cabirus procas
MLPATTLAGKGRQRMKWTDQINRDLLRCYYIVTHNETNLTAWRPLLHKKFAEKFPELRHLSEQRLADQIRVIHKNNRLSALERENIKQSVSETLSTPNSSNHNNIIQQSNTNIIPIVDINQYPHNRTLNSPISLTLTNTPQINNTEHIQTQEPERTNPVGPIPYMKIKNTFTEMLIKYTGSDPNLRPTIPKPQISRNIIKTVNIINEIIDEHLRNKDTVTLEEIHEVIYCGALAISTIHHKHVNKIKSNSNNTDNNVARKTKPKWEKRLENKITILRKEIGQITQYLKGNLTQKKQQTLNPNNKSRVEITEQLDNRKQKLQAYSKRLRRYKISNQRKAHNKLFNTNQKLFYQKLNTEHITVTQAPEKNSIEHYWKNQWSKPVQHNEHALWSELEEQEMSNIHPMHNITISKNDVSEAIRNTLNWKAPGPDKIHNYWIKYLTSTHEYIANTFNHVIHNPQETPTFLTQGITYLKPKDNDTANPAKYRPITCLPTIYKLLTSIISHKLNLHVVQNKLIPEEQKGCRKGSKGCKEQLIIDTEIHNQVKQKHRNIFYSYIDYQKAFDSVPHSWLLHILKIYKVDDKLITFLKHTMKNWSTQLHLHTHNNFVRTHPIKISRGIFQGDSLSPLWFCLALNPLTKILNKTGYGYVVDKENNVKITHLLYMDDIKLYAANRQQLDHLLTLTENFSKDIKMTFGTSKCKINSIIKGQYKETDSFQLKLQEGIIESMEPKETYKYLGYQQSTSISHTHIKNTLKAKYKERLHKILNTQLSARNKVKAVNTYAIPILTYSFGVIKWSDTELEALNTLTRTTSNKHNIHHIHSAIQRFTLKRKLGGRGFIDIKNLHYSQIDNLRSYFLTKANDNALIKAIVNLPQTGTPLQLSNSQYDPKLKIIKDEQKIEAWKKKALHGKYPHQLHQEYIDQTASCSWLTKGNIFGETEGFMVAIQDQTIKTRNYAKYILKEQIDTDKCRLCHQTTETIDHITGGCSTLANKEYTYRHDNVAKHIHQQLALKHKLLDSYTPYYQYKPKNVIENSTAKLYWDRDIITDRTILSNRPDITLTLKSSKTTYLIDVAVPNTHNIKQKHSEKIQKYIPLADEIKQMWHQETVRIIPIIISATGVIPKALKTALKLLDVQENTYIPLQKSIIIDTCAIVRRFLNPTTLTLVQNEHHTDPHATTQATNTQRNTHSSTHTQN

SEQ ID NO: 1087 - protein, 1120 aa, Milanion marciana
MLPATTLAGKSRQRMKWTNEINKELLRCYYLATNNETDLTAWRPLLHKKFAETFSELHHLSEQRLADQIRVIHKNNRISAPEREDLKKEVSLVLLATNGRSEIISENVDMHQSPTSTQHNNYHTPTLSQTIYVDNFSPSTLLQTNTTVLENQHVIIPEQIATINCQIDPINKNKIKDTFLEMTLKYTDTDPSLRPIIPKPKITRKLIKIIHLTDQVVNEYLRAKDIITLGDIHEIIYCAAQTITTINNENLSKLNHTKSNDNTTRKQNKPRWEKRLDNKIMVLRKELGLLTQYLKGNLTRKKQVKLNPNNRNNDAIQEDLDTKTQKLQAYSKRLRRYKLSNLRKTQNSLFATNQKQFYQTLNNERIQIASPPSKDDLQNYWKNIWSTPTHHKTHSPWEEVETKEMANIEPMQDINIVKNDVEQALRKTLNWKSPGPDKIHNYWIKYLPSTHDHIANTFNNVIKNPNETPSFLTNGITYLKPKDNDTTNPAKYRPITCLPTIYKLLTSIVADKLNTHISLNQIIPEEQKGCRKGSKGSKEQLVIDTEIHYQAKHKHRNLFYAYIDYQKAFDSIPHSWLTHVLRIYKANNKLVQFLDYTMKNWSTKLNLYTNTTNICTDSIKIKRGIFQGDSLSPLWFCLAINPLTRILNKTDFGYVIDREKNIKITHLLYMDDIKLYAANRQQINHLLKLTEQFSSDIKMAFGTNKCKINNIYRGQHRETDSFHLSLQEGIIDSMKPNETYKYLGYKQSISINNTEIKNTLKSHYKHRLHKILNTQLSAKNKIKAINTYAIPILTYSFGVIKWSDTELEALNTTTRTISSKHNIHHIHSAIQRFTLKRKYGGRGVIDIKNLHYAQIDNLRAYFLSKSNSNNLIKAIVSLPQAGTPLQLNNNQFNPKQKILSDDEKINIWKSKALHGKYPHQLGLDHIDKNASFSWLTKGNIFGETEGFMIAIQDQIIKTRNYSKYILKQPIDTDKCRLCNQSIETIDHITGGCNILANREYTHRHDNVAKHIHQQLALKHNLAQSYTPYFQYKPKAVMENSTAKLYWNRDIIIDRAILSNRPDITLTLKHTRTTYLIDISVPKTHNLKQKHTEKIRKFMSLADEIKQMWHEELVKIIPIKL

SEQ ID NO: 1088 - protein, 1354 aa, Ochlodes sylvanus
MRLRNRVLPQAGTHTGESRPGPSGSGRPTYSGGGTVSLRSAQSSTVAATGDNSSPLHHSPASSISSTHSLFQSPSSSPHSYELHQASRSTTTSPMSSDVAQEPLVNSLVPTTDITHPTQIQSNNFSNCVDHNIHNTPTSSLDINTPARSVLQEMLPATTLAGKSRQRMKWTKDINLELLRCYYTVSLCETDMTAWRPLLYQKFIEQFPELSHISEQRLADQIRVIHRNNRIPVIEREYIKQTILETLPSTNNIDNTIDEEVPTQGMPTTQNTPNTQHTQSHTRDHQTITLAQTTRALETSEHIQTQENEQVNTAVKPINYEQIENIFTEMIIKYTGTDPTLRPTIPKLQTTRQMIKSVNTINEIVDKHFQNKEVITLVEVHEVIYCAAITVATLHDKKSIKTVEHTSFTSNNKTNKQKEPQWKKRIENKIASLRKEIGQLTQYLNGNLTIKKQHKINPNNKNRQEIVDQLDTNKQKLQAQAKRLHRYNKSNQRKSDNILFKNNQKIFYHKLNSENITVTQQPDIAHVQKYWENIWSKPVQHNAHTSWTEIEEQEMENIEPMQEITIDKDDVTHAIKRTLNWKAPGPDKIHNYWIKYLTSTHKHIANTLNNIIQNPHEMPAFLTQAVTYLKPKDNDTINPEKYRPITCLPTIYKLLTSIITHKINLHITANKIIPEEQKGCSKGSMGCKEQLIIDAEIHNQVKVKNRNLYYSYIDYQKAFDSVPHSWLLHVLKIYKIEKNLIQFLQHAMSKWKTKLNLRTNTTTLSTPHIKIARGIFQGDSLSPLWFCLALNPLSRILNSTTHGYIIDRENKIKLTHLLYMDDIKLYASNKQELDELLKLTEKFSTDIKMTFGTSKCKINSITKGQHSGTDSYKLELQGGTIDSMEPRETYKYLGYHQSTSINHGDVKNTLKIKYKQRLNKIFSTQLSARNTVKAINTYAIPILTYSFGIVKWSDTELNALNTVTRTISNKHNIHHIHSAVQRFTLKRKLGGRGFIDIKNLHYTQIEHLRTYFIRKAHDSILHKAIVNMPHSGTSLQLNNKRFDPKTKIIKEEQKIECWKKKALHGKYPHQLEQDHIDRNASIAWLTNGNIFSETEGFIVAIQDQIIKTRNYSKYILKEAIETDNCRLCHRYTESIDHITGGCNALASKEYTHRHDNVAKYIHQQLALKYHLTDTHTPYYKYKPKNVLENRNVKLYWDRDIITDRTILSNRPDITLIVKSIKTTYLIDIAVPNTNNLKQKHTEKIQKYIPLADEIKQMWHQEAIKIVPIIISSTGIIPNTLHTALRTLDLHPKTYIPLQKSIILDTCSIVRRFLNPTSLSLQNASDITTTLISTRTQNMQTDTHSTHCHQSPPSQ

SEQ ID NO: 1089 - protein, 1356 aa, Apotomis turbidana
MRLRNRKLPQAGTQPGESRTGSSDPGCPTYSGGGNVSLRAAQSQTVAANSDDNSSLLHNTPTSPLPSTSSSSLFTSPSSSPRSYQYPSSSSTSTTTSPMSYDVAEVAPANTLLPITDVTHPTRIFENCSPSSVDQNTPSLNNDSNTPARSVLQDMLPATTLAGKSRQRMKWTDEININLLRCYYTVTMCETDLTAWRPLLHQKFTEQFPELSHLSQQRLSDQIRVIHRNNRIPAPERDRIKQTLLPHTTNNILTTTEEEDTSNTSVSQIQQRVADSPPDTPSTQHTHNYIDEQEIDTQTIHVSQNSERIHTQETQPTDKHTDPIDYKQIEDTFTEMLIKYTDTDPTLRPTIPKQQTTRILIKTVNTLNEIIEKHLQNKDNITLKDIHDLIYCAALTVTTIHNKKIVKHNTANTTPYKEKKPKWESRLETNITTLRKEIGQLTQYLDGKLSQKKQQKINPNNKNTQELIELLDTHKQKLQSYAKRLKRYRKSNQRKSDNITFNTNQKIFYRKLNSENITVTQQPDVSEIQQYWENIWSKPAQHNRHSAWTEIEEQEMNSIEPMSQIIISKDDVTLAINKTLNWKAPGPDKIQNYWIKYLTATHTRIANALNHLIHNPHDTPAFLTQGITYLKPKDNDTTNPSKYRPITCLPTMYKLLTSIITHKINAHITSNAIIAEEQKGCSKGSMGCKEQLIIDAEIHNQVRQKHRNLYFSYIDYQKAFDSVPHSWLLHVLKIYKIDNSLIKFLQHAMTKWTTKLNLRTNTTTLSTSQIKIARGIFQGDSLSPLWFCLALNPLSRILNNTEYGYVIDRQNKTKLTHLLYMDDIKLYASNKQELDHLLKLTEKFSTDIKMTFGTNKCKINSITKGQHNRTDDFTLELQGGTIDSMEPRETYKYLGYQQSTSINHKDIKNTLKTKYKHRLNQIFKTQLSARNIVKAVNTYAIPVLTYSFGIIKWSDTELNALNITTRTTCNKYNNHHIHSAIQRFTLKRKLGGRGFIDIKNLHYSQINNLRTYFIRKADHSPLHKAIVTLPQSGTPLHLNNNQYDPTSKILKDEHKLENWKNKALHGKYPHQLEQDYVDQTASTTWLTKGNLFSETEGFFIAIQDQVIKTRNYSKYILKEPIETDRCRLCHQYTESIDHITGGCNALASKDYTHRHDNVAKYIHQQLALKHDLTETHTPYYKYKPKPVLENNKVKLYWDRDIITDRTILSNRPDITLTFKPTKTTYLIDIAVPNTNNLKQKHVEKIQKYIPLADEIKQMWHQETVKIVPIIISSTGIIPKTLHTALKIIDLHPKTYIPLQKSIVLDTCSIVRRFLNPTSLTLLSVPETTTIPPTPHTQTTLQTSHRTQADIHQTQNI

SEQ ID NO: 1090 - protein, 1329 aa, Aricia agestis
MRLRNRNIPQAGTGAKCNGESRPGPSGPGSPTYSGGDNVSPRSAQSGTAAANIVSTTSNTLSYPTSPTSSVSLFPSPHSSPRSYMFDKSSSSSRSTSHSPMSDVVAQEASAIYPMPISDTISSTSTSQNIEIQPVDHHTPQSHLINTPVTSVLQGMLPPTTLAGKRRQRMKWTDQINRELLRCYYTVTSCETNLTAFRSLLHQKFIEKFPELRHLTEQRLADQIRVIHRNNRIAPHEREFIKQSVANLTQTSDILSVQSSSQSTDIICLSPANPYTESTQPNTNATAPHHSPTQTSYQLNTLDSCDTVEDATTQEINVSNTPSANLIDNEKIENVFKEMVIKYSGTDPSLRPIIPKLQISRSVIKTITVLNNVIGKYLEEKVTTDIEEVQSAIYCAAITATTLHVKLRKTNTNKSTDKTIDYNNPKWQIRIEHRIKQLRKEIGQLTQYLKGNLNTRNQQKVNPNNYPIDQLADKLDNLKQKLQANSKRLRRLKISNERRRHNMLFTNNQKIFYQNLSAENIKITEPPDLEKVKSYWENLWSNPALHEEQSPWIDAETEEWQNIDIMPDIIIHREDVTHAIKKSLNWKSPGPDKIHNYWIKYFTSTHCYIANLFNLFIQDPQSIPPFLTQGITYLKPKDTDTTNPTKYRPITCLPTLYKLLTSIIAQKLNTHITQNNIIPEEQKGCAKGSMGCKEQVIIDSEIHNQAKQNHKNLHYSYIDYQKAFDSVPHSWLLHVLKMYKVNSKLIHFLQNIMTTWSTRLNLRTVHGDLNSSSIKIKRGIFQGDSLSPLWFCLALNPLTKILNKSGYGYTINKTNNTKITHLLYMDDIKLYASDRQQLEHLIRLTEKFSIDIKMTFGIEKCKINCIIKGKHTQTEPLNLEQQNGIIDSMQAKETYKYLGFSQSIAINHKDIKNTLKSKYKQRLNKILATQLSARNKVKAINTYAIPILTYSFGIIKWSDSELDDLNTKTRTLSYKHNIHHIHSAVERFTLKRKLGGRGVIDIKNLHYNQINNMRSYFLNKAQTSQLHDAIVRLPHKGTPLQLSNIQFNPTLKILKDSDKIQKWKSKALHGKYPHHLEQEHVDQSASCSWLCKGNLYSETEGFLIAIQDQIIKTRNYSKFILKEPLDTDKCRLCHLSAETTDHITGRCSTLATKEYTHRHDNAAKHIHQLLAIKYKLIDSHTPYYKYKPRNVLENSTVKLYWDRDIVTDRTILSNRPDITLTIKPEKTTYLIDIAVPNTNNLKQKHNEKIQKYIPLADEIKQMWHQDVVKIIPIIISSTGVIPKTLAAALKTLDLHKNTYIQIQKSIIIDTCSLVRRFFNPSSSFPTLQS

SEQ ID NO: 1091 - protein, 1330 aa, Celastrina argiolus
MRLRNRNIPQAGTGATSNGESRPGPSGLGCPSYSGGDTVSPLPAQSSTAADTIFVTTSNTYSYPTSPTSSISLFSSLNSSPKSYMLNDNSPSSRSTTLSPMSDDVTREANATYPVPIPDITPSTSTLQNNQSYPVDHNIRQSQLINTPARSVLRDMLPATTLAGKCRQRMKWTDQINRELLRCYYIVTSCESNLTAFRPLLHQKFIEMFPELSHISEQRLADQIRVIHRNNRIAAHVREEIKQHVTDLLQTSDIFNTLNIQNTSELQNSPSSNIRLDYHQPNSELPSSYHSTTPTLYQPNIVSSSPEQTITPENNVTNLPLTDSNTMETQKIENVFKEMLIKYSGTDPSLRPIVPKLQVTRSIIKTVNTLNNIIGTYLDEKETPDVDDIQSTIYCAAITTTTLHSKILTNPSKNKVNDKTLHHNNPKWQVRIETRIKQLRKEIGRLTQYLKGNLNPRNQQKLNPKNYTTNQLEDQLDNLKQKLQAHSKRLRRLKISNERRRHNTLFLNNQKVFYQNLNSENIKITDPPDIEQVKSYWENLWSNPIQHNSHSPWVEVEAQECYNISLMPDIIINREDVTNAIKKTLNWKAPGPDKIHNYWIKYFTATHCYIANIFQSFIQDPKTIPLFLTQGITYLKPKDKDTTNPTKYRPITCLPTLYKLLTSIITQKLNTHITENKIIPEEQKGCAKGSMGCKEQLIIDAEIHNQAKKTHKNLYYSYIDYQKAFDSVPHSWLIHVLKIYKVDNKLIQFLQHIMSSWSTKLTLKTIDANLCTSPIKIKRGIFQGDSLSPLWFCLALNPLSKILNKSCYGYTIDKLNNIKLTHLLYMDDIKLYANDRQHLEHLLKLTEKFSTDIKMTFGIEKCKINCIQKGQHKQTEPLNLELQEGIIDSMQAKDTYKYLGYLQSTTINHKDIKNTLKSKYKQRLSKILTTQLSSRNKTKAINTYAIPILTYSFGIVKWTDTELEALNTTTRMLSYKHNIHHIHSAVERFTLKRKLGGRGVIDIKNLHYNQIENLRTYFINKAQTSQLHKAVVNLPHKGTPLQLHNKIFNPKQKILKDIDKVQKWKSKALHGKYPHHLEQEHVDQTASCSWLCKGNIYSETEGFLIAIQDQIIKTRNYSKYILKEPIDTDKCRLCHQTTETIDHITGGCGALANKEYTHRHNNVAKHIHQQLAIKYKLIDSHTPYYKYKPRNVLENSTVKLYWDRDIVTDRTILSNRPDITLTIKSEKLTYLIDIAVPNTNNLKQKHNDKIQKYIPLADEIRQMWHQNTVKIIPIIISSTGVIPKTLASSLKTLDLHKNTYIQMQKSIVIDTCSIVRRFLNPSSSFSTPQS

SEQ ID NO: 1092 - protein, 1387 aa, Thisbe lycorias
MRLRNRFIPQAGTCEGESRPEPSGSGCPTYSGGGNVSPSSAQFKSVAANNLISSPSNNTTGLVSPISSSQSLFQSPNSSKNSFEFQHSPSSSSTNTSPLSRNVVQEALAYTLVPITDTTSPARTIITNSLNRADPHTPQSTLNINTPARSVLQDMMPATTLTGKSRQRMKWTDNVNRELLRCYYITTNCETNLTAYRPLLRSKFLEIFPELSHISEQRLADQIRVIHKNNRVTPSERERIKQSISLMFTDQQGDAISNNNTTDIDNTTNSLNTHQLITDFITEPQIIHHSLDTDIQQTNFEHNIIQTLDTQNSTHTRDITIDYDKIESTFKEMIIKYKGTDPTLRPAIPKLKISRHTIKTVNTVNDILYAHLQAKEKYTLEEIHEIIYTAALTVTTLHTKIAKKLNNNHTHTHKDTISERKPPWEKRIEKRIKELRKEVGQLTQYLKGNLSQRKQQKINPHNKNTDEISDQLDNIRQKLQAYSKRLRRYKISNQRKSDNILFSTNQKLFYQKLNTEHIQITHPPDLDSLQTYWKNLWSKQVQHNTHSPWIEAEKQEMGCIDPMPEIIINEQDVTESIKKTLNWKAPGPDKIQNYWIKYLTSTHKYIATTLNDLTHNPQKIPSFFTQGITYLKPKDHDTSNPSKYRPITCLPTVYKLLTSIIAHKLNSHITRHNIIAEEQKGCCKGSKGCKEQLIIDTEIHNQVKQKHRNLYYSYIDYQKAFDSVPHSWLIDILKIYKVDDQIIKFLQHAMSKWTTKLHLKTSDSTLSTHPIKIARGIFQGDSLSPLWFCLALNPLSRLLNRTDYGYNIDRDKNIKITHLLYMDDIKLYGANRQQLDQLLKLTEQFSSDIKMTFGTDKCKINSIINGQHQVTDSFNLELHEGLIESMEPKDTYKYLGYYQSTGINHSDIKNSLKLKYKQRLRKVLNTQLSARNKTKAINTYAVPILTYSFGIVRWSDTELNALNRLTRMLSYKHNIHHIHSSVERFHLKRKLGGRGFSDIRDLHYSQIDNLRTYFFTKSNESSLLSAITNLDRSGTPLQFNNRHFYPKLKITQDTQKIDNWKRKALHGKYPHQLDQDHIDRNASCTWLTKGNIFGETEGFLIAIQDQIIKTRNYSKYILKENIETDKCRLCHQYTETIDHITGGCSTLAQKEYTHRHDNVAKHIHQQLALKYKLSDQYTPYYKYKPKNVIENHTAKLYWNRDIITDRTILSNRPDITLTLKSSKITYLIDVSIPNTHNLKQKHTEKIQKYIPLADEIKQMWHQETVKIIPIIISSTGVVPKTLNNALKLLDLHKNTYIPLQKSIVIDTCSIVRRFLNPTSLTLLQYTHEGTSTSQGSTTNTSTHHASHTTHLLAQHATHTFSHQTSHTYTNTSNIAQNLNNHTTFITQ

SEQ ID NO: 1093 - protein, 1344 aa, Autochton longipennis
MRLRNRQIPQAGTREGESRSGPSSSGCPTYSGGGNVSHKTAQSSTVAVDKLRTPSLPSSPVSSTHSLFPSPSSSPYSYQFQPSSTRSSTISPLSCDVAQEAHANSPAPNTDVTIPTRVIENNQSNRVTHTIHSSSHSTNTPARSVLQDMLPATTLAGKSRQRMKWTDEINKELLRCYYIVTQNETNLTAWRPQLHRIFSDNVPVLSHLSEQRLSDQIRVIHKNNRIPAPEREQIKQSVLFLISSSSNSVNNQPIAGHVDDDHCNIDTTLSANNQLITDAHSQTPNTQHTITVAITNTQAHQSCESSEHMQTQDSEPINRRLDSVDFMKIENVFREMLIKYTGMDPTLRPYISKPQITRNIVKTVNSINEIIDKYLQTKDSITIEDINTVIYCGAQTVIKVHTNSDKILESSPKSKNSNQRKPQWEKRIENKIITLRKEIGQLTQYLNGNLSQKKQKKLNPNSRSRDEIIEQLDNSKQKLQAYTKRLRRYKKSNERKSHNKMFNAHQKVFYQKLNSEQIHITQPPDKIDIQNYWKNIWSIPVQHNTHTSWTEIEEKEMENIDPMPEITINKDDVLVAIKKTLNWKAPGPDKIQNYWIKYLPATHEHIANALNHILCNPQDTPYFLTQGITYLKPKDDDTTNPAKYRPITCLPTIYKLLTSIIAHKLNSHIAQNHIIPEEQKGCCKGSKGCKEQLVIDTEIHNQVKQKHRNLYYSYIDYQKAFDSIPHSWLIHVLKIYKVDIRLITFLLHTMKNWTTKLTLHTNNISLSTQEIKILRGIFQGDSLSPIWFCLALNPLSRILNKTGYGYVVDKDTNVRLTHLLYMDDIKLYAANRKQLDHLLRLTENFSNDIKMTFGINKCKINSIIKGQHQKTDRFQLDAIGGTIDSMEFREAYKYLGYQQSTCINHTEIKHTLKTKYKQRLHKIFNTELSARNKVKAVNTYAVPILTYSFGIVKWSDTELEALNTATRTISHKHNIHHIHSAVQRFTLKRRLGGRGFIDIKNLHYTQIDNLRSYFQLKSNESALHKAIGYLSQAGTPLQLNNTQFDPKPKILKDDQKIENWKKKALHGKYPHQLAQDHIDYNASCTWLTKGNIFGETEGFLVAIQDQIIKTRNYAKYILKEAIDTDKCRLCHQNTETIDHITGGCSVLANKEYTHRHDNVAKHIHQQLALKHKLLESYTPYYQYKPKNVLENNTTKLYWDRDIITDRTILSNRPDITLTLKSSKTTFLIDIAVPNAHNLKQKHTEKIQKYIPLADEIKQMWHQESVRIIPIIISSTGLIPKTLKTALKLLDLHENTYIPMQKSIVIDTCSIVRRFLNPTTLTLQTHQDTHPGTPTQDSSAIIQNT

SEQ ID NO: 1094 - protein, 1363 aa, Telicota sp.
MRLRSRNTLPQAGTRNGESRPEPTSSGSPTYSGGGTVSQRPAQSKTVADREKNNQTQAPQSSPTSSTHDPYQSPSSSSSSLHYSQYTPSSRSTTTSPISDDVAQEALANYPVPITDITYSTHTSEMNYPTNSVGTDTHTHTHNSNTPARSVLQEMLPATTLAGKSRQRMKWTYEINQELLRCYYIVTNCEKNLTAYRPLLHKRFIESLPELSHLTEQRLADQIRVIHRNNRIVAREREKLKQSLAQLLTNPNSQLEPNNLTQSFHTLDHTDNIERTSTNTIERIETTQIGNLTSEQPTLVGHEDIHEHSQTQDAPIETQESFHYKKIENTFHEMLIKYTGTDPALRPVIPKPQITQTLIKTVNTTNEIIRLHLQSYQETITVEKVQEVIYCAAIAITTLNTVQKNKKDLNKIKSNNEYSKNQQKIPQWQKRLENKVTSLREVIGKLTQYLYGNLTLKKQRKLNPNNKSREEIIDELDNNKQKLQAYSKRLKRYKISNKRKSDNILFNRNQKLFYRNLNTENIDITEPPNIVEVQRYWENLWSKPVNHNPQSPWAVIEKQEVQYIDPMAEISINKSDVTQAIKNTLNWKAPGPDKIQNYWLKYLTSTHEHLAETFNHLLQNPQDMPLFLTQGITYLKPKDRDTTNPGKYRPITCLPTIYKLLTSIISRKLNSHLTHNNIISEEQKGCCKGSMGCKEQLVIDTELHNQVVQKHRNLYYSYIDYQKAFDSVPHSWLLHVLNIYKADSTLIKFLQHTMSTWNTKLHIRTNNKSLNTPTIKISRGIFQGDSLSPLWFCLALNPLSRLLNNTGYGYKIDRDNNIKLTHLLYMDDIKLYATNRQEIENLIKITEKFSTDIKMMFGTDKCKINSIVKGQHKETDSYRLESQSGTISSMDPKESYKYLGYQQSTRINHTEIKTTLKTKYKQRLKTIFNTQLSARNKTKAINTYAIPILTYSFGIVKWSDTELEALNTMTRTTSNKYNYHHIHSAVQRFTLKRKLGGRGFIDIKNLHYTQIDNLRSYFYLKADHCSLHKAIINLTHSGTSLQLNNRQFDPKQKIVKDEQKLEIWKKKALHGRFPHQLDQEHIDRNASFTWLSKGNIFGETEGSLIAIQDQVIKTRNYTRYILKETIETDKCRLCQQTTETIEHITGGCSTLANKDYTHRHDNVAKHIHQQLALKYKLLDTYTPYYKYKPKNVLENSTTKLYWDRDIVTDRTILSNRPDITLTLKTIKTTYLIDISVPNTHNLKQKYTEKIQKYIPLSDEIKQMWHQENVKIVPIIISSTGVIPKTLKTALKVIRLTESTYIPLQKSVIIDTSSIVRRFFNPTSLPLINNHDTHHPNVTLQNTSRDGPIHRVHSNNHGTRQHQD

SEQ ID NO: 1095 - protein, 1303 aa, Telegonus anausis
MSSTHSLFPSPSSSPYSYQFQSSSSSSRSSTITPLSCDVAQEAHANSPVPTIDSTNPTRVIENNQSNRVTHSTHSPSHTTNTPARSVLQDMLPATTLAGRSRQRMKWTDEINKELLRCYYIVTQNEANLTAWRPQLHRVFAETIPALSHLSEQRLADQIRVIHKNNRIPAHQRDQIKQSVSLLISSTSNSLNDQDVARNINHELITDNNQLNTDSDNQIPNLQQTMTNTHNSITETQVYQSCEISEHMQTQDSEPINPPLDSVNYTKIQEVFREMLIKYTGTDPTLRPIIAKPQTTRHFIKTLNSINEIIDKYLQTKDLITINEIHEVIYCAAQTVTSIHTKCVKTLENSTNNNKGNQRKPQWEKRIENNIIILRKEIGQLTQYLKGNLSQKKQQKLNPNNRSRDEIIEQLDKSKQKLQAYTKRLRRYKKSNERKSHNKLFNTNQKLFYQKLNSEQIQITQPPDKIDIQNYWKNIWSTPVQHNVHTSWTEIEEQEMENIEPMPEITIDKDDVLLAIKKTLNWKAPGPEKIQNYWIKYLPAIHEHIANAFNHILCSPHDTPYFLTQGITYLKPKDDDTTNPAKYRPITCLPTLYKLLTSIIAHKLNLHITRNHIILEEQKGCCKGSKGCKEQLVIDTEIHTQVKQKHRNMYYSYIDYQKAFDSVPHSWLIHILKIYKVDNKLISFLLHTMKNWTTKLTLHTKNISISTQKIKILRGIFQGDSLSPLWFCLALNPLSRILNKTGSGYVIDRENNIKLTHLLYMDDIKLFAANKQQLVHLLRLTENFSTDIKMTFGTNKCKINSIIKGQHHETDPFQLETQGGTIDSMEFRETYKYLGYQQSTSINHADIKNTLKAKYKQRLHKIFNTQLSARNKIKAVNTYAIPILTYSFGIVKWSDTELEALNTATRTISNKHNIHHIHSAVQRFTLKRKLGGRGFIAIKNLHYTQIDNLRTYFLLKASESALHKAISHLSQSGTPLQLNNMQFDPKLKILNDDQKIENWKKKALHGKYPHQLEQEHIDYNSSCTWLTKGNIFAETEGFLVAIQDQIIKTRNYSKYILKEAIDSDRCRLCHQNTETIDHITGGCSALANKEYTHRHDNVAKHIHQQLALKHKLLESYTPYYQYKPKNVLENNTAKLYWDRDIITDRTILSNRPDITLTLKSSKTTFLIDIAVPNTHNLKQKHTEKIQKYIPLADEIKQMWHQEHVRIIPIVISSIGVIPKTLKNAFKLLDLHENTYIPMQKSIVIDTCSIVRRFLNPTTLTLQTHQDTHSSTPTQNSTTRTHNTQTHSHTMHQIRSSSPTPIIS

SEQ ID NO: 1096 - protein, 1338 aa, Milanion marciana
MTNEAIVNTKYAMRLRNRTIPQAGTHMGESRPGPSNPGSPTYSGEGNVSHTTAQSKTVVANKPSSHITSNASSPTSSTHSLFQSPNSSSQSYDSLSRSATNTPLSCDASQEGNAYSPVPITDNTNINACVIQNITDNRANQNNHSSPPNINTPARSVLQDMLPATTQAGKCRQRMKWTDQINRELLRCYYIVTHNETDLTAWRPLLRQTFTKSFPELNHLSEQRLADQIRVIHRNNRISPPDREQIKQSIQPLQVDTNSTQDTANSSNTMHQTILNNNSNRTNTESRNQSHTSQRIFNDIQDSNTANTIQSSSDIEHTETQSYNAIKRHSGPIDKEKVQNTFVEMQILYLGTDPIMRPIIPKPQINRNFIKTVNTINEIIEEQLKEKESVTLQEIHDIIYSAAKTITKIHSNYLDKPEQIQNHAKSNQHTNNKSHWEKRLENKICTLRKEIGQLTQYLKGNLTDKKQKKLNPNNKSKDYLQEQLDSNVQKLQAYSKRLRRYKLSNQRKADNNLFRNNQKQFYQKLNNEQIKVTQPPDKDDIQNYWKNLWSKPVEHNTHALWNEIEIQERINIEPMHTITIDKRDVSEAIRKTLNWKAPGPDKIHNYWIKYLSSTHKHIATALNHILQNPQETPAFLTHGVTYLKPKDNDTANPANYRPITCLPTIYKLLTSIITHKLNIHITQNKIIPEEQKGCRQGSKGCKEQLIIDTEIHTHVKQKHRNLFYAYIDYQKAFDSIPHSWLIHILKIYKINHTLIHFLEHTMKNWSTKLNLHTNKTSICTQPIKIARGIFQGDSLSPLWFCLAINPLSKILAKTGYGYVVDREKDIKITHLLYMDDIKLYATNRPQLEHLLTLTENFSRDIKMTFGTNKCKINSIIRGLYNKTESFKLNIQGGIIDNMEPKETYKYLGYLQSTAISHSEIKNTLKAKYKYRLHKVLHTQLSAINKIKAINTYAIPVLTYSFGVIKWSDTELEALNTTTRTMCSKHNIHHIHSAVQRFTLKRKLGGRGVTDIKNLHYSQIDDLRTYFLTKANENDIFKAIVTLSQAGTPLQLNNTQFVPKLKIQTDAQKLDNWKMKALHGKFPHQLEQDHIDRNASYSWLTKGNIFGETEGFMVAIQDQIIKTRNYSKYILKETIETDNCRLCHKNAETIDHITGGCSILANKEYTHRHDNVAKHIHQQLAIKYKLLESYTPYYEYKPKSVLENSSAKLYWDRDIITDRTILSNRPDITLILKSTKTTFLIDISVPNTHNLKQKHCDKIQKYIRLADEIKEMWHQEKVRIIPIIISSTGVIPKTLKSALKLLDLHENTYIPIQKSIIIDTCSIVRRFLNPTSLTLISAD

SEQ ID NO: 1097 - protein, 1348 aa, Pythonides amaryllis
MRLRNRVIPQAGTREGESRPGPSGSGCPAYSGVGNVSHMTAQSTVAVNNNNNTPSHSIPCSSSPTHSIFQSPPSSPHSYDIHTTSSRSTTSTPLSCDVAQEANADTPAPINDNTSYARVLQRNIDNRVHQHTPSLTPNMHTPARSVLQDMLPATTLAGKSRQRMKWTDQINRDLLRCYYIVTHNETNLTAWRPLLHRKFIEVVPELSHLSEQRLADQIRVIHRNNRIQASEREAIKESLRSIMLDTQHIPYQNTSLNNIQTQISTPDTQPVSQHHNSHHTSSFTPQTNSTTQIHEHLISHDHTETQAVNNRNTPLEVEDYKILENTFTEMLLKYTNTDPSLRPIIPKLQTTRNSIQTVQAVNEIVRQHIQSKEQLSIQEIHEIIYCAAQTVTTHTINKLKNSTNNNNNGDTHKHNKPRWRRRLENKITNIRKDIGQITQYLKGNLSYKKQQKINPNNKNKNEILELLDLNKQKLQAYSKRLRRYKISNLRKTQNKLFNANQKRFYQNLNTEHIQIKQLPDKEDIQNYWKNLWSKPVQHNTHIAWKEIEEHETENVNPMQEIFINKNDVSQAIKNTLNWKAPGPDKIQNYWIKYFSSTHEHIAKAFNHLMHNPQNTPSFLTHGITYLKPKDDDTTNPAKYRPITCLPTIYKLLSSIITHKLHTHITQNQIIPEEQKGCRKGSKGCKEQLIIDTEIHNHVKQKHRNLFYAYIDYQKAFDSVPHSWLTHILKIYKVNDKLIHFLEHTMKNWTTKISLIANKTSLCTQPIKIARGIFQGDSLSPLWFCLALNPLSKILANTGYGYVVNRDTNIKICHLLYMDDIKLYAANRQHLDHLLKLTEMFSSDIKMTFGTNKCKINSIIKGQHKDTDQFDLLIQGGKIDSMEPKETYKYLGYRQSTTINHTEIKNELKAKYKQRLHQVLNSQLSARNKTKAINTYAIPILTYSFGVIKWSDTELEALNTTTRTISNKHNIHHIHSAVQRFTLKRKLGGRGILDIKNLHYNQVDNLRSYFLLKADENQLFKAIVKLPQPGTPLQLNSTEFDPKQKVLKDEQKIVNWKMKALHGKYPYQLEQDHVDRNASLSWLTRGNIFGETEGFMVAIQDQIIKTRNYSKFILKETIESDRCRLCHQNTETIDHITGGCNILAQKEYTHRHDNVAKHIHQQLALKHKLLDSYTPYYQYKPRNVIENSSAKLYWDRDIITDRTILSNRPDITLTLKSIKTTYLIDIAVPNTHNLQQKHSEKIQKYIPLADEIKQMWHQETVRIVPVIISSTGVIPKTLKSALKLLDLHDNTYISLQKSIIIDTCSIVRRFLNPTSLTLQQAVHHSNTTIQNPHTDTHHNNTQTYSNHLP

SEQ ID NO: 1098 - protein, 1246 aa, Boloria selene
MESNNNDKRIGPLPGGDRRGTSGAGAGRHSMRSASGRQLHRQAEVNKNATAYTNIDTQPTTSTNPTSSVLQEMMPATTLGGRNRQRMKWTDEINIELLRCYYTVTNLETNLTTYRPSLHRMFVQKYPELHFITEQRLSDQIRVIHRNNRIPATARDKIKKSIEEIINRDNNEHSENTMQNQSFTNIQDNNTTEGETNIETHTAQTQLYTQHTQYSNDTDTLTREYNSTQSQERNVENNTHIQNENHTQLEYEQISATFTEMLIKFKGMDPTLRPRIPKLQTSRKTIKTVNTINQIIKLHLQNNDDTTIENIHDIIYCGAKTVTSIHTEKEKLSENKFKKIRTNDNKSAWQKRIERKIAKLRKEIGQLTQHLNGKLSQKKQKKLKVYEKDTNEVVDELDKNKQKLAAQSKRLRRYKLSNLRKEQNKTFNFNEKVFYRNLQQTQTITQPPDITQVQNFWEDRWGNCVHHNHNAKWIESEENKVKHMENMTQFVIDTNDVKTAIRKTLNWKAPGPDKIQNYWIKYFTSTHAHLAKALNTLIQEPQNIPTFLLQGITYLKPKDTDTTNPAKYRPITCLPTIYKLLTSIIAYKLDIHITQNQIIPEEQKGCCKGSKGCKEQLVIDTEIHNQVKQKHRNLFYAYIDYEKAFDSVPHSWLIEILKLYKVDKVLINFLENAMKEWTTTLTLRTEKENLTTTSIKIARGIFQGDSLSPLWFCLAINPLSSILNSTEYGYTIDREAKTKITHLLYMDDIKLFASNRIQLNHLLKLTEQFSNDIKMNFGTEKCKINSILKGQHKKTEAYNLTLHEGTIGAMDSTEIYKYLGYQQSTCLNHTDIKQTLKTKYTQRLNTILKTHLSARNKTKAINTYAVPILMYSFGVIKWSDTDLNALNTLTRSQAFKHHIHHIHSSTERFTLQRKQGGRGFIDIKNLHYTQIENLRSYFLSKSNNSKLHKAITTMTTAGTPLQLNDNNYEPVRKVIQEQKKIEDWKKKALHGKYPHQLEQNHIDKEASNTWLTKGNLFAETEGFFIAIQDQIIKTRNYSKYIIKESIETDVCRLCHQSKETIEHITGGCKILATKEYIKRHDNVAKQIHQILALKYKLINTYTPYYKYTPRNVLENQTAKLYWNVDIITDKTIACNRPDITLTLKSPKITYLIDISIPNTENLKNKHQEKIQKYIPLADEIKDMWHQDLIKIVPIILSSTGVVPKTLHKSIELLELHKLTYIQLQKSIVLDTCSIVRRFLNPSSLSP

SEQ ID NO: 1099 - protein, 1331 aa, Thymelicus sylvestris
MRLRNRELPQAGTHTGESRPGPSGTGCPTYSGGGNVSLRSAQSSTVAATDNTSPLHHSTSSPISSTHSLFQSPSSSPHSYELHRSSRSTTTSPMSCDVAQEALANILVPTTDTTYPTRLQQNSTNCVDHNTQSTLLDSNTPARSVLQAMLPATTLAGKSRQRMKWTKEVNTELLRCYYTVTLYETDMTAWRPLLHQKFKEQFPELSHISEQRLSDQIRVIHRNNRIPATEREYIKQVISQTLPSINNQEEGSSNTLAHINQQSTTQDTPTTQHIHTHNQSQTCGHQTNTLTRISQTLESNEHIQTRENQPTDTLVRSIDNEEIENVFTEMVVKYAGMDPTLRPTIPKLQITRQNIKTVNATNEIVDKYLKNKDTITLEIVHDVIYCAAITVATFHTKQPNKTTTHTSFTSNNKTEKQKEPQWKKRIENKITLLRKEIGQLTQYLNGNLTQKKQQKLNLHNANRQEIVDQLDTKKQKLQAQAKRLNRYKKSNQRKSDNILFKNNQKIFYQKLNSENITVTQQPDITHVQKYWENIWSKPVQHNTHTTWTKIEEKEMGNIEPMLEITISKDDVTHAIKRTLNWKAPGPDKIQNYWIKYFTSTHIHIANAFNYLIKNPKDMPAFLTQGVTYLKPKDNDTTNPAKYRPITCLPTIYKLLTSIVTHKINSHISINKIIPEEQKGCSKGSMGCKEQLIIDAEIHNQVKHKNRNLYYSYIDYQKAFDSVPHSWLLHVLKIYKIDNNLIQFLQHAMTKWTTKLNLRTHTTTLSTSQIKIARGIFQGDSLSPLWFCLALNPLSRILNNTPYGYTIDKENKIKLTHLLYMDDIKLYASNKQELNHLLSLTEKFSTDIKMTFGTSKCKINSISKGQHCKTDSFELALQGGTIDSMEPRESYKYLGYQQSTSLNHTDIKNTLKTKYKQRLNKILNTQLSARNIVKAVNAYAVPILTYSFGIIKWSDTELNALNTVTRTLCNKHNIHHIHSAVQRFTLNRKLGGRGFIDLKNLHYTQVQNLRTYFIQKADDSTLHKAILNIYHSGTPLQLNNHQFDPKTKILRVDQKIENWKNKALHGKYPHQLEQDHVDKNASTAWLTNGNIFCETEGFMIAIQDQVIKTRNYSKFILKDPIETDKCRLCHRYTESIDHITGGCGVLANKDYTHRHDNVAKYIHQQLALKYKLTDTHTPYYKYKPVNVLENSNVKLYWDRDIITDRTILSNRPDITLILKSTKTTYLIDIAVPNTNNLKQKHTEKIQKYIPLADELKQMWHQESIKIVPLIISSTGVIPKTLHTALKTLDLHPKTYIPLQKSIILDTCSIVRRFLNPTSLTLQDSPDITNTQT

SEQ ID NO: 1100 - protein, 1367 aa, Pyrrhopyge sadia
MRLRNRQIPQAGTREGESRPGPSGSGCPTYSGGGNVSRMTTQPRTAVVDDSRSHITSSLTHPSSPISTPMSSTSSLCQTPNSSLDLYEQSVSSSTTNTSSSCCVVQEAHAVIRAPTTDVINPTRVLQNSTDNRVNQNSHSLSPHNNTPTRSVLREIFPTTTLAGKTRQRMKWTELINKELLRCYYIVTNIETNLTAWRSMLHRKFSESFPELNYLTEQRLADQIRVIHKNNRIPALERDAIKKSITTLLSTAISTNQINLPNNSIQPTTINNTLTLTSHESNVSQSSETLNTQLTQTIIQKHDTTTEINHLDDDNTEHAERQNLEARNKDSIDYKKIEYTFNEMLIKYSGTDPSLRPTIPKLQITRNTIKSVNTINKIIEEHLRTKTTITLEEIHEVIYCAARSVILIHTKYVDKLDSNMEDPNRHTNKVKKPQWERRLENKITTLRKEIGQTTQLLKGNLTQKKQRKLNPNKRSNDEISEQLDIYKQKLQALSKRLRRYKISNQRKSHNMLFSTNQKLFYQNLNEEHIQITSPPDKEDVQNYWKNLWSKPAQHNTHTSWTKIEEQETIDIDPMPNILINKDDVSEAIRKTANWKAPGPDKIQNYWIKYFSATHQYITNTFNHILSNPQETPSFLTEGITYLKPKDKDTSNPANYRPITCLPTIYKLLTSIISRKLDIHITKNHIISEEQKGCRKGTKGCKEQLIIDTEIHNQVKQTHRNLFYSYIDYQKAFDSIPHSWLIHILKIYKVDNKVIQFLQHTIKNWTTKLNLRSNKTSFSTQAIKISRGIFQGDSLSPLWFCLALNPLSKILNKTGFGYVVDRESNIKITHLLYMDDIKLYAPNRSELDHLLRLTESFSTDIKMSFGTNKCKINSIVKGKYKQTDPFDLSRQAEKILSMEPKETYKYLGYQQSTAISHTDIKNTLKTKYRQRLNKIFSTQLSARNKTKAVNTYAIPILTYSFGVIKWSDTELEALNTLTRTSANKYNIHHIHSAVQRFTLSRKLGGRGFIDIKNLHYTQIDNLRTYFLMKANENTLIKAITNLPQAGTPLQLNNSQFNPKLKILKDEEKIISWKQKSLHGKYPHQLEQEHVDRKTSCSWLTKGNIYAETEGFLIAIQDQIIKTRNYSKYILKEIIETDKCRLCNQTTETIDHITGGCSMLARKEYTHRHDNVAKHIHQQLALKHKLLDSYTPYYQYKPKNVMENNSVKLYWNRDIITDRTILSNRPDITLILKSSKTTYLIDIAVPNTNNIKQKHTEKVQKYIPLADEIKQMWHQEIVKIIPVIISSTGVIPKTFKNTLQLLGLHENTYIPLQKSIIIDTCSIVRRFLNATTLSLQQDVQHTNYNATIQNSIHIVTSNTLINTHNTTHT

SEQ ID NO: 1101 - protein, 1193 aa, Hyalothyrus neleus
MLPATTLAGKSRQRMKWTNEINRKLLRCYYIVTQNEANLTAWRPQLHRKFAETTPELSHLSEQRLADQIRVIHRNNRISAPEREEMKQALSISTPSSNSIVYPTITSNIEHQSNINTISPTDNYQLGTNSPSQILNAQHTYDNIQQVNTITNTHQILDSSEHIQTQDTETTNRPIDVVNYKKIENTFNEMLIKYTGIDPTLRPTIPKLQTTRIAIKTVNTINDIIDQYLQIKNLTTIEEIHEIVYCAAQAVTKLNNKYDKNIVNHLNTNNDHTIVKQKKPHWERRIENKIIILRKEIGQLTQYLNDKLTQKKQQKLNPNNRSKDEITEILDKNKQKLQAYSKRLRRYKKSNERKSHNKLFSTNQKLFYRKLNTEQIKITQPPYKDDIVNYWKNIWSKPVQHNTHASWTEIECHDTQNIGPMPEIIIDRDDVTQAIKKTLNWKAPGPDKIQNYWFKYLTSTHKHIANIFNRLICNPHETPSFLTQGITYLKPKDNDTTNPAKYRPITCLPTIYKILTSIISHKLNTHITQNQIIPEEQKGCRKGSRGCKEQLVIDSEIHSQVKQKHRNLYYSYIDYQKAFDSVPHSWLIHILKIYKVDNRLIQFLQYTMKNWTTKLSLRTNNMSLSTQKIKILRGIFQGDSLSPLWFCLALNPLSRILNKTGFGYVLDRATNTKLTHLLYMDDIKLYAANRQQLNHLLSLTENFSTDIKMTLGTNKCKVNSIIKGQHKETDSFELVRQGGSIDSMDPKEAYKYLGYQQSTHINHTDIKNTLKIKYKKKLHKILNTQLSAKNKVKAVNTYAIPILTYSFGILKWSDTELEALNTATRAASNKHNIHHIHSAVQRFTLKRKLGGRGFIDIKNLHYTQIDSLRTYFLTKAQDSALHKAIVQLPLHGTPLQLNNSQYDPKLKIVKDEQKIENWKNKALHGKYPHQLGQDHIDSNASCTWLTKGNIFSETEGFLVAIQDQIIKTRNYSKYILKETISTDTCRLCHQVTETIDHITGGCSILANKDYTHRHDNVAKHIHQQLALKHNLLKSHTPYYQYKPKNILENNTAKLYWDRDIVTDRTILSNRPDITLTLKSSNTTFLIDIAVPNTHNLKQKHTEKIQKYIPLADEIKQMWHQETVRIVPIIISSTGVVPKNLKNALKLLDLHENTYIPLQKSIVIDTCSIVRRFLNPTTLTLQNDNEHNMNILTS

SEQ ID NO: 1102 - protein, 1076 aa, Polygonus savigny
MNITPLSNNSTQTTGPHRQMLTLQNTPGTCRQNNILVSTHQPIQNIEHNQTESSEMTNRCLNAEDHKKIENVFTELLLKYAGMNPTLRPTIPKLQITRYTIKTVNIVNQITDLHLQTKDKITIEEIHEMIYCGAQTVITLHSKNLKHLDNTTHDNSHNTINKQKKPQWEKRIESKIAVLRKEIGQLTQYVKGNLTQRKQQKLNQNNKSIEEIIDQLDNNKQKLQAYSKRLRRYKKSHERKSHNKLFNSNQRLFYQKLNNNETQPTQAPDKDEIENYWKSLWSKPVQHNTHLSWTEIEDQVAQNIDCMSEITINKDDVVQAIKNTLNWKAPGPDKIHNYWIKYFSATHEHLAKEFNHLINNPQDTPSFLTQGITYLKPKDNDNINPANYRPITCLPTIYKLLTSIISHKLNKHITLNKIIPEEQKGCSKGSRGCKEQLVIDAEIHNQVKQKHKNLYYAYIDYQKAFDSVPHSWLIQILKIYKVDDKLIQFLQSMMKNWTTKLSLHTKHTSICTQPIKILRGIFQGDSLSPLWFCLAINPLSAILNKTGYGYMINKESKTKLTHLLYMDDIKLYAANRQEIVQLLKLTEIFSTDIKMTLGTEKCKINSIIKGQYKETDPFELETQMGKIDSMEPKESYKYLGYHQSTSINHTHIKKSLTTKYKHRLNKIFNTQLSAINKVKAVNTYAVPILTYSFGIIKWSDTELEALNTITRTVSYKHNIHHIHSAVQRFTLKRKLGGRGFIDIKNLHYTQVDNLRKYFLTKADESELHKAIVHLPQPGTPLQLSNSQFDPKNKISNDEQKIDTWKRKALHGKYPHQLEQDHVDYKASTTWLAKGNIFAETEGFMVGIQDQIIRTRNYSKYILKERIETDKCRLCHQTTETIDHITGGCSALANKEYTHRHDNVAKHIHQQLALKYKLLETYTPYYQYKPKRVLENTTAKLYWDRDIVTDRTILSNRPDITLILKNLKTTYLIDVAVPNTHNLKQKHNEKIQKYIPLADEIKLMWHQETVRIIPIILSSTGVVPKTLKNSLKILDLHENTYIPIQKSIIIDTCSIVRRFLNSTTLILPDNRDTNCNE

SEQ ID NO: 1103 - protein, 1347 aa, Gorgythion begga
MRLRSGYKLPQASTGANRNGESCPEPTSSGSPTYSGGDTVSQTSAQSRTVAVNKPSSSHILTHPSSPVSSTQSLFQSSNSSPQSYEYINSLSHSSSTSSMSCDVAQEATATSPESTTDITFPTRTFKNNSNSRVHHTIQPSPSYMHTSARSVLQDMLPATTLAGKSRQRMKWTDQINRELLRCYYVVTHNETDMTAWRPLLYQKFAESFPELSHLSEQRLADQIRVIHRNNRIPASEREDLKNTVSLLIPTASNISQNTDLSNIHKSPTNVTLACNTTNTELNGQTHATTQMCSTPTTHVNIEHVQTQLACLTENPQKPLRYEEIENTFTEMLIKYLGTDPTLRPTIPKVQISRNVIKTISTVNKIIENYLQNKEKSIEEIHNTIYCAAQTVIAVQSKNSETENNTYKNANIVSRKGKPKWERRIENKIMLLRKEIGQLTQYKNGNLTPKKQLKLNPNNKSMTEIIDQLDLNKQKLQAYSKRLRRYKISNKRKSDNKLFNTNQKLFYQKLNTENIPVINSPTIDELENYWKDLWSKPVHHNTITSWTQKEEASIIDPMPSVIISKEDVSQGIRKTLNWKAPGPDKIQNYWIKYFTATHEPLANAFNNIIQNPEETPSFLTQGITYLKPKDNDTTNPSKYRPITCLPTIYKLLTSIISFKLNTHIARNHIIPEEQKGCCKGSRGCKEQLVIDTEIHHHVRVKQKNLFYSYIDYQKAFDSVPHSWLIDILKLYKVDNTLLNFLQNSMKNWTTKLHLQTQHTSFHSHPIKILRGIFQGDSLSPLWFCLSLNPLSKILNNSGYGYVLERENNTKITHLLYMDDIKLYAANREQLEHLIKLTEMFSTDIKMSFGTNKCKINSIIKGRHHETNPFYLNSDGGRIDSMEPKETYKYLGYQQSTSLNHTEIKNTLKAKYKQRLNKVLSTQLSARNKIKAIYTYAIPILTYSFGVIKWSDTELAALNTATRTASNKHNIHHIHSAVQRFTLKRKLGGRGCIDIKNLHYTQVDNLRTYFQTKAKTSTLHKAIVNLPQSGTPLHLHNSLFDPKLKIIKNEQKIESWKTKALHGKYPHQLEQEHVDRDASCSWLTKGNIFGETEGFLVAIQDQIIKTRNYAKYILKETIESDKCRLCCQATENIDHITGGCSVLANKEYTHRHDNVAKHIHQQLALKYNLVKTYTPYYQYKPKNVLENATAKLYWDRDIITDRTVLSNRPDITLTIKTSKTTFLIDVAVPNTHNLKQKHTEKIQKYLNLADEIKQMWHQKTVRIVPIIISSTGVIPKNLKSALQLLELNENTYIPLQKSIVIDTCSIVRRFLNPSSLTFQEEQQNSNIVTHTSSSLNNTYNHHSNHPNL

SEQ ID NO: 1104 - protein, 1322 aa, Ectomis asine
MRLRNRQIPQAGTREGESRPGPSGSGCPTYSGGGNVSHKAVQPNAVAVDKSPTTSQSSSPTPSSLSSHSLFPSLTSSPRSTTDTPLSCDVAQAAHANSPVPTPDIINTTRVLQNNSHNRVNHNTHSSSPITNTPARSVLQDMLPSTTLAGKRRQRMKWTDEINRTLLRCYYVVTQNETDLTAWRSLLHQKFGESVPELSHLTEQRLADQIRVIHRNNRIPLAEREHIKQSLPLLTSSPPTRNHYTISNDIEHQFTLNTTTLNINCVQTTDAHSQISTSQNTLNTIQQLNTTNTEHSQTEHSGASMALDVLEYDKIENTFNEMLIKYTGTDATLRPSIPKIQPTCSMIKSVNTVNKIIDRHLQTRNTITLEEVHEIIYCAAQTIVSLHTKQGENLENNINDNGHKLKPKGSKPKWERRIENRITILRKEIGQFTQYLKGNLTQKKIHKLNPNNRSPEEITEQLDRKKQKLQAYSKRLRRYKKSNQRKSQNKLFNSNQRLFYQKLNDENIQMKQIPNKDDIQSYWKNIWSRPVQHNIHASWTEIESQEIQSIESMPKITIDKEDVSQAIKKTLNWKAPGPDKIHNYWIKYLPATHEHIANIFNHLINNPKDTPTFITQGITYLKPKDNDTSNPAKYRPITCLPTIYKLLTSIISHKLNTHITKNHIIAEEQKGCSKGSRGCKEQLIIDTEIHNQVKQKHRNLYYAYIDYQKAFDSIPHSWLIHILKAYKVHENLIQFLESTMNNWTTKLSLHTGDTSICTQPIKILRGIFQGDSLSPLWFCLAINPLSRILNKTGYGYIIDRESKVKLTHLLYMDDIKLYATSRQEIDNLLRITQNFSTDIKMTLGTDKCKINSIIKGQHKGTHPFVLESQRGIIDSMDPKETYRYLGYHQSTSINHTHIKNTLKNKYKQRLHKILNTQLSARNKVKAVNTFAIPVLTYSFGIIKWSDTELEALNTITRTSSYKHNIHHIHSAVQRFTLKRKFGGRGFIDIKNLHYTQIDNLRKYFLTKANDSKLHKAIVQLPHFGTPLQLSNNGFDPKNKILNDDQKIDSWKRKALHGKYPHCLEQEYVDSIASCAWLTKGNIFGETEGFIIGIQDQIIKTRNYAKYIMKERLETDKCRLCNQITETIDHITGGCSVLANKEYTHRHDNVAKHIHQQLALKHKLLDTYTPYYQYKPKQVLENATAKLYWDRDIITDRTILSNRPDITLTLKNKKTTYLVDIAVPNTHNLRQKHNEKIQKYLPLAEEIKQMWHQESVRIVPVIISSTGVIPKTLKNSFKVLDLHENTYIPIQKSIIIDTCSIVRRFLNSTSVISPDIHDTNPDT

SEQ ID NO: 1105 - protein, 1416 aa, Urbanus velinus
MPREGRTLVSTKLHNSSDQQSHSIYKYAMRLRNRQIPQAGTREGESRPGPSGSGCPTYSGGGNVSHKTTQSNTVVVEKSPSHVTTHSSSPVSSTHSLFQSPSSSPRSYELYHLPSRSTTITPLSCDVAQEALAIFSVPTTDIINPTRVLEDNINNRVNHNTHSSPFIANTPARSVLQDMLPATTLAGKSRQRMKWTDQINRELLRCYYIVTQNEVNLTAWRPQLHQKFATSFPELSNLSEQRLADQIRIIHRNNRIPANEREHIKQSVSLLLLTLNGCNDDTTTNNEEAFLNTPLTTSNAELNAPSSSQSINSQHTLALNYSHTQNYHTQSQRMNITTRTHHLAENSQHNKKQDLETTSKQLDPINYDKIKSTFSEMLIKYTGTDPELRPTIPKFQTTRNTIKTVNTLNEIVDTHLSTKNSITLEEIHEVIYCAAQTTVTLHTKHVKKSDIKDNNNSSKEIIKHKKPQWETRIEKKIATLRKEIGQLTQYINGNLTQKKQRKLNPNNISRHEIEELLDNNKQKLQAYSKRLRRYKISNQRKSDNKLFTTNQKIFYQKLDTEQIKISQNPDINDIHNYWKNIWSTPVVHNSHPSWNKIEDQEIENIQPMSEIFINKDDVSQAIKKTLNWKAPGPDKIQNYWIKYLPATHTYIANTFNYLINNPQDTPNFLTHGITYLKPKDNDTTNPSKYRPITCLPTIYKLLTSIISHKLNTHITQNHIIPEEQKGCSKGSRGCKEQLIIDTEIHNQVKHKHRNLYYAYIDYQKAFDSIPHSWLIQILKTYKVDIRLIEFLQDTMKNWTTKLSLRTDHTTINTYPIKISRGIFQGDSLSPLWFCLAINPLSTILNKTGYGYTIDRESNIRVTHLLYMDDIKLYAANRQQLDHLLKLTENFSTDIKMSFGTNKCRINSIIKGQQKETHTFELETQGGKIDSMDSKETYKYLGYQQSTCINHTQIKQILKIKYKQRLHKILNTQLSARNKVKAVNTYAIPVLTYSFGIIKWSDTELEALNTITRTASNKHNIHHIHSAIQRFTLKRKFGGRGFIDIKNLHYTQIDNLRTYFLTKAHESNLHKAIVHLSQPGTPLQLNNSEFDPKFKIVKDDQKIENWKRKALHGKYPHQLEQDHIDGLASCSWLTKGNIFGETEGFLIAIQDQIIKTRNYSKYILKETIDTDKCRLCHQTTETIDHITGGCSILANKEYTHRHDNVAKHIHQLLALKHNLLESYTPYYQYKPKNVLENKTAKLYWDRDIITDRTILSNRPDITLTLKSSKTTFLIDISVPNSHNLKQKHAEKVQKYIPLADEIKQMWHQENVKIIPIIISSTGLIPKTLKTSLKLLDLHENTYIPMQKSIVIDTCSIVRRFLNPTSLTFQPYQDTHSNSLTQDSSASYTHNTQTHNAPNTLIITNPNYTNSHEPGYLA

SEQ ID NO: 1106 - protein, 1246 aa, Thymelicus lineola
MEKSIKRKYSLRPLPGGRRGTSGVGAGCDSMRTADGLELNRRAPAGHVPEVTTADIISSPSSPISSTHSLFESPNSSPHSYENLSTSRSSTISPMSFNVAQRPMANSLVPINDTTNSTQGSNRDTNICVEYNRNTTCSSATLTQYNNDAPAATVLQEMFPPTTLGGKNRTRLKWTDKINRQLLRCYYRVTNCETNLTAYRPLLHSTFIENYPELQHITQQRLSDQIRVIHKNNRISPAERLQIKQEISDIISTRNVIYQNTLPNTQNIQIENNMNNNIPCHSIENPIENTTVTAEPLDNILCPISEDTLQLAQNNSDLSVNYDEIEYKFKENLIKYNNTDPSLRPTIPKLNISYLTIKTVNTVNNIIHTYLQDKETLPIEELHKIIYCAAITITDLHTKPKKQNNNIDKINNRNKSKQKEPPWKKRITAQIATLRKNIGRMTQYLKGNLSQKTQRKINPNKLNTDEFIDELDKNKQKLAVYTKRLKRYEESNRRKANNNLFNNNQKSFYRNLNSEHIKITETPDETEVQQFWENVWSTPEDHNNNAECIELEQKETEYIEPMPPILIDLEDVKNAVRKTHNWKSPGPDKIQNYWLKYLTATHKHLANTLNALIHEPHNMPTFLTQGITYLKPKDSDTTNPAKYRPITCLPTLYKLLTSIITQKLNTHISHNNIIPEEQKGCRKGSMGCKEQLVIDTEIHNQVKQKHRNLFYSYIDYQKAFDSVPHSWLIYILKLYKTDDNLLNFLEHIMTTWSTTLNIHTGSKRITTNPIKISRGIFQGDSLSPLWFCLALNPLSRILNRTNYGYKLDKQNNIKITHLLYMDDIKLYAANRQQLNHLLTLTEQFSKDIKMIFGIDKCKINSVIKGKYKETDAYPLTQQEGTISNMVFKETYKYLGYQQGTALNHAEIKKTLKLKYKHRLTTLLKTKLSARNLTKAVNTYAIPILTYSFGIINWSETELNALNLLTRTTFNKHNIHHSHSAVERFTIKRKNGGRGVIDIKNLHYIQVHNLRSYFQNKANHSPLHNALIHLQTSGTPLKLNDAQYKPDEKIQQEEEKIDKWKKKVLHGKHPQFLDQPHIDEEASNSWLAKGNIFGETEGFLIAIQDQIIKTRNYAKYILKEKIDTDKCRLCHQTTESIDHITGGCRALASKEYTHRHDNVAKHIHQQLALKYKLLETYTPYYEYKPKNVLENNNVKLYWNRDIMTDRTILSNRPDLTLTLKAEKTTYLIDVSVPNTNNLKQKFTDKIQ

SEQ ID NO: 1107 - protein, 1389 aa, Urbanus esmeraldus
MRLRNRQIPQAGTREGESRPGPSGSGCPTYSGGGNVSHKTAQSHTVVVEKSPSHVTTRSSSPTSSTQSLFQSPSSSPHSFQFNHSSSRSTTITPLSCDVAQEAHANPPVPTTDINPARVLEDNIHNRANHNTHSSPSITNTPARSVLQDMLPATTLAGKSRQRMKWTDQINRELLRCYYVVTQNEANLTAWRPQLHQLFAVSFPELSHLSEQRLADQIRVIHRNNRLTVSEREHIKESVSVLLTTSNRCNAETVTNILETSLNTPHITNNTEPTTPYLSQTLTTNNSQHTITPYHSHSQYLHTHSQEISTTTRTYHLPENIEHNPRQNPKTTNEPLHSIDYNKIKNTFSEMLIKYAGTDPTLRPTIPKLQITRNAIKTINTVNEIVDIHLRTRNSVTLEEIHEVIYCAAQATVTLHTKHIKNLENNNGNNRPNTIHIQKKPQWETRIEKKITTLRKEIGQLTQYLNGNLTQKKQKKLNPNNKNRNEIEETLDNNKQKLQAYSKRLRRYKISNQRKSDNKLFTTNQKIFYQKLDTEQIKITQNPDKNNIHNYWKNIWSTPVLHNTHLSWNKIVDQEIENIQPMSEIFIDKDDVSQAIKKTLNWKAPGPDKIQNYWIKYLPATHTYIANSFNHLINNPQDTPTFLTHGITYLKPKDNDTTNPAKYRPITCLPTIYKLLTSIISHKLNTHITQNHIIPEEQKGCSKGSRGCKEQLIIDTEIHNQVKHKHRNLYYAYIDYQKAFDSIPHSWLIQILKTYKVDIRLIEFLQDTMKNWTTKLSLRTNNTTINTHPIKILRGIFQGDSLSPLWFCLAINPLSRILNKTGYGYTIDRESNVRITHLLYMDDIKLYAASRQQLDHLLKLTEIFSTDIKMSFGTNKCKINSIIKGQQNETHPFELETQGGTIDSMDPKETYKYLGYQQSTSINHTQIKHTLKTKYKQRLHKILNTQLSARNKVKAVNTYAIPILTYSFGIIKWSDTELEALNTLTRTASNKHNIHHIHSAIQRFTLKRKFGGRGFIDIKNLHYTQIDNLRTYFLTKAHESNLHKAIVHLAQPGTPLQLNNCDFDPKLKIVKDEQKIENWKRKALHGKYPHQLEQDHIDGLASCSWLTKGNIFAETEGFLIAIQDQIIKTRNYSKYILKETIVTDKCRLCHQTTETIDHITGGCSVLANKEYTHRHDNVAKHIHQQLALKHNLLHSYTPYYQYKPKNVLENKTTKLYWDRDIITDRTILSNRPDITLTLKSSKTTFLIDISVPNTHNLKQKHAEKIQKYIPLADEIKQMWHQEHVRIIPIIISSTGLIPKTLKSALKLLDLHENTYIPMQKSIVIDTCSIVRRFLNPSSLTLQPYQDTHSNTVTHDSSSYTHNTQTLNTSNTFIITHSNHTNSHEPGYLA

SEQ ID NO: 1108 - protein, 1329 aa, Pyrrhopyge kelita
MTTQPRTAVVDDSRSHITSSLTHPSSPISTPMSSTSSLCQTPNSSLDLYEQSVSSSSTNTSSSCCVVQEAHAVIRAPTTDVINPTRVLQNSTDNRVNQNSHSLSPHNNTPTRSVLREIFPTTTLAGKTRQRMKWTELINKELLRCYYIVTNIETNLTAWRSMLHRKFSESFPELNYLTEQRLADQIRVIHKNNRIPALERDAIKKSITTLLSTAISTNQINLPNNSIQPTTINNTLTLTSHESNVSQSSETLNTQLTQTIIQKHDTTTEINHLDDDNTEHAERQNLEARNKDSIEYKKIEYTFNEMLIKYSGTDPSLRPTIPKLQITRNIIKSVNTINKIIDEHLRTKTTITLEEIHEVIYCAARTVILIHTKYVDKLDSNMDNPNRHTNKVKKPQWERRLENKITMLRKEIGQITQLLKGNLTQKKQRRLNPNKRSNDEISEQLDIYKQKLQALSKRLRRYKISNQRKSHNMLFNTNQKLFYQNLNEEHIQITSPPDKDDVQNYWKNLWSKPAQHNTHTSWTKIEEQETIDIDPMPNILINKDDVSEAIRKTANWKAPGPDKIQNYWIKYFSATHQYITNTFNHILSNPQETPSFLTEGITYLKPKDKDTSNPANYRPITCLPTIYKLLTSIISRKLDIHITKNHIISEEQKGCRKGTKGCKEQLIIDTEIHNQVKQTHRNLFYSYIDYQKAFDSIPHSWLIHILKIYKVDNKVIQFLQHTIKNWTTKLNLRSNKTSFSTQAIKISRGIFQGDSLSPLWFCLALNPLSKILNKTGFGYVVDRESNIKITHLLYMDDIKLYAPNRSELDHLLRLTESFSTDIKMSFGTNKCKINSIVKGKYKQTDPFDLSRQAEKILSMEPKETYKYLGYQQSTAISHTDIKNTLKTKYRQRLNKIFSTQLSARNKTKAVNTYAIPILTYSFGVIKWSDTELEALNTLTRTSANKYNIHHIHSAVQRFTLSRKLGGRGFIDIKNLHYTQIDNLRTYFLMKANENTLIKAITNLPQAGTPLQLNNSQFNPKLKILKDEEKIISWKQKSLHGKYPHQLEQEHVDRKTSCSWLTKGNIYAETEGFLIAIQDQIIKTRNYSKYILKEIIETDKCRLCNQTTETIDHITGGCSMLARKEYTHRHDNVAKHIHQQLALKHKLLDSYTPYYQYKPKNVMENNSVKLYWNRDIITDRTILSNRPDITLILKSSKTTYLIDIAVPNTNNINQKHTGKVQKYIPLADEIKQMWHQEIVKIIPVIISSTGVIPKTFKNTLQLLGLHENTYIPLQKSIIIDTCSIVRRFLNATTLSLQQDVQHTNYNATIQNSIHIVTNNTLINTHNTTHT

SEQ ID NO: 1109 - protein, 1022 aa, Parapoynx stratiotata
MSRYTIKTVNCLDFLIKQHLQNKTTVTLYDIHNAIYCAAITVTTINSKQGKKIHINTKNTNNTHTNTTHTNSTQNNTPTNTKHTAGPMIPQWQRRIENKITGFRKEIGQLTQYLNGNLNQKKQLKVNPNNFSKDEIIDRLDNYKQKLQAYSKRLRRLKVSNQRKKDNSLFSTNEKLFYQNLNSEHIKITQPPNSIDIQRYWEKLWSMPVQHNTSTSWAEIEEEETRDIETMPEIIITKDDITQAIKKTMNWKAPGPDKIQNYWIKYLPSTHEYLAKIFNDIIQNPQDMPDFMTQGVTYLKPKDNDTTNPSKYRPITCLPTLYKLLTSIISQKLNMHVTQNKIIPEEQKGCIKGSRGCKEQLVIDTEIHNKVKQSHGNLFYSYIDYQKAFDSVPHSWLIHILYRYKVDNKLIHFLQCAMNNWITKLSLKTNDSTVSSKPIKIKRGIFQGDSLSPLWFCLALNPLSRVLNKTVSGYTIDKQNNTKLTHLLYMDDIKLYAANRDELNHLLQLTDKFSSDIKMTFGTNKCKINCIIKGKHSRLEPFNVEQQGGIIDSMDPKESYKYLGYQQTTSINHTEIKNNLKAKYKQRLNKLLNSQLAARNKIKAINTYAIPILTYSFGIIKWSETELEALNIATRTACYKHNIHHIHSAVQRFTLKRKLGGRGVIDIKNLHYKQIDNLRTYFLKKAKESELHRAIANLPYSGTPLQLSNGQYDPKLKIITDEKKIELWKTKALHGKYPHQIEQDHINRTASCTWLSKGNIFGETEGFLIAIQDQIVKTRNYSKYILKENIATDKCRLCHQTTETIDHITGGCSILANKEYTHRHDNVAKHIHQLLALKHKLLDTYTAYYKYNPKNVLENNSAKLYWNRDIITDRTMLSNRPDITLTLKTTKITYLIDIAVPNTHNLKQKHTEKIQKYIPLAEEIKQMWHQDAVNIIPVIISSTGVIPKNLSVALKQLDLHENTYIPLQKSIIIDTCSIVRRFLNPTTLLRQNNEQTDTLDTLTHTNLVHHTTQSHTTQLNTT

SEQ ID NO: 1110 - protein, 1240 aa, Fabriciana adippe
MESTNNDNSIGPLPGGDRRGTSGAGAGRHSMRTASGRQLHRQAAVNQNATAYTDIDTQPTASTNPTSSVLQEMMPATTLGGRNRQRMKWTDEINIELLRCYYTVTNLETNLTAYRPLLHQMFVQKYPELNFITEQRLSDQIRVIHRNNRIPATAREKIKKTIEEIINRENNEHSENTTQNTLFTNIQDNKTTEEEINTETQPSVAHLYTQYTQNNNDTETLITEHQITPSQERNTENENHTQLEYEKISTTFTEMLMKFKGTDPTLRPHIPKLQTCRKTIKTINTINQIIKTHLQDNDDTTVENLHDIIYCAAKTVTSLHTGKNTLNKKNTKRTETSENKPAWQKRIETKIAKLRKEIGQLTQHLNGKLSQKKQEKIKVNGKDRNEVVDELDKNKQKLAAQSKRLRRYKLSNLRKQQNRDFNNNEKVFYRNLHKTHTITQPPDIKQVKKFWEDRWGNSVHHNHNAKWIELEENRVKHIENMTQSKIEKSDIETAIRKTLNWKAPGPDKIQNYWIKYFTSTHAHLAKALNTLIQEPQNIPSFLLQGITYLKPKDTDTTNPANYRPITCLPTIYKLLTSIIAHKLNIHITQNKIIPEEQKGCCKGSKGCKEQLVIDTEIHNQVKQKHRNLFYAYIDYEKAFDSVPHSWLIQILKLYKVDNILIHFLENTMEKWMTTLTLRTEKENLTTTPIKIARGIFQGDSLSPLWFCLAINPLSSILNSTECGYTIDREAKIKITHLLYMDDIKLYASNRTQLNQLLKQTEQFSNDIKMNFGTEKCKINSISKGQHKETETYNLTLQEGAISTMDSKEIYKYLGYQQSTCLNHTDIKQALKTKYSQRLNTILKTHLSARNKTKAINTYAVPILMYSFGIIKWSDTDLNALNTLTRSQAYKHNIHHIHTSTERFTLQRKHGGRGFIDIKNLHYTQIKNLRSYFLTKANNSKLHKAITTLTTSGTSLQFNDKNYEPETNIITEQKKIEHWKKKALHGKYPHQLEQTHIDKEASNTWLTKGNIFAETEGFFIAIQDQIIKTRNYSKYIIKESIETDLCRLCHQSKETIEHITGGCKILATKEYVKRHDNVAKQVHQSLALNYKLISTYTPYYKYIPPNVLENETAKLYWNVDIITDKTIACNRPDITLTLKSSKTTYLIDISIPNTENLNTKHQEKIQKYIPLADEIKDMWHQNSIKIVPIIISSTGVVPKTLHKSIELLELHKSTYINLQKAIVLDTCSIVRRFLNPSSLLP

SEQ ID NO: 1111 - protein, 1002 aa, Thymelicus sylvestris
MVVKYAGMDPTLRPTIPKLQITRQNIKTVNATNEIVDKYLKNKDTITLEIVHDVIYCAAITVATFHTKQPNKTTTHTSFTSNNKTEKQKEPQWKKRIENKITLLRKEIGQLTQYLNGNLTQKKQQKLNLHNANRQEIVDQLDTKKQKLQAQAKRLNRYKKSNQRKSDNILFKNNQKIFYQKLNSENITVTQQPDITHVQKYWENIWSKPVQHNTHTTWTKIEEKEMGNIEPMLEITISKDDVTHAIKRTLNWKAPGPDKIQNYWIKYFTSTHIHIANAFNYLIKNPKDMPAFLTQGVTYLKPKDNDTTNPAKYRPITCLPTIYKLLTSIVTHKINSHISINKIIPEEQKGCSKGSMGCKEQLIIDAEIHNQVKHKNRNLYYSYIDYQKAFDSVPHSWLLHVLKIYKIDNNLIQFLQHAMTKWTTKLNLRTHTTTLSTSQIKIARGIFQGDSLSPLWFCLALNPLSRILNNTPYGYTIDKENKIKLTHLLYMDDIKLYASNKQELNHLLSLTEKFSTDIKMTFGTSKCKINSISKGQHCKTDSFELALQGGTIDSMEPRESYKYLGYQQSTSLNHTDIKNTLKTKYKQRLNKILNTQLSARNIVKAVNAYAVPILTYSFGIIKWSDTELNALNTVTRTLCNKHNIHHIHSAVQRFTLNRKLGGRGFIDLKNLHYTQVQNLRTYFIQKADDSTLHKAILNIYHSGTPLQLNNHQFDPKTKILRVDQKIENWKNKALHGKYPHQLEQDHVDKNASTAWLTNGNIFCETEGFMIAIQDQVIKTRNYSKFILKDPIETDKCRLCHRYTESIDHITGGCGVLANKDYTHRHDNVAKYIHQQLALKYKLTDTHTPYYKYKPVNVLENSNVKLYWDRDIITDRTILSNRPDITLILKSTKTTYLIDIAVPNTNNLKQKHTEKIQKYIPLADELKQMWHQESIKIVPLIISSTGVIPKTLHTALKTLDLHPKTYIPLQKSIILDTCSIVRRFLNPTSLTLQDSPDITNTQT

SEQ ID NO: 1112 - protein, 1305 aa, Melanis pixe
MTNGAIVTKHAMRLRNRVIPQAGTCKGESRPEPSGSGSPSYSGGGTVSLSSAQSKTVAASNNNSPTPSPSPSSPTQHYISSPISSTQSLFPSPCSSPKSYEYHHHTSASCSTTTSPLSLDVVQETYPHSPVPTIDSTNPTQTIFFDEPHRVDHNTHYHTLNTNSPARSALQDMLPATTLAGKSRQRMKWTYNINKELLRCFYIVTNCETNLTAYRPQLHKKFIETFPELTHLSEQRLADQIRVIHKNNRISAPERDQIKQLVAQTNTNDCVHDINCANTTHQSILDTSVINNYQTVASLHTETSTPAQCTQQTNTTTLEPPQFLESNEHVQTQNTEIITEPIVNTLNYDKINDKFTEILIKYRGTDPTLRPSIPKLQISRYTIKTLNTVNNILDQHLTTMGPCNIEEIHEMIYSAALTVTTIHTKQGRKQENNTTHTCRTASDREKKPQWERRLDNKITDLRKDIGLLTQYINGNLTQKKQRKLNSSNRSMDEIVEQLDNNKQKLQAYSKRLRRYKKSNQRKADNNLFYNNQKLFYQKLSKDNIKIIQSPDITAVQSYWKNLWSKPVQHNTHTKWADIELEEMSKINPMAEINIDEEDVRLAIRKTLNWKAPGPDKIQNYWIKYLTATHKQLANSLNDLLHNPQKMPPFFTQGITYLKPKDHDTTDPTKYRPITCLPTIYKLLTSIITYKLNMHITQHKIIPEEQKGCCKGSRGCKEQLIIDSEIHNQVKQKHRNLYYSYIDYQKAFDSVPHSWLIHVLQIYQVDNSTIQFLQHAMSQWTTKLNLKTNNAVLNTSPIKIARGIFQGDSLSPLWFCLALNPLSRILNRTDYGHLIDKNNNIKLTHLLYMDDIKLYAANRNQLDQLLKLTEEFSNDIKMSFGISKCKINSIIHGQYKKTDSFNLEQHRGLIDSMEPKETYKYLGYHQSTAINDSEIKQTLKIKYKQRLNKILNTQLSARNKTKAINTYAVPILTYSFGIVKWTDTELNALNTATRVASYKHNIHHIHSSVERFTLKRKLGGRGFIDIRELHYLQIDNLRTYFLTKSKESSLHKAMVNLPHPGTPLQLYNSLYDPKLKLTKDTQKLENWKKKALHGKYPHQLEQDHIDKNASFTWLTKGNIFSETEGFLIAIQDQIINTRNYSKYILKQTIETDKCRLCQQTTETIDHITGGCSVLANKEYTYRHDNVAKHIHQQLAFKYKLLEQYTPYYKYKPKNVIENNIAKLYWNRDIITDRTILSNRPDITLTLKSTKTTYLIDISIPNTHNLKQKHAEKIQKYIPLSDEIKQMWHQETVRIIPVIISSTGVIP

SEQ ID NO: 1113 - protein, 1155 aa, Salatis canalis
MLPATTLAGKSRQRMKWTDQINRELLRCYYVVTHNETNLTAWRPLLHRRFAETIPELSHLTEQRLADQIRVIHKNNRIPASEREQMKQSVLSLIPSLNNLNDQIDTMNIETDQSNVNSTHTNKNHSLITDTHNQTLDHTLTLTEHTNTTTQAYQSFDRSEHIYTQDSETANRPLNPIDYKKIEDTFTELLIKYAGIDPTLRPTIPKLQITRNTIKTVNTINEIIAQYLQTKDTMTIEEIHEIIYCAAQTVTTIHTKHVEKVEISNNNNSSQPIVRQKKSQWEKRIENKIITLRKEIGQLTQYLNGNLTQKKQQKINPSNKNKDEILEKLDNYKQKLQAYSKRLRRYKKSNERKSHNKLFNTNQKLFYQKLSAEQIQITQSPDKNHIENYWKNIWSKPVQHNINASWTETEKQEMENKDIMPEITIDKNDVSQAIKNTLNWKAPGPDKIQNYWIKYLTATHEHIANTFNHLICNPIETPSFLTEGITYLKPKDNDTTNPAKYRPITCLPTIYKLLTSIISHKLNTHITQNQIIPEEQKGCRKGSRGCKEQLVIDIEIHNQVKQKHRNLHYSYIDYQKAFDSVPHSWLIDILKIYKVDSKLVQFLQHTMKNWTTKLSLRTNNTSLCTHKIKILRGIFQGDSLSPLWFCLAINPLSKILNKTSCGYVVDRDTDTKITHLLYMDDIKLYAADRQQLDHLIRLTENFSTDIKMNFGTDKCKINSIIKGQHKYTNRFELETQGGTIDSMEPRETYKYLGYQQSTSINHTDIKNTLKTKYKQRLNKILNTQLSARNKIKAVNTFAIPVLTYSFGVIRWSDTELEALNTATRTASNKHNIHHIHSAVQRFTLKRKLGGRGFIDIKNLHYTQIDNLRTYFLTKAKESALHKAIVHLSQSGTPLQLSNSQFDPKLKIIKDEAKIENWKKKALHGKYPHQLEQDHIDYNASCTWLTKGNIFGETEGFLVAIQDQIIKTRNYAKYILKESIATDRCRLCHQATETIDHITGGCSVLANKEYTHRHNNVAKHIHQQLALKYKLLESYTPYYQYKPKNVIENNIAKLYWDRDIITDRAILSNRPDITLTLKSTNTTLLIDISVPNTHNLKQKHTEKIQKYIPLADEIKQMWHQESVRIIPIIISSTGVIPKTLKNALKLLDLHEHTYIP

SEQ ID NO: 1114 - protein, 1337 aa, Atrytonopsis hianna
MRLRNRVLPQAGTHTGESRPGPSGSGRPTYSGGGTVSLRSAQSSTVAATDDNSSPLHHTTTSPISSTHSLFQSPSSSPQSYELHQSSPSTTTSPMSCDVAQEPLVNSLVPITDITHPTQILSNNLSNRVDRNIHNTPSSSLNSNTPARCVLQEMLPATTLAGKSRQRMKWTKEINIELLRCYYTVSLCETDMTAWRPLLYQKFIEQFPELSHISEQRLADQIRAIHRNNRIPTTEREYIKQNISQTLSSTNNINNTIEEVPSQGTPTVQNTSNIQQMQSQICDHQIITQTQTTRPLETSEHIQTQENEQTNTIITPTDYEQIENVFTEMIIKYTGTDPTLRPTIPKLQTTRQMIKTVNTINEIVDKYFQNKEIITLVEVHEVIYCAAITVATLHDKKSKKLIEHTSFTSNNKTDKQKEPQWKRRIMNKIASLRKEIGQLTQYLNGNLTNKKQLKVNPNNKNRQEIVDQLDTNKQKLQAQAKRLHRYNKSNQRKSDNILFKNNQRMFYQKLNSENIKVTQQPDIAEIQKYWENIWSKSVQHNTHTSWTEIEEQEMEKIEPMTEITISKDDVTHAIKRTLNWKSPGPDKIQNYWIKYLTSTHIHIAHTLNNIIQNPHEMPAFLTQAATYLKPKDNDTTNPAKYRPITCLPTIYKLLTSIITHKINLHITTNKIISEEQKGCSKGSMGCKEQLVIDAEIHNQVKVKNRNLYYAYIDYQKAFDSVPHSWLLHVLKIYKIDNNLIQFLQHAMTKWKTKLNLRTNTTTLISSYIKIARGIFQGDSLSPLWFCLALNPLSRILNSTTHGYIIDRENKIKLTHLLYMDDIKLYASNKQELDHLLKLTEKFSTDIKMTFGTSKCKISSVTKGQHNKTDSFELELQGGTIDSMEPKETYKYLGYQQSTSTNHGDIKNTLKTKYKQRLNKIFSTQLSARNVAKAVNTYAIPILTYSFGIVKWSDTELDALNTVTRTISNKHNIHHIHSALQRFTLKRKLGGRGFIDIKNLHYTQIENLRTYFIRKANDSTLHKAIVNMPHSGTSLQLNNKQFNPKTKILKEEQKIESWKKKALHGKYPHQLEQDHVDRNASTAWLTNGNIFSETEGFLVAIQDQIIKTRNYSKFILKETIETDKCRLCHRCTESIDHITGGCSVLASKEYSHRHDNVAKYIHQQLALKYHLTDTYTPYYKYKPKNVLENNNVKLYWDRDIITDRTILSNRPDITLKLKSLKTTYLIDIAVPNTNNLKQKHIEKVQKYTPLADEITQMWHQETIKIIPIVISSTGVIPKTLHTALKALDLHPKTYIPLQKSIILDTCSIVRRFLNPTSLMLGNAPDIINTQNHHSPSSQ

SEQ ID NO: 1115 - protein, 1291 aa, Paramimus stigma
MRLRSRQIPQAGTCKGESRPGPISPGCPTYSGGGNASHSTTQHYAVVVNKQPSGISPLQSSPTSSTYSLFQSPNSSLSSESDSITSRTNIVRPLSYDVAQDANANLPVPTIDNTNPTREPQKDKNSRVNTNSHVSLPNTNTPARSVLHQMLPATTLAGKSRQRMKWTDQINKELLRCYYVVTSNETNLTAWRPLLHQSFVEKFPELSHLSEQRLADQIRVIHKNNRIPITVRELIKQTTIINNQTPELNINVTSIRDTVQPNTHNNLHNLSYIGPISQLVTTSTTTQPHQVHDTQHTQFMTEQINLTTESQEPTDNFESNNNKTLANHEEQINIKDTFTEMLIKYSGTDPSLRPSIPKIQTTRYVIKTINLLNNLLHDHLNNKEIINLEEIHLVIYCAAKTIETVHCKDRNMSERSINTNRSNVRKPQWKLRLESKITILRREVGQLTQYIRGNLSQKKQKKLNPNNKSRDEILEQLDKCKQKLQAQSKRLRRYNISNQRKSHNKLFNTNQKLFFQKLNTEQIKITNIPNKRDLEQYWQDLWSKPVQHNTHSSWCALEEKQMTNIDPMPELKISKDDVAQAIRKTLNWKAPGPDKIQNYWIKYLPSTHTHIANTLNYLLNNPHEMPSFLTKGITYLKPKDNDTTNPAKYRPITCLPTMYKLLTSIITYKLNTHITYNDIIPEEQKGCRKGSKGCKEQLIIDTEIHNEVKQRHKTLYYSYIDYQKAFDSVPHSWLIHVLKIYKIDHTLIKFLEHAMKNWSTNLHLHTCESSLCTKPIKILRGLFQGDSLSPLWFCLALNPLSKILNGTSNGYVIDRSSNTKISHLIYMDDIKLFAANRQQLDNLLTLTENFSTDIKMTFGTTKCKINSIIKGQYKETNSFDLNIQGGKIDNMEAHETYKYLGYPQNTAISHADIKNTLKIKYKQRLQKILSTQLSARNKVKAVNTFAIPILTYSFGIIKWSDTELEALNTATRVASNKYNIHHIHSAVQRFTIKRKLGGRGFLDIKNLHYTQIENLRNYFLSKTNTHPLFRAIANLPHSGTPLQLNNKQFNPKTKIISDEQKMDNWKKKSLHGRYPHQIHQDHIDGKLSCTWLTKGNIFAETEGFLIAIQDQIIKTRNYSKYILKEAVETDKCRLCHQTTETIDHITGGCSILANKEYTHRHDNVAKHIHQQLALKYKLLKSYTPYYQYKPKNVLENSIAKLYWDRDIITDRTILSNRPDITLNLKSSKLTYLIDVAVPNTHNLKQKHTEKIQKYLSLADEIKQMWHQDSVRIIPIIISSTGVVPKTLKSAL

SEQ ID NO: 1116 - protein, 1240 aa, Dalla cyprius
MSSNVAREPLANTLVPINDTTNSTRGSNRDTNNIRVETNPNTTRSLITPTPSSHDTTTRNVLVEMFPATTLSGKIRQRMKWTDEINQQLLRCYYKVTNCEADLTACRFLLHHTFTEIYPELHHITQQRLSDQIRVIHKNNRISPSERLRIKQEVAGSILTQNVNSQINVSPTNSIPHTPHTLSTQAVGVVTTSDRSTQLPPTQEPTQNISDTDLNFETIENTFKENLLKYKNTDPTLRPTIPKLQISHSTIHTVNIVNNILHTYLQNIITLPIEELQEIIYCAALTITSLHMKPKKQNNNPNNTINKNKKGQKQPPWKTRLTTQIETLRKIIGRMTQYINGNLSQNKQRKINPKNMNIDQLTDELDKNKQKLSAYTKRLHRYENSNRRKADNNLFNNNQKLFYRSLNSDHIKITQTPDIVQVQQFWENIWSTPEEHNSDADFIILEQKETENLESMLPIVIDIEDVKYAVKKTHNWKAPGSDKLQNYWLKYLTATHNHLANALNKLIQEPHNMPKFLTHGITYLKPKDSDTSNPAKYRPITCLPTLYKLLTSIITHKLNTHISHNNIIPEEQKGCCKGSMGCKEQLVIDAEIHNQVKQKNRNLFYSYIDYQKAFDSVPHTWLIHVLKLYKIDDNLLNFLQHIMTTWTTTLNLHTDNGTLRTNPIKISRGIFQGDSLSPLWFCLAINPLSRILNKTNYGYTLDKQYKIKINHLLYMDDIKLYAANRQQLNHLLTLTEQFSKDIKMTFGIEKCKINCIIKGKYKKTDSHILTQHDGAISNMEFRETYKYLGYQQSTSINHTEIKNTLKSKYKQRLNTILKTKLSARNITKAVNTYAMPLLTYSFGIINWSETELNSLNILTRTTCNKHNIHHIHSALERFTIKRKLGGRGFIDIKTLHYTQVHKLRSYFYNKATDSPIHKAIVNLPTTGTTLKLNNAQYDPLKKIQTEEEKLENWKKKALHGKYPHQLEQPHIDKEASHSWLTKGNIFGETEGFLVAIQDQIIKTRNYSKYILKERIETDKCRLCHQATESIDHITGGCRALASKEYTYRHDNVAKHIHQQLALKHKLLQTYTPYYQYKPKNVLENHDAKLYWNRDIITDRTILSNRPDLTLTLKATKTTYLIDISVPNTNNLKLKFADKIQKYMPLADEIKQMWHQDTVRVIPIIISSTGIIPKTLLNALQLLKLPKRTYIPLQKSIVLDTCSIVRRFMNPSSLPLYNSEPDNYLSFIYNTRYIKYTYLTT

SEQ ID NO: 1117 - protein, 1374 aa, Aurina azines
MPRGGRTLDSTLLHNPNDQRSTSVKKYAMRLRNRTIPQAGTREGESRPGPSGSGCPTYSGGGNVSHKTAQPSAVVVENTSHITSRTPSPVPSNSSPYSLFQSPNSSPYSYIPSSSRSTTTTSSSCDVAQEVHANPLVPITDIISPTRATLNEASNRVTHNTQAFSPITNTPARSVLQDMLPATTLAGKSRQRMKWTDEINRELLRCYYIVTQNEVNLTAWRPQLHRRFAETIPELSHLSEQRLADQIRVIHRNNRISASEREQIKQSVSSLVTSSSSSNDHIVTNVERQPNIDTTHTTTITQQHTHTTQHNITQAYQPLENTIHIQTQESEISNTPISSIDYEKVENTFKEMVIKYIGIDPTLRPSICKPQITRNVIKTVNAINVIIGQYLQSKETITIEQIHDVIYCAAQTVARIHCKYDEKLENSNNNNNKCTIRENKPRWEKRIDNKIIMLRKEIGRLTQYLHGNLTQKKQQKLNPNNKSRDEIIDQLDDNKQKLQAYSKRLRRYKKSNERKAHNKLFNNNQKLFYQKLSAEQIKITQAPDKDDLLNYWRSIWSKPVQHNTHISWADIEEKEMENIDPMPEIVISKDDVSQAIKKTLNWKAPGPDKIQNYWIKYLTSTHEHIANTLNRLIGNPQETPSFITQGITYLKPKDNDTTNPANYRPITCLPTIYKLLTSIISHKLNTHITQNQIILEEQKGCSKGSRGCKEQLIIDSEIHTQVKQKHRNLFYSYIDYQKAFDSVPHSWLIQILKIYKVNNKLIQFLQYTMNNWKTKLSLRTNNTSLCTQHIKISRGIFQGDSLSPLWFCLALNPLSRILNKTDFGYIVDRDNNIKISHLLYMDDIKLYAASRQQLDHLLRLTERFSTDIKMIFGTNKCKINSIIKGQHKQTDPFELETHGVMIDSMEPKETYKYLGYHQSTSINHTDIKNTLKIKYKHRLHKIFNTQLSARNKIKAVNTYAIPILTYSFGVIKWSDTELEALNRVTRTASNKHNIHHIHSAVERFTLKRRLGGRGFIDIKNLHYTQIDNLRTYFLTKANESALHKAIVQLSQSGTPLQLSNRQFDPKLKILKDEQKIEKWKKKALHGKYPHQLEQDYIDNNASCSWLTKGNIFGETEGFLVAIQDQVIKTRNYSKYILKEAIDTDKCRLCNQTIETIDHITGGCSVLANKEYTHRHDNVAKHIHQQLALKYKLLESYTPYYQYKPKNVIENNTAKLYWDRGIITDRTILSNRPDITLTLKSSNTTFLIDIAVPNTHNLKQKHTEKIQKYIPLADEIKQMWHQETVRIIPIIISSTGVIPKTLKIALKLLDLHENTYIPLQKSIIIDTCSIVRRFLNPTTLTLQCDNPNTITHNTSNTQVTSRSTHTNTHESGYLA

SEQ ID NO: 1118 - protein, 1219 aa, Astraptes apastus
MKWTDQINRELLRCYYVVTHNETNLTAWRPQLQQIFSASFPELSHLSEQRLADQIRVIHRNNRIRGPERENIKQSVSLLLSNLPRSTDHSSTNNVEASINNSLTTNNAELTIHSPNHTLNPQHTFTPNHSYTQHSHIHPQRLNTTTRSYHCPENSEHNQTQDPVTTNISLDQIDYNKIQSTFAEMLIKYTGTDPTLRPTIPKLYTTRNTIKTVNTINEIVDIHLSSKNSVTLEEIHDVIYCAAQTTSKLFSKHANRPENNINRPSKLMKQKRPQWETRIQKKIITLRKEIGQLTQYLNGNLGRKKQQKLNPNNRNRSEIEEQLDNNKQKLLAYSKRLRRYKISNQRKSHNKLFHTNQKLFYQKINTEQIQVTQSPNSDDVYNYWKNIWSSPVQHNIHSSWNEIEFQELHNIEPIPEIVIDKEDISQAIKKTLNWKAPGPDKIQNYWIKYLPATHEYMANTFNHLFNHPQDIPTFLIHGITYLKPKDTDTSNPAKYRPITCLPTIYKLLTSIISYKLNTHVTQNHIIPEEQKGCSKGSRGCKEQLIIDTEVHNQVKHKHRNLYYAYIDYQKAFDSIPHSWLIEILKIYKVNVKLIELLQFMMKNWTTKLSLRTNNTAICTHPIKILRGIFQGDSLSPLWFCLAINPLSRLLNNTGYGYVIDRKSNIRLTHLLYMDDIKLYAANRQQIDHLLKLTEKFSTDIKMTFGTNKCKINSIIKGQHKETQPFELEMQEGAIGSMEPKETYKYLGYQQSISINHTHIKNTLKTKYKQRLHKILNTQLSARNKVKAVNTYAIPILTYSFCIIKWSDTELESLNTITRTASNSHNIHHIHSAIQRFTLKRKFGGRGFIDIKNMHYTQIDNLRTYFLNKANESDLHRAITQLAQGGTPLQLNNIKFDPKLKIIKDDQKIENWKNKALHGKYPHQLEQDHIDYNASCSWLTKGNIFGETEGFLVAIQDQIIKTRNYSKYILKEAIATDKCRLCHQTTETIDHITGGCSVLANKEYTHRHDNVAKHIHQQLALKYKLLNSYTPYYQYKPKNVLENNTAKLYWDRDIITDRTILSNRPDITLTLKSSKTTFLVDIAVPNTHNLKQKHTEKIQKYIPLADEIKQMWHQETVRIIPIIISSTAVIPKTLKIALKILDLHENTYIPMQKSVVIDTCSIVRRFLNPTSLTLQTYQDTHYNTATQNSSTHNTTQNTQTHTQNSQNALIIIHSNRPVHP

SEQ ID NO: 1119 - protein, 1350 aa, Ebrietas anacreon
MRLRNREIPQAGTSRSREEESRPGPSSSGCPTYSGGGNVSRMTAQPPAVADNKSSSPNTHLLSSSPISSTQSLFHSPVSSPQSYELQRPQSDSSFTSHTSCDVAQVAFAYSPEPTTGISNPTRAVHHETSNRVNHHIISSTSNTNTPARSVLRDMLPATTIAGKCRQRMKWTDPINTELLRCYYLVTNNEMDLTCWRPLLRQMFTETYPELSHLSEQRLADQVRVIHRNNRIPLHEREKIKNTISLLLHSTNSLNSQSYTNISQHESITLSTHSTEEFHLSTQSLSNELNTYHTVVTTQQINTTTQTYDNIEHIQTPVSDATDKQQESIHKEVIENTLTEMLVKYKGTDPTLRPIIPKLQISHRAIKTITNTNKIVSKYLQSLETVTLEEIHDIIYCAAQTITKLHGKYTEQTNTYNNNNNEIKNFKGQKHKWEKRIEGKITTLRKDIGQLTQLLKGNLSHKKQKKLNPSNKNIDKIVEELDNNKQKLQAYSKRLRRYRVSNQRKSDNKLFNTNQKLFYQKLHKEQINITQPPKPEDIHNYWKSLWSKPVQHNIHTSWNEIEEREATDIGQMTEIDVKKEDITHAVRKMLNWKAPGPDKVQNYWIKYLTATHEYLANTFNHLIQNPQEIPSFLTQGVTYLKPKDHDTTNPAKYRPITCLPTIYKLLTSIIAQKLNTHITVNKIMTEEQKGCNKGSRGCKEQLIIDSSIHSQVKQKHRDLFYSYIDYQKAFDSVPHSWLIYILKLYKVDNKLIKFLQHTMNHWSTTLSLRTQNMSLSTHPIKILRGIFQGDSLSPLLFCLALNPLSKILNKTGYGYVIDRDKNIKLSHLLYMDDIKLYAANRQQLDHLLRITEQFSADIKMTFGIDKCKINSIVKGQYNKTEVLDLHEQEGIIDSMNAKEVYKYLGYAQSTSINHTDIKNTLKNKYKCRLRSILNTQLSARNKVKAINSYAIPILTYSFGIIKWSDTDLEALNILTRSTCNKHNIHHIHSATQRFTLKRQLGGRGFIDIKNLHYTQIDNLRTYFYKKINESALHNAIVNLAQTGTPLQLNYKEFDIKLKILSDDKKIENWKNKALHGRYPHQLQQDHIDQEASCAWLTKGNIFGETEGFMVAIQDQVIKTRNYTKYILKQTIETDKCRLCHQNTENIDHITGGCSVLAYKEYTHRHDNVAKHIHQQLALKHKLLDTYTPYYQYKPKKVIENSTAKLYWDRDIITDRTILSNRPDITLTLKHSKTTYLIDIAVPNTHNLKQKHTEKVQKYISLADEIKQMWHQETVTIIPIIISSTGVIPKSLKSALKLLDLHENTYIPLQKSIIIDTCSIVRRFFNPTTLTFQDEHPTNHNIQNLTSLNTT

SEQ ID NO: 1120 - protein, 1387 aa, Dyscophellus porcius
MPREGRTLASTLLHNSSDQRSYSSYKYAMRLRNRQIPQAGTREGESRPEPSSSGCPTYSGGGNVSHRTTQTRTVVVEKTSSHHPSSPTTSTSTPSLFQSPSSSPHSYQLSHSSFSSSSTLTTPLSSDVAQEAHAYSPVPTTDSTNPARVSQSNFDCRVNHNTHSLTHINNTQARSVLQDMLPATTLAGKSRQRMKWTDQINRELLRCYYVVTHNETNLTAWRPLLHQKFSESIPDLRHLSEQRLADQIRVIHRNNRIPVHEREEIKHLVSSQIFTTNENNDCINTNDQDHSSTLHTIPITNNYERTTDSLSHTQNPRTTLTTTHQTNIITQTFENSEHNQTQDPEVRNRPLDTIDFLKIESTFTEMLIKYTGSDPTLRPTIPKLYTTPNIIKTVNIVNEIINMHLKAKTIIGLEEIHEVIYCAAQTVTKIHTEHLNKIDNRTNDNINTVFKQKKPHWERRIESKICTLRKEIGQLTQYLNGNLTQKKKQHKLNPYNKNRDEITLLLDNSKQKLQAYSKRLRRYNISNQRKSHNKLFNTNEKLFYQKLNAEQIQIEQAPDKAEIENYWKSLWSKPVQHNTHAPWTEIENQEMDNVDPMPKITINKDDVSHTIRKSLNWKAPGPDKIQNYWIKYLSATHEHLANAFNHLINNPQDTPNFLTQGITYLKAKDNDTTNPSKYRPITCLPTIYKLLTSIIAHKLNTHITNNKIIPEEQKGCCKGSRGCKEQLVIDTEIHNQVKQKHRNLYYAYIDYQKAFDSIPHSWLLHILHIYKVDFTLIQFLENVMKNWTTRLSLRTNNTSLCTHPIKISRGIFQGDSLSPLWFCLAINPLSRILNKTGYGYVIDRDTKITLTHLLYMDDIKLYATNRQQIDHLLHLTEKFSTDIKMTFGTNKCKINSTIKGQHKETESFELETQGGKIDSMDAKETYKYLGYQQSTAINHTDIKNTLKTKYKQRIHKILNTQLSARNKVKAINTYAIPILTYSFGIIKWSDTELEALNTITRKASNTHNIHHIHSAVQRFTLKRKLGGRGFIDIKNLHYTQIDNLRNYFLTKANESSLHKAIVQMPQSGTPLQLNNSQFDPKYKILRDEHKMEQWKKKALHGKYPHQLAQDHIDYNASCTWLTKGNIFGETEGFLVAIQDQVIKTRNYSKYILKEPIQTDKCRLCHQTTETIDHVTGGCSILANKEYTHRHDNVAKHIHQQLALKHKLLSTHTPYYQYKPKRVLENNTAKLYWDRDIITDRTILSNRPDITLTLKDSKTTYLIDVAVPNTHNLKQKHTEKIQKYIPLADEIKQMWHQEAVRIVPIIISSTGVIPKTLKTALKLLDLHENTYIPMQKSIVIDTCSIVRRFLNPTSLTLQNNQIPDTDTTQNATTHNTQNHLRNTLNIYH

SEQ ID NO: 1121 - protein, 1331 aa, Emesis castigata
MSLNSAQSRTVAGNNQTIQTSSYSFSPTSSSQSISVTTDSSPNRYQHHYTFPSPTSSISYWSCDVAQDLLPYPPVPTTDNINSTRLRLINSPNCVDNEILQSTLDSNSPVRNVLQDIMPATTLAGKSRQRMKWTNNINKDLLRCYYIVTKCEKDLTGYRHSLHEKFTEIYPELQHVSEQRLADQIRVIYKNNRIAQPERERIKYTVTQMLSTSTNIHVERNDSTEIQAATSTLSISREQPTTHVPLIAESSQELIYIGTQQSDITTQPSPSTILENSEHNIQTFDSQISTKNLAKINYETIINTFKEMLIKYTGTDPTLRPPIPKIQTTCNTIKTVTIINDIVGKHLQAMNTHTLEELHEVIYSAALTVTTIHTNREANSDLHTTKNKTHKNNKSPWEKRLDSKIEELRKEIGQLTQHLKGNLSYKKQLKLNIYNKNGDEIINILDNHKQKLQAYSKRLRRYKKSNQRKSDNNLFNTNQKLFYQRLNPNTIKIAQPPDIETIHTYWKNIWSKPVKHNTHTPWTDIEEQEMSNIGEMSKIVIDEQDIASSVRKTLNWKAPGPEKIQNYWLKYLTTTHKYIASTLNDIILNPQKMPTFLTQGITYLKPKDNDTTNPSKYRPITCLPTLYKLLTSIIANKLNTHISHHNIIPEEQKGCCKGSKGCKELLVIDTEIHNQVKQKHRNLYYSYIDYQKAFDSVPHSWLIHILKIYKIDNNIIQFLQYTMTKWTTKLTLKTPDKTLYTQPIKIARGIFQGDSLSPLWFCLSINPLSRILNRTDYGYKIDRYNNIKLNHLLYMDDIKLYAGTRNQLDQLLRLTEQFSTDIKMTLGVDKCKINSINNGQYKQTDSFNLELHGGLIESMEPKDTYKYLGYYQDTCINNSDIKNVLKNKYKQRLQKILNSQLSARNKTKAINTYAIPILTYSFGIIKWSDTELNALNRATRVASYRHNIHHIHSSVERFTLKRKLGGRGFIDILDLHYSQIDNLRSYFFTKANNSALHNAIINTAHSGTPLQFNNSSFDPKLKRTSDTQKLENWKKKALHGKFPHQLDQNHIDTSASYNWLTKGNIFGETEGFMIAIQDQVIKTRNYSKYILKENMETDKCRLCHKNTETIEHITGSCSVLAYKEYTHRHDNVAKHIHQQLALKHRLVNDYTPYFKYKPKNVLESDTIKLYWNRDIITDRTILSNRPDITLTLKAQKITYLIDISIPNTHNLQQKHTEKIQKYIPLADEIRHMWHQQTVTIVPIIISSTGVIPKTLNKSLRLLDLHDNTYIPLQKSIVLDTCAIVRRFLNPTTLSLQNTQNMLNSHHNSNSRTNTHLTFHNTYTDTQNTEDP

SEQ ID NO: 1122 - protein, 1334 aa, Charidia lucaria
MRLRNRTIPQAGTHKGESRPGPSNPGCPTYSGEGNVSHVTAQSETVVVNKPSSHISNASSPTSSTHSLFQSPNSSSQTYDLLSHSSTNTSLSCDAAQEGNAYSLVPITDNTNNARALQNITDNRANHSHHSSTPNINTPARSVLQDMLPATTLAGKCRQRMKWTDQINRELLRCYYIVTNNESNLTAWRPLLQQSFIEKFPELSHLSEQRLADQIRVIHKNNRIPISERQLIKQTISNDQTPELNVNFTSITDNIQPNIHIQIHNNLHSLPYITPLSQLASTTPQPHQVSDSGNSQPIIEQINSTTESVGPTESSENNHDKTLANLEEQIKIKDIFTEMLIKYSGTDPTLRPSIPKIQTTRYVIKTINFINKLMHDHLNNKEIINIEEIHLAIYCAAKTTAILHCKYMNMSESETNRCNVRKPQWKVRLESKITILRKEIGQLTQYIRGNLSHKKQKQLNVSNKSRDEILDQLDKCKQTLQAQSKRLRRYNISNQRKSHNRLFNTNQKLFYQKLNTEQIKVTDIPNKHDLEQYWQDLWSKPVQHKTRSSWILEEENIENIELMQEFKINKDDVTQSIKKTLNWKAPGPDKIQNYWIKYLPSTHLHIANTFNNIINNPHELPPFLTQGVTYLKPKDNDTINPANYRPITCLPTLYKLLTSIIAHKLDTHLIDNDIIPEEQKGCRKGSKGCKEQLIIDSEIHNEVKQKRKNLFYSYIDYQKAFDSVPHSWLLHVLNIYKIDNKLINFLQHAMKNWTTHLHLQTNESLLRSKLIKISRGIFQGDSLSPLWFCLALNPLSKILNKSNNGYVIDRSSNIKITHLLYMDDIKIFAASRQQLENLLSITENFSTDIKMRFGTTKCKINSIIKGQHKETESFNLSTQGEKIDSMKAHETYKYLGYHQGTAISHSDIKNTLKVKYKQRLHKILNTQLSARNKVKAVNTYAVPILTYSFGIIKWSDTELEALNTVTRVASNKYNIHHIHSAVQRFTIKRKLGGRGFIDIKNLHYTQIDNLRNYFLTKAAKHPLFRTIVNFPHSGTPLHLNNSQFNPNLKIVSDEQKIDDWKKKALHGRYPHQIQQDHVDRSSSCFWLTKGNIFSETEGFLIAIQDQIIKTRNYSKYILKESIETDKCRLCHQTTETIDHITGGCSVLANKEYTHRHDNVAKHIHQQLALKYKLLTSYTPYYQYKPKNVLENSIAKLYWDRDIITDRTILSNRPDITFTLKSAKITHLIDVAVPNTHNLKQKHTEKIQKYMSLADEIKQMWHQDSVRIIPIIISSTGVVPKTLKNAFQLLELPENTFIPLQKSIILDTCSIVRRFLNPTSLTLETGDVENETQIT

SEQ ID NO: 1123 - protein, 1374 aa, Astraptes hopfferi
MRLRNRQIPQAGTREGESRPGPSGSGCPTYSGGGNVSHITTQSHTVVVENSPTHITTYTSSPTSSTHSLFQSPSSSPHSYQLHHSSSRSTTITPLSCDVAQEAHANSPVPTTDITNPARVSVNNVHNRVNHNTHSSSSFTNPPARSVLQEMLPATTLAGKSRQRMKWTDEINRELLRCYYVVTHNETNLTAWRPQLHQKFSASFPELNHLSEQRLADQIRVIHRNNRVTGAEREQIKQSVSLLLSNLRRSPNHTSSNIVEDSHTSNNFELNTHSNNQTLDPQNSLTPNYPYTRHSHMHSQQINITTQTNNSPENTERNQTHNPETTRTPLDPIDYNKIENTFAEMLIKYAGTDPTLRPPIPKFQTTRNSIKTVNTINEIVDIHLKTKNSVTLEEIHEVLYCAAQTTVTLHTKHDKKIENNNNNNSKKELIKQKKPRWETRIEKKIITLRKDIGQLTQYINGNLSQKKQQKINPNNKSKTDIIEQLDHHKQKLQAYSKRLRRYKISNQRKSHNKLFNTNQKLFYQKINTEQIQITQNPNIDDVHNYWTNLWSNPVLHNAHHSWDEIEHEETQNIEPMSEIYIDKEDVSQAIKKTLNWKAPGPDKVQNYWLKYLPATHEYIANTFNHLLNNPQDTPSFLTHGITYLKPKDNDTTNPAKYRPITCLPTIYKLLTSIISIKLNTHITQNHIIPEEQKGCSKGSRGCKEQLIIDTEIHNQVKQKHRNLYYAYIDYQKAFDSIPHSWLIQVLKLYKVNVKLIEFLQDVMKNWTTKLSLRTNNTSTCTHPIKILRGIFQGDSLSPLWFCLAINPLSRILNNTGYGYVIDRGSDIRLTHLLYMDDIKLYAASRQQIDHLLRLTEKFSTDIKMTFGTNKCKINSIIKGQQKETHQFELETQGGTIDSMEPKETYKYLGYQQSTSINHTHIKNNLKIKYKQRLHKILSTQLSARNKVKAVNTYAIPMLTYSFGIIKWSDTELEALNTTTRTASNSHNIHHIHSATQRFTLNRKYGGRGFIDIKNLHYTQIDNLRTYFLAKAKESKLHKAISQLAHPGTPLQLNNSEFDPKLKILNDNKKIENWKKKALHGKYPHQLEQDHVDRNASCSWLTKGNLFGETEGFLVAIQDQIIKTRNYSKYILKEAIETDKCRLCNQTTETIDHITGGCSVLANKEYTHRHDNVAKHIHQQLALKYKLLKLYTPYYQYKPKNVLENSVAKLYWDRDIITDRTVLSNRPDITLTLKSSKTTLLIDIAVPNTHNLKQKHTEKIQKYIPLADEIKQMWHQENVRIIPVIISSTGVIPKTLKTALKVLDLHENTYIPMQKSVVIDTCSIVRRFLNPTTLTLQAYQDSQFNVAIHNSSTHDITHNTQTHIQNSSHAHHISH

SEQ ID NO: 1124 - protein, 808 aa, Apodemia virgulti
MEQIIIGEEDVTSSIKTTHNWKAPGSDKIQNYWLKHLTATHKYIASTFNDLIRNPQKIPKFLTQGVTYLKPKDHDTNNPSKYRPITCLPTIYKLLTSIIAHKLTSHISHHKIIPEEQKGCCKNSRGCKELLVIDSEIHSQVKHKHRNLYYSYIDYQKAFDSVPHSWLLHVLKIYKVDSNIIKFLQQAMTKWTTTLNLKTCDKTLSTSPIKIARGIFQGDSLSPLWFCLALNPLSRILNRTDYGYNIDRVNNIKITHLLYMDDIKLYAASRNQLDQLLRLTEQFSNDIKMTLGTDKCKVNSIIKGQHNQTQPYHLELNRGLIESMELTDTYKYLGYQQNTAITQPDIKNSLISKYKQRLNKILNTQLSARNKTRAVNTYAIPILTYSFGIIKWSDTELNALNTATRIACYRHNTHHIHSSVERFTLKRKHGGRGFIDINSLHYSQIENLREYFYTKSQESSLHKAIVNISNLGSPLQLNNRQFDPKQKIISDVQKLENWKKKALHGRYPHQLDQDHIDKDASCSWLTKGNIFGETEGFLLAIQDQVIKTRNYTKYILKQTIETDKCRLCHQTTETIDHITGGCSVLANKEYTHRHDNVAKHIHQQLALKFKLLDSYTPYYKYKPKNVLENNIAKLYWNRDIITDRTILSNRPDITCTLKSTKTTYLIDISIPNTHNLKQKYTEKIQKYISLADEIKQMWHQETVTIIPIIISSTGVIPKTLEKSLRILELHKNTYVTLQKSTILDTCAIVRRFLNSTSLALQNTQNTNTNTNHLINTHTSIRDSQHTFAQYLHAPITPYTNTSQSEPNI

SEQ ID NO: 1125 - protein, 777 aa, Timochares trifasciata
MAEININKDDITHAMRKTLNWKSPGPDKIQNYWIKYLPATHEYLANTFNYLIHYPQETPTFLTQGVTYLKPKDHDTTNPAKYRPITCLPTIYKLLTSIISHKLNTHLTHNKIMTEEQKGCYKGSRGVKEQLIIDAAIHDQVKHNHRNLFYAYIDYQKAYDSVPHSWLVYILKLYKVDNRLIQFLQHAMSLWTTKLSLKTHNTSFLSHPIKILCGIFQGDALSPLWFCLALNPLSKILNKTGYGYTIDRNESIKLTHLLYMDDIKLYAANRHQLDHLLRITEHFSADIKMTFGIDKCKINSIVKGQYNKTEVFDLSKQQGTIDSMAAKEVYKYLGYAQNASINHNDIKNTLKNKYKHRLHSILDTQLSARNKVKAINSYAIPILTYSFGIIRWSDTELEAFNIMTRSACNRHNIHHIHSATQRFTLKRKLGGRGFIDIKNLHYSQIDNLRTYFYTKSNTSALHKAIVNLPQAGSPLHLNDRHFDPKFKILSDDEKIENWKNKALHGRYPHQIQQNHIDHDASCAWLTKGNIFGETEGFLIAIQDQVIKTRNYMKYILKQTINTDKCRLCHLKTENIDHITGGCSVLANKEYTHRHDNVAKHIHQQLALKHKLLDTHTPYYQYKPKKVIENSVAKLYWDRDIITDKTILSNRPDITLTLKSTKTTFLIDIAVPNTYNLKQKHTEKIQKYTSLADEIKQMWHQETVKIIPIIISSTGVIPKSLKTAFKLLDLREDTYIPLQKSIILDTCSIVRRFLNPTTLTLQDEQSTATQNSSTLHAI

SEQ ID NO: 1126 - protein, 1370 aa, Aethilla lavochrea
MRLRNRQIPQAGTREGESRPGPSSSGSPMYSGGGNASHMTAQPQTAAVDKPSPYITTNPSSPISSTQSLFQSPGSSPHSYEFEHSPSRTTTITPLSDDVAQEAQANSPVPTTDINPTRTSQIISDNRVKHNTNSLTPNINTPARSVLQDMLPATTLAGKGRQRMKWTDQINRELLRCYYVVTHAETSLTAWRQQLHQKFTESIPELSHLSEQRLADQIRVIYRNNRISATDREDIKQSVSLLLSTLNSSNHNITPNNTIQTNNHQQSIIQSPLTSTDNATPTANTHQHVQTFNTQHALPIPQANITPRTYQAMEHFETQKLEAGNILEDEISYNKIENTFTEMLIKYNGTDPTLRPTIPKLQITRSSIKTVNTINEIIDKHLRNKETLILEEIHEVIYCAAQTITTLHSKYKNKQDNKIIDHNHSIDKQKKPQWEKRLENKISMLRKEIGQLTQYLKGNLTPKNQQKVNPNNRSNDEITEYLDKCKQKLQAHSKRLRRYKLSNERKLHNKLFSTNQKRFYQNLNAENIHITHPPNKDELQNYWQNLWSKPVRHNKHSSWTEIEEQEMANIDPMPEIAIDKENVSLAIKKCLNWKAPGPDKIQNYWIKYLSATHKYIADSFNHIIHNPQDIPSFLTQGITYLKPKDNDTTNPANYRPITCLSTVYKLLTSIISHKLNIHITKNQIISEEQKGCRKGSKGCKEQLIIDAEIHNQIKQKHRNLFFSYIDYQKAFDSVPHSWLIHVLEIYKVDNKLINFLKHTIKNWTTKINLHTNETLLSTQTIKITRGIFQGDSLSPLWFCLALNPLSRILNKTGHGYVIDRDNDIKITHLLYMDDIKLYAANRQQLDDLLTLTEKFSTDIKMTFGINKCKVNSIIKGQYRETESFRLTLQGGKIDSMEPTETYKYLGYQQSTTINHTNIKNTLKSKYKQRLHKILNTQLSARNKVKAINTYAIPILTYSFGVIKWSDTELHALNTLTRTLSNKHNIHHIHSAVQRFTLKRKLGGRGVLDIKNLHYTQIDSLRTYFILKSHENSMFKAIVNLPQAGTPLQLNNNQFNPKHKIVNDEDKIDTWKKKALHGKYPHQLQQDHVDRNASCSWLTKGNIFSETEGFIIAIQDQIIKTRNYSKFILKETIVTDKCRLCNQTTETIDHITGGCNVLANKEYTHRHDNVAKHIHQQLALKHKLLETYTPYYQYKPKSVIENSNAKLYWDRDIITDRTILSNRPDIVLTLKSSKTTYLIDVAIPNTHNLKQKHNEKIQKYIPLADEIKQMWHQESVRIVPIVISSTGIVPKALKTALQLLELHENTYIPLQKSVIIDTCSIVRRFLNPTSLAFQQNDQDTPPNPITHNTSTNTYNTTHNTTNAHITHSTSS

SEQ ID NO: 1127 - protein, 1246 aa, Epargyreus spanna
MLPATTLAGKSRQRMKWTDQINRELLRCYYVVTHNETNLTAWRPQLHQQFAVSFPELSHLSEQRLADQIRVIHKNNRLTFIEREHIKQSVSLILSASNTSNDCAITSNIQTPLNTSPTINNFGLITHSSSQALNPQHTQSLNQAHSQHTHTQHSHTHSLPINTSTQTSQAPRNSEHSQTQEPQRTMRPLDPIDYDTIENTFSEMLIKYTGTDPTLRPPILKLQTTRYTIRTINTVNEIVDKHLNTKNSVTLEEIHTVIYCAAQTVATLHTKHIKKSVSNNSNYNPNTIIKQKKPQWEERIEKKIITLRKEIGQLTQYLNGNLTQKKQNKLNPNNRSRNEIIEQLDNNKQKLQAYSKRLRRYKISNQRKAHNKLFNTNQKLFYQKFDTEHIQVTQNPNKDDIYKYWKNIWSKPVLHNTHLSWTEIEDEEINNIEPMAQIIIDKDDVCQAIRKTLNWKAPGPDKIQNYWIKYLPATHKYIANAFNYLMNNPQDTPTFLTQGITYLKPKDNDTTNPSKYRPITCLPTIYKLLTSIISFKLNTHITQNHIIPEEQKGCSKGSRGCKEQLIIDTEIHNQVKHKHRNLYYAYIDYQKAFDSIPHSWLIQVLKIYKVDIRLIEFLRNTMNNWTTKLSLRTNNTSINTQPLKILRGIFQGDSLSPLWFCLAINPLSRILNKTGYGYVIDRESDIRLTHLLYMDDIKLYASSRQQIDHLLKLTENFSTDIKMTFGTNKCKINSIIKGQQKETDPFELQTQGGRIDNMEPKETYKYLGYHQSTSINHTHIKNTLKTKYKQRLHKILNTQLSARNKVKAINTYAIPILTYSFGIIKWSDTELEALNTITRKASNTHNIHHIHSAIQRFTLKRKLGGRGFTDIKNLHYTQIDNLRTYFLTKAKESDLHKAIVHLNISGTPLQLNNSEFDPKHKILKDEQKIENWKKKALHGKYPHQLEQEHIDYNASCTWLTKGNIFGETEGFLVAIQDQIIKTRNYSKYILKEAIDTDRCRLCHQTTETIDHITGGCSVLANKEYTHRHDNVAKHIHQQLALKHKLLESYTPYYQYKPKNVLENNTTKLYWDRDIITDRTILSNRPDITLTLKSTKTTFLIDIAVPNTHNLKQKHTEKIQKYIPLADEIKQMWHQETVRIIPIVISSTGVIPKTLKTALKLLDLHENTYIPMQKSIVIDTCSIVRRFLNPSTLTLQTHQDTLPNTATQNTSTRTTTHNTQTNTHNTPNTLITTHSNHTNIHESGYLA

SEQ ID NO: 1128 - protein, 816 aa, Parapoynx stratiotata
MPVQHNTSTSWAEIEEEETRDIETMPEIIITKDDITQAIKKTMNWKAPGPDKIQNYWIKYLPSTHEYLAKIFNDIIQNPQDMPDFMTQGVTYLKPKDNDTTNPSKYRPITCLPTLYKLLTSIISQKLNMHVTQNKIIPEEQKGCIKGSRGCKEQLVIDTEIHNKVKQSHGNLFYSYIDYQKAFDSVPHSWLIHILYRYKVDNKLIHFLQCAMNNWITKLSLKTNDSTLSSKPIKIKRGIFQGDSLSPLWFCLALNPLSRVLNKTVSGYTIDKQNNTKLTHLLYMDDIKLYAANRDELNHLLQLTDKFSSDIKMTFGTNKCKINCIIKGKHSRLEPFNVEQQGGIIDSMDPKESYKYLGYQQTTSINHTEIKNNLKAKYKQRLNKLLNSQLAARNKIKAINTYAIPILTYSLGIIKWSETELEALNIATRTACYKHNIHHIHSAVQRFTLKRKLGGRGVIDIKNLHYKQIDNLRTYFLKKAKESELHRAIANLPYSGTPLQLNNGQYDPKLKIITDEKKIELWKTKALHGKYPHQIEQDHINRTASCTWLSKGNIFGETEGFLIAIQDQIVKTRNYSKYILKENIATDKCRLCHQTTETIDHITGGCSILANKEYTHRHDNVAKHIHQLLALKHKLLDTYTAYYKYNPKNVLENNSAKLYWNRDIITDRTMLSNRPDITLTLKTTKITYLIDIAVPNTHNLKQKHTEKIQKYIPLAEEIKQMWHQDAVNIIPVIISSTGVIPKNLSVALKQLDLHENTYIPLQKSIIIDTCSIVRRFLNPTTLLRQNNEQTDTLDTLTHTNLVHHTTQSHTTQLNTT

SEQ ID NO: 1129 - protein, 1364 aa, Ypsolopha scabrella
MRLRSRNILPQAGTSNGESRPEPTSSGSPTYSGEGNVLLHPAQSSTVAGQENNTPSPDMLSYASSPISSTHSLFQSPSSSPYDFQLTSTSRSTTISPMSCDVVQEALAICPAPITGIMNPTRTSETNSHSNRVDTNTERHATDTNTPARSVLQDMLPATTLAGKSRQRMRWTNQINHELLRCYYMVTNCEENLTAYRPLLHQKFTETFPELSHLTEQRLADQIRVIYRNNRIPASEREIIKQALLQTITTLDNPNTNNFETQVNTNNNDVIYNQFQNSHTLEPTDNTQQTIASTPQPIIMTLSDNEITTESASVAFQETYEHTQSQGPEIDITSEESINYQKIEDTFTEILIKYTGTDPTQRPIISKIQTTRKVIKTIKTVNEIINKHLQNKEDVTIVEIHEIIYCAALTVTTYTNSTNKGKKKEHNKTNTNINQANKKKTPQWQKRLENKIAILRKEIGRLTQYLNGNLTQKKQQKLNPNNKSRDEIVNELDNYKQKLQAYSKRLRRYKISNQRKSDNNLFNTNQKLFYRKLNSDQIEITESPNIDEVKHYWENLWSNPLQHNSHSSWAKIEEQEVDNIDPMPEISINIDDVTYAIKNTLNWKAPGPDKIQNYWLKYLTSTHKYIASTLNHLLHNPQDIPPFLTQGITYLKPKDNDTTNPAKYRPITCLPTIYKLLTSIISHKINSHLTSNKIIPEEQKGCSKGSRGCKEQLVIDTEIHNQVKKKHRNLYYSYIDYQKAFDSVPHSWLLHVLKMYKIDNRLIQLLEYAMTNWKTKLNIRTNNTTLSTPSIKIARGIFQGDSLNPLWFCLALNPLSRILNKTGYGYNIDTGNDIKLTHLLYMDDIKLFAANRQQINHLIRLTKEFSRDIKMTFGTDKCKINSMIKGQHKETDPYILEQQTGTIDSMEPKETYKYLGYQQSTSIDHTEIKNSLKTKYKQRLSKILKTQLSARNKTKAINTYAIPILTYSFGIVKWSDTELEALNTTNRTTCNKHNIHHIHSAMQRFTLKRKLGGRGFIDIKNLHYTQIINLRSYFHTKANESAIHKAIVNLPQPGTPLQLNNSQFEPKHKITTDEQKLGNWKKKALHGRFPHQLDQEHIDRTASCTWLTKNNIFGETEGFLIAIQDQIIKTRNYSKYILKETIETDKCRLCNLASETIDHITGGCSTLANKEYTHRHDNVAKHIHQQLALKYKLLQSYTPYYQYKPKKVIENSSAKLYWDRDIITDRTILSNRPDITLTLKSTKTTYLIDISVPNTHNLKQKHAEKIQKYIPLADEMKQMWKQETVKIVPIIISSTGIVPKTLKKALELLDLPIKTFIPMQKSIVIDTCSIVRRFLNPTSLPLLTNHTTPHINTTHSMPPNTQEM

SEQ ID NO: 1130 - protein, 1206 aa, Blastobasis lacticolella
MRRSTRIKNKNSAQCSTAAENGSAGNSSPISSRQRMKWTDLINRELLRCYYTVTQCETNLTAYRPLLHKMFIETFPELHHLSEQRLADQIRVIHRNHRISLAERERIKQLVSLSVTEEIADTVHDTSLIDTLSPPIDSEITTGNYATHNVSVNAEQYATSTQQTVTIEDIDTYTQTTEPESLHLNFNTIEDTFTEMLIKYSHTDATLRPTIPKLQITRKSIKTVNTVNDILHKHLENRETVDIDNIHEVIYCAAMTVTTLHAKPKNKVNSNIHTANSTESSNSNKDKKQQWEKRLENKITILRKEIGQLIQYLNGNLTQRKQRKLNPNNQSKDEIVNQLDTYKQKLQAYSKRLRRYKLSNQRKSDNNLFRTNQELFYRNLNTENIHISQPPNIKDVQDFWENIWSKPVEHNRNTPWSRIEEQDASNIEPMAEVFISKDDVTQAIMKTLNWKAPGPDKIQNYWIKYFTSTHEYIANAFNHLLHNPQDTPSFFTQGITYLKPKDDDTTNPAKYRPITCLPTIYKLLTSIISHKLNHHIAHNNIIPEEQKGCSKGSMGCKEQLVIDTEIHNQVKQKKRNLYYAYIDYQKAFDSVPHSWLIEVLKMYKTDNGLIQFLQYTMANWTTTLNIHTSNKTINTEHIKISRGIFQGDSLSPIWFCLALNPLSKILNGTDYGYNIDRENTNKLTHLLYMDDIKLYAANRQQLDHLLKLTEDFSRDIKMTFGTDKCRINSIIKGQHKDTEPYDLEQQLGKIDNMEPRETYKYLGYLQSTSINHTEIKSGLKTKYKQRLTKILKTKLSARNKTKAVNTYAIPVLTYSFGIIKWSDTELEALNTLTRTTCNKHNMHYIHSAVQRFTLKRKLGGRGFTDIKNLHYTQIDNLRTYFQTKANQSTLHKAIVNITTSGTPLQLNNSQFDPKQKFLQDNQKIENWKKKAIHGKYPHHLDQDHVNRTASCTWLTKGNLFSETEGFLIAIQDQIIKTRNYSKYILKEAITTDKCRLCHQTTETIDHITGGCRILANKEYTHRHDNVAKHIHQQLALKHNLLETYTPYYKYKPKKVLENNTTKLYWDRDIITDCTVLSNRPDITLTIKSIKTTYLIDVSVPNSHNLKQKHTEKIQKYIQLADEIKQMWHQETVRIIPIIISSTGVVPTSLSAALKTLQLPDTTYIPLQKSIVIDTCSIVRRFLNPTSLSYAITAENNDIPSTLTLLS

SEQ ID NO: 1131 - protein, 1279 aa, Caria ino
MTNGAIVTHKWKAMHLRNRVLPQAGTYNGESRPETSGSPTYSGGGKVSLNPVQSKTVTVNNSPSSSSHTILSTPSTPLSSSHNVYPSPVSSPNSYEYFSQSTSSSSWSCDVVQNTSYSSVPTNDNTNATNLIPINSRNSVANNTHSPTLNINTPARSALQDMMPATTLAGKRRQRMKWTNDINIELLRCYYIVTHCETDLTAYRSLLHSTFIEKFPELSHLSEQRLADQIRVIHKNNRLPAPERERIKHSVSQTIQVPCHNQHIDNQIPSQPTTNISISNHQQMTDLPTTYLMFDTNTQDSYTTQTHIITENNEENPQIVSTEIANRATDRINYEKIENTFKEILIKFKDTDPTLRPPIPKLKITHQTIKTVNTIDDIIHTYLLAKEKYTIQEIHEIIYSAALAVTTIHTKQPIIIGNNDTHINTNAIHRQKQPAWEKRIESNIVTLRKEIGQLTQYLNGNLSQRKQRQINPSNKSTDELVDQLDLKKQKLQAYSKRLRRYRKSNQRKSDNNLFNSNQKLFYQKLDTEHINIVQAPNIDTLQKYWENLWSRPVQHTIHSQWTKIEEQEMSTIDLMTETTIEETDVSQVIKKTLNWKSPGPDKIQNYWLKYLNSTHKYIANALNDIIHNPQKMPSFFTQGVTYLKPKDHDTTNPSKYRPITCLPTLYKLLTSIIAHKINLHISNNKIIPEEQKGCSKGSKGCKELLVIDTEIHHQVKQKHRNLHFSYIDYQKAFDSVPHSWLLHILKIYKIDSNIIQFLKYSITKWTTKLHLRTSNTTISTDLIKITRGIFQGDSLSPLWFCLALNPLSRILNRTNYGYKINKNNDTKLTHLLYMDDIKLYAASRHELNQLLKLTEQFSKDIKMTFGIDKCKINSIVKGKHEKTDPYNLELQQGIIENMESKDTYKYLGYYQNTAIDHSDIKNTLKIKYKNRLHKILNTQLSARNKTRAINTYAIPILTYSFGIVKWTDTELNALNIATRVACYKHNIHHIHSSLERFTLKRKSGGRGFVDIRDLHYSQIDSLRTYFFNKSNDSALHKAIVDLPISGTPLQLNNKLYNPKIKITTEIQKIENWKKKALHGKYPHQLEQDHIDKNASYTWLTKGNIFGETEGFLIAIQDQIIKTRNYAKYIMKQTIETDKCRLCNQTTETIDHITGGCRVLAYKEYTHRHDNVAKHIHQQLAIKYKLIDQYTPYYKYKPKNVLENNTAKLYWNRDIITDRTILSNRPDLTLIVKSSKTTYLIDISIPNTHNLKQKHIEKIQKYIPLTDEIKQMWNQETVTI

SEQ ID NO: 1132 - protein, 1332 aa, Charidia lucaria
MTNGALVNKHAMRLRNRKIPQAGTREGESRPETSISGSPTYSGGGDASHSTTQSRAVVVHKISTHITSDPPSTSSHMIFHSLASSSLSPCITPLSRDVTQKGNTDSSVPITGIIKHTRVTNKNTDFRVNHDTHVASPNINTPARSVLQDMLPATTLAGKSRQRMKWTNEINKNLLRCYYLVTNNETDLTAWRPRLHKKFAEIVPELHNLSEQRLADQIRVIHKNNRIPAPEREDLKKEVSLVLLPINSRSEVISENAAMNQSPTSSQHNNYHTPTLSQTIHLDNFSPILHQTNTTVLEHNSTRVPEQIETQNSETNGQKYLINKNEIVDTFIEMTIKYTDTDPSLRPIIPKPKITRRLIKIIHLTDQVVNEYLKEKNIITLGGIHEVIYCAAQTITTINTKNLIKLDHTKCNNRTRKQNKPQWEKRLDNKIMVLRKEIGLHTQYLKGNLTRKKQLTLNPNNRSNDAIQENLDEKTQKLQAYSKRLRRYKLSNRRKTQNSLFYTNQKKFYQTLNNEHIQITQPPSKDDLQNYWKNIWSTPTNHKTHSPWVEIETEEMAKIEHMQDIKIVKNDVEQAIRKTLNWKSPGPDKIHNYWIKYLPSTHEHIANTFNNLIQNPNETPSFLTNGITYLKPKDNDTTNPAKYRPITCLPTIYKLLTSIITDKLNTHISINQIIPEEQKGCRKGSKGSKEQLIIDTEIHNQVKQKHRNLFYAYIDYQKAFDSIPHSWLTHVLKIYKVNNKLVEFLDHTMKNWTTKLNLYANTTTICTDLIKIKRGIFQGDSLSPLWFCLAINPLSRILNKTDCGYVIDREKNIKITHLLYMDDIKLYAANRQQINYLLKLTEQFSADIKMTFGTQKCKINSIYKGQHKKTDSFHLSIQEGLIDSMKPKETYKYLGYQQSISISNAEIKNTLKVQYKHRLHKILNTQLSAKNKIKAINTYAIPILTYSFGVIKWSDTELEALNTTTRTISNKHNIHHIHSAIQRFTLKRKHGGRGVIDIKNLHYAQIDNLRKYFLTKANSNNIIKAIVNLPQAGTPLQLNNIQFDPKQKILGDDQKINIWKSKALHGKYPHQLGLDHVDKNASFSWLTKGNIFGETEGFMIAIQDQIIKTRNYTKYILKQPIDTDKCRLCNQSIETIDHITGGCSILANREYTHRHDNVAKHIHQQLALKHNLTQSYTPYYQYKPKAVMENSIAKLYWNRDIITDRTILSNRPDITLILKHTKTTYLIDISVPNTHNLKQKHTEKIRKYMSLADEVKQMWHQEFVKIIPIIISATGIIPKTLKPALQLLQLNENTYIPLQKSIIIDTCSIVRRFLNPTSLALQQDKQHDNTTF

SEQ ID NO: 1133 - protein, 1397 aa, Heliopetes sublinea
MDNNNNNNNNNNNNNNNNDHLCHVGGGRWQHYAIYSTSGQRSSSTQKIYAMQLRSRRLPQAGTREGESRPGPSSSGSPTYSGEGNSSLLPAQSHTVAANNNNNNNHTSSVIHPHSSNLSSPFSSSHSLFPSPTSSPHSFQLDSSSQSTTVSPRSHSVAQEAYANCPAPIHDHTNSTREPDNTQNNRVNHYTHLTSHNTNTPARSALQDMLPATTLAGKSRQRMKWTNKINMELLRCYYIITHKETNLSAWRPQLHQEFTKMYPELSHLSEQRLSDQIRVIHRNNRISPGERERLKQSIPDTTTSLRTSEHNNSCTNGEQENNINIDNTAREDNDYSDIHIHQDTPSPHCTMNIREQTKQIDNMDTEHIQTNHADNSNDQLGPKDYNKIENTFTEMIIKYAGSDPVHRPSIPKIQLTRNVIKTVNTTNEIVGKYLRTKDTTTLELIHEVIYCAAQTITTLHNIPNNKPNYFINRSSDSNRKIEIKKPRWERRIENKINSFRIEIGQLTQYLNGKLSLKKQQKLNPSNADKDKIIEQLDNKKQKLQAYSKRLRRYKKSNERKSHNKLFNTNQKLFYQKLTSQPIHINTPPDKDELHTYWMKLWSKPVQHNTYKPWNEIEEEETEKIDTMLEIKIDKNDVSQATKKTLNWKAPGPDKIQNYWLKYMSSTHEYVAKIFNHLIQNPQDSPPFLTQGITYLKPKDCDTANPANYRPITCLPTIYKLLTSIITQKLNTHITENQIIPEEQKGCTKGSRGCKEQLIIDTEIHNQVKKKHRNLFFSYIDYRKAFDSIPHSWLLHILKIYKVDNRLIQFLQHTMSNWSTKLHLRTTNTTISTHPIKIRRGIFQGDSLSPLWFCLAINPLSKILNKTDYGYVIDKERNIKLTHLLYMDDIKIYATNRTQLDLLLTLTENFSSDIKMSFGTNKCKLNSIIKGQFNETHPFVLHEQEGMIDRMEAIETYKYLGYQQSTSINHTDIKKTLKSKYKQRLNKIFNTQLSARNTVKAVNTYAIPILTYSFGVIKWSDTELDALNTLTRTVSNKHNFHHIHSASQRFTLKRKLGGRGFVDIKNLHYSQILNFRNYFLTKANVSPLHKAIVNIPQSGTPLHLHNSEYDPKLKILKDDQKIETWKGKALHGKYPHQLDQEHIDHVASCTWLTKGNIFGETEGFLIAIQDQIIKTRNYSKYILKEPINTDRCRLCQQSTETVDHITGGCSVLANKEYTHRHNNVAKHIHQQLALKYKLLQSYTPYYQYKPKNVIENSVAKLYWDRDIITDRTIFNNRPDITLTLKSSKVTYLIDVAVPNTHNLTQKHTEKIQKYIPLADEIKQMWHQEAVKIIPIIISSTGVIPKTLKAALKLIDLPENTFVPLQKSIIIDTCSIVRRFLNPISLSTHEEQNHSTNII

SEQ ID NO: 1134 - protein, 1313 aa, Eracon sarahburnsae
MRLRSRQLPQAGTCKGESRPGLLSSGCPTYSGGGNASHMTTQFNPVVVDESPTNNTSHSSSPISSTHSLFQLPSSSPHSFEFQHSLSRSTTVSPMSSGVAQETYVNSPEPTHDTTNSTRVSKKNKNNRVNYNTQSLPHNSNTPESSVLQEMLPATTLAGKSRQRMKWTEQINIELLRCYYIVTHNETNLTAWRPQLHQKFTESIPELSHLSEQRLADQIRVIYRNNRLPASKREEIKQSVSLFLSITNSSKQIIKTNSITHQPLVITMPTNEQQSDSYSPNRTLNSPQILPSTQQITQTQAHPLFKNNEYTQAQSPKTISRQQNPIDYEKVENTFSEMLTKYSGMDPTLRPAISKLKTTHNTIKTVNTTNEIISKYLQAKDITTLEEIHEVIYCAAQTITTIHSKYINRLDNKPKDTNSNKNKQSKPQWEERLENKIKILRKEIGQLTQYLKGNLTQKKQQKLNPNNRSRDEIIEHLDKNKQRLQAYSKRLRRYKISNQRKSHNTLFNNNQKLFYQKLNAEHIEIMQAPNKNDIQNYWTNLWSKPVQHNTHTSWAEIEEQEMAKIEDMPEIVIDKEDVSQAVRKTLNWKAPGADKIQNYWIKYLSATHEHIAKIYNHLIHNPKDTPSFLTQGITYLKPKDNDTANPAKYRPITCLPTLYKLLTSIITHKLNTHITKNEIILEEQKGCRKGSKGCKEQLIIDTEIHNQIKHKHTNLFYSYIDYQKAFDSVPHSWLIHVLKIYKVNNILTNFLQHTIKNWKTKINLRTSNTTLSTHSIKISRGIFQGDSLSPLWFCLALNPLSRILNKTGYGYLVDKENNTKISHLLYMDDIKLYASNRQQLDHLLKLTENFSTDIKMTFGINKCRINSIIKGQYKETDSFRLEKQEGKIDSMEPKETYKYLGYQQSTSISHTDIKNTLKTTYKQRLQKILNTQLSARNKIKAINTYAIPILTYSFGVIKWSDTELEALNTATRTACNKHNIHHIHSAIQRFTLKRKLGGRGFIDIKNLHYTQIDNLRTYFLNKANENSLHKAIVNLAQAGTPLHLNNRQLDTKHKILTDDQKLESWKKKALHGKYPHQLEQDHVDQNASCSWLTKGNIFGETEGFMIAIQDQIIKTRNYSKFILKQAIETDKCRLCHQTTETIDHITGGCSTLANKEYTYRHDNVAKHIHQQLALKHKLVESYTPYYQYKPKRVIENSTAKLYWDRDIITDRTILSNRPDITLTLKSSKTTYLIDVAVPNTHNLKQKQSEWFYIREFLGHHQTSQSSSCQKTINKMDITKRLSRRVVKKPLIKCTNYNKDVFNKKVPKEVPRKA

SEQ ID NO: 1135 - protein, 1283 aa, Ectomis asine
MRLRNRQIPQAGTREGESRPGPSSSGCPTYSGGGNVSHTTVQPKAAAVEKSHNTSHTSSPTSSTPSLFPSPNSSPYSYEYHSSSSSLSRSTTITPRSCDVVQEAPSPVPITDTINPTRVTVTNLSYRVSHNTQLTTHITNTPARSVLQDMLPATTLAGKSRQRMKWTYEINKELLRCYYIVTRNETNLTAWRPQLRHRFIASVPELNHLTEQRLADQVRVIHRNNRISAPERNQIKQSVSGLISISNSSTNHTIIDNIHQTSNVHITPLDSSLQQSPESLSLNPHLTTNITQPSTIQLYEPILYSEHIQTQYMETSNRATEPIQYDAIENIFKEMLIKFTGVDPILKPTIPKLQVTRNVIKTVNTLNKIIELYLQTKNIITLEDIHEVIYCAAQTVTKLHCKHFENNSTNNKSRSPKIPQWERRIQNKITILRKEIGQLTQYLNGNLTQKKQQKLNPNNKSKTVLIEQLDENKQKLQAYSKRLRRYKISNERKSHNKLFNTNQKLFYQKLNSEQIQVTQSPHKDDIQKYWESIWSHTVQHNRHAPWTKIEEQEMKNINPMPEIVINKEDVSQAIKKTLNWKAPGPDKIQNYWIKYFSATHEHIANTFNHIICNPQETPSFLTQGITYLKPKDNDTTNPAKYRPITCLPTIYKLLTSIISYKLNKHVTQNHIIPEEQKGCCKDSRGCKEQLIIDTAVHNQVKDKHRNMYYSYIDYQKAFDSVPHSWLLHVLKIYKVDDRLIQFLQHTMKNWITKLSLRTSNTNICTQKIRILRGIFQGDSLSPLWFCLALNPLSRILNNTDFGYVVNRDTNIKLTHLLYMDDIKLYASNRQQLENLLRLTENFSRDIKMTFGTDKCKINSIIKGHYKETDPYKLKTQEGIIDKMEYKETYKYLGYQQNTSINHTDIKNELKLKYKQRLHKIFNTQLSGRNKVKAVNVYAVPILSYSFGIIKWSDTELEALNTITRKASNTHKIHHIHSAVQRFTLKRRLGGRGFVDIRNLYYTQIDNLRTYFLTKAKESALHKAIVNLPQSGTPLQLNNSEFDPKLKIISDEQKLEDWKKKALHGKYPHELNQKHIDTTASCTWLTKGNIFGETEGFLVAIQDQIIKTRNYSKYILKEVIDSDKCRLCHKTTESIDHITGGCSVLANKEYTHRHDNVAKHIHQQLALKYKLLDSYTPYYQYKPENVLENNTTKLYWNREITTDRTILSNRPDITLTLKHCKTTFLIDIAVPNTHNLTQKHTEKIQKYIPLADEIKQMWHQEYVKIIPIIISSTGVVPNTQLNLN

SEQ ID NO: 1136 - protein, 779 aa, Ypsolopha scabrella
MPEISINIDDVTYAIKNTLNWKAPGPDKIQNYWLKYLTSTHKYIASTLNHLLHNPQDIPPFLTQGITYLKPKDNDTTNPAKYRPITCLPTIYKLLTSIISHKINSHLTSNKIIPEEQKGCSKGSRGCKEQLVIDTEIHNQVKKKHRNLYYSYIDYQKAFDSVPHSWLLHVLKMYKIDNRLIQLLEYAMTNWKTKLNIRTNNTTLSTPSIKIARGIFQGDSLSPLWFCLALNPLSRILNKTGYGYNIDTGNDIKLTHLLYMDDIKLFAANRQQINHLIRLTEEFSRDIKMTFGTDKCKINSMIKGQHKETDPYILEQQTGTIDSMEPKETYKYLGYQQSTSIDHTEIKNSLKTKYKQRLSKILKTQLSARNKTKAINTYAIPILTYSFGIVKWSDTELEALNTTTRTTCNKHNIHHIHSAIQRFTLKRKLGGRGFIDIKNLHYTQIINLRSYFHTKANESAIHKAIVNLPQPGTPLQLNNSQFESKHKITTDEQKLENWKKKALHGRFPHQLDQEHIDRTASCTWLTKNNIFGETEGFLIAIQDQIIKTRNYSKYILKETIETDKCRLCNLASETIDHITGGCSTLANKEYTPRHDNVAKHIHQQLALKYKLLQSYTPYYQYKPKKVIENSSAKLYWDRDIITDRTILSNRPDITLTLKSTKTTYLIDISVPNTHNLKQKHAEKIQKYIPLADEMKQMWKQETVKIVPIIISSTGIVPKTLKKALELLDLPLKTFIPMQKSIVIDTCSIVRRFLNPTSLPLLTNHTTPHINTTHSMPPNT

SEQ ID NO: 1137 - protein, 764 aa, Cyaniris semiargus
MPEIILNKEDVTNAIKKTLNWKAPGPDQIHNYWIKYFSSTHHYIADIFNSLIENPQTIPAFFTQGITYLKPKDSDTTNPTKYRPITCLPTLYKLLTSIITQKLNNHIIQNKIIPEEQKGCAKGSMGCKEQVIIDTEIHNQVKQKHRNLYYAYIDYQKAFDSVPHSWLIHVLKIYKVDIKLINFLQFIMSTWSTRLTLRTSKSNLCTSPIKIKRGIFQGDSLSPLWFCIALNPLSKILNKSCDGYTLDKLNNTKVTHLLYMDDLKIYANDGQQLEHLLKITEKFSTDIEMRFGIEKCKINCINKGVHTQIEPLNLVFQEGMIDSMQAIDTYKYLGYIQSITINHKEIKNTLKSKYKQRLNKILATQLSGRNKIKAINTYAIPILTYSFGIIKWTDTELETLNTTTRMLCYKRNIHHIHSAVERFTLKRKLGGRGIIDIKNVHYSQIDNLRTYFLNKAKTSQLHKAVVSLPHKGTPLQLNNDLFNAKHKIVTDDDKIQKWKSKALHGKYPHHLEQDHVDQMASCSWLTKGNIYSETEGFLIAIQDQIIKTRNYSKYILKESIATDKCRLCHLTTETIDHITGGCTTLANKEYTHRHDNAAKHIHQLLAIKYKLIDSQTPYYRYKPRNVLENSTVRLYWDRDIVTDRTILSNRPDITLTIKPEKTTYLIDIAVPNTSNLKQRHNEKIQKYIPLADEIRQMWHQEVVKIIPIIISSTGVIPKTLAASLKTLDLHKNTYIQMQKSIIIDTCSLVRRFLNPSSSFPMNES

SEQ ID NO: 1138 - protein, 1360 aa, Duroca duroca
MRLRNRKLPQAGTHTGESRPGPSGSGCPTYSGGGTVSLRSAQSNTVAATGETSTPHHSTSSPTSSTHSLFQSPSSSLHSYELHQSSRSTTTSPMSCDVAQEASANSLVPTADTTNSTRVLLNKSLNSVDHNTDTSQHDINTPARSVLQDMLPATTLAGKSRQRMKWTKDINTELLRSYYTVTLCETDMTAWRPLLHAKFIEQFPELSHIPEQRLADQIRVIHRNNRIPITERQSIKHTISQTPPSINTINNNIEEQEALNTYTHNSLQQTTQNIPATHNTPNTQHTQSHTDGYQTITHTQVTRPLEASEHIQTQENEPTNTLVTPIEYEKIENTFTEMIIKYTGTDATLRPIIPKLQTSRQMIKTVSIVNRIVDKHFQNKDTITLVEVHEAIYCAAITVATLHAKRHKNTVDHTSSYSNNSTHKQKEPHWKRRIENKITALRKEIGQLTQYLNGNLTQKKQQKLNPHNISRQEIVEQLDTNKQKLQAQAKRLNRYKISNQRKLDNILFKSNQKIFYQKLNSENITVTQQPDIVEVKKYWENMWSKPVQHNTHISWAEIEEREMEKIEPMPEITISKDDVTHAIKRTLNWKTPGPDKIQNYWIKYLTSTHIHIANTLNNLLQNPHEMPAFLTQGITYLKPKDNDTINPAKYRPITCLPTIYKLLTSIITHKINSHISTNNIIPEEQKGCSKGSMGCKEQLIIDAEIHNQVKVKHKNLYYSYIDYQKAFDSVPHSWLLHILRIYKIDNCLIQFLQHAMTKWKTKLSLRTNTTTLSTPHINIARGIFQGDSLSPLWFCLALNPLSRILNNTTSGFTVDKENKVKLTHLLYMDDIKLYASSKQDLDHLLKLTEKFSTDIKMTFGTSKCKINSITKGQHSKTDPFELELQGGKIDSMEHRETYKYLGYHQSSSINHTDIKNTLKTKYKQRLHKLFGTQLSARNMVKAVNTYAIPILTYSFGIVKWSDTELNALNTLTRTVSNKHNIHHIHSALQRFTLKRQLGGRGFIDIKNLHYTQIENLRTYFSRKAHDSTLHKAIISMPHSGTPLQLNNIHFDPKTKIVKEEQKIESWKNKALHGKYPYQLEQEHVDRKASTTWLTRGNIFSETEGFLVAIQDQVIKTRNYSKYIIKEAIETDKCRLCYRYTESIDHITGGCSTLANKEYTHRHNNVAKYIHQQLALKYKLTDTHTPYYKYKPKNVLENNNVKLYWDRDIITDKTILSNRPDITLTLKSIKTTYLIDISVPNANNLKQKHTEKIQKYIPLADELKQMWHQETVKIVPIIISSIGIIPKTLHAALKMLDLHPKTYIPMQKSIIIDTCSIVRRFLNPTSLAYNMPTDTHSPQDTQHNHSPTPHHTNTLEPEYLA

SEQ ID NO: 1139 - protein, 1348 aa, Dalla cyprius
MRLRSRQIPQAGTREGESRPEPSGSGCPSYSGGGNASHTAQSQTVAVDTSPLHTSFPSSPISSTHSLFPSPNSSPQSYEYQQSLSRSSTVTPMSCDVAQEALANSPEPITDITNLTRAAQNNTSNRVDHNPHSLPPYINTPPRSVLRDMLPATTLAGKSRQRMKWTDQINRELLRCYYLVTHNETNLTTWRPLLHQRFIESIPELSQLSEQRLADQIRVIHRNNRIPASERESMKHSVSLLLSNPNDSNQNADTSNTEHQSNTTPATYNHQSNIESLCHPLYSHNTPNITQQINTTTQVYENVEHIQTQVSETIHKPQDPFDYNNIQNTFTEMLIKFTGTDPTLRPTIAKLQISRKVIKTVYTTNVIIEKHILNKEMITFEEIHDIIYCAAQTITVIHNKHAEVKNNTNNTNSGITMNQKKPKWERRIENQITKLRKEIGQLTQYINGNLTQKKQKKVNPNNKNIDEVIDQLDKNKQKVQAYSKRLRRYKVSNDRKSHNKLFNTNQKLFYQKLNTDQIQITQPPNIEEVQNYWKSLWSKPVHHNTHMSWTEIEEQETTNIEEMPEIKIDKNDVTQAIRKTLNWKAPGPDKIQNYWIKYFTATHEPIANAFNHLINNPQETPSFLTEGVTYLKPKDNDTTNPANYRPITCLPTIYKLLTSIISDKLNTHITLNQIIPEEQKGCSKGSRGCKEQLVMDTEIHNQVKQKHRNLFFSYIDYQKAFDSVPHSWLIYILKLYKVDNRLIQFLQHAMKTWTTKLHLRTHDSSFCSESIEILRGIFQGDSLSPLWFCLALNPLSKILNKSGHGYVVDRDNNIKLTHLLYMDDIKLYAANRQQLDHLLKLTEKFSADIKMSFGTNKCKINSIIKGQHKETSAFDLNIQGGKIDSMEAMETYKYLGYQQSSSIKHTDIKNTLKAKYKQRLNKILKTQLSARNKIKAVNTYAVPILTYSFGVIKWSDTELEALNTTTRTTFNKHNIHHIHSAVQRFTLKRKLGGRGVIDIKNLHYKQIDNLRTYFLTKANVSALHKAIVNIPQSGTPLQLNNNLFDPKPKIVKDETKIENWKKKALHGKYPYQMEQDHVDRNASCTWLTKGNIFGETEGFLIAIQDKIIKTRNYSKYILKEAIATDKCRLCHQTTENIEHITGGCKILANKEYTHRHDNVAKHIHQQLALKHKLLKSYTPYYQYKPKNVIENSTAKLYWDRDIITDRTILSNRPDITLTLKSSKTTYLIDISVPNTHNLQQKHTEKIQKYMSLADEIKQMWHQESVRIVPIIISSTGVIPKTLKSALKLLDLHENTYIPMQKSIIIDTCSIVRRFLNPTTLSLQDEQHTNSQVTTQNLPTLAITNTHNT

SEQ ID NO: 1140 - protein, 1382 aa, Heliopetes sublinea
MLYTQPAANVALVHRKYVMQLRSRRLPLAGTREGESRPGPTSSGSPTYSGEGNSSHTTAQSSTVVVTELSLHVTLDPSSPLSSTHSLLPTPNTCPQSFQLQSSSRSTTVTPMSDDVAQEADANFPVPISDITSPTRASINNQINRVDRNTPTPSAFTPHELNTTARSVLQDMLPATTLTGKSRQRMKWTDEINRELLRCYYIITHVETNLTAWRPLLHQKFTERIPELGYLSEQRLSDQIRVIHRNNRIPAIERENIKQDVSTMLQTLNSSNQVNIPINTQHEPISSSFHELSPHAPQIDHNMHTETPVDRTNIQHHQYFINHNNYAINTNHSHINTEYIQTLDTETTNSTLNRIDYTQIENTFTEMLIKYTETDPTLRPIISKVQTTRQVIKTVNTTNNIVDKFLKTKDSLTLNQLHEVIYCAAQTVATIHSTDRKPKSGKDTNDTNSNKITQNTTQTHTHEHKIPKWKIRIENKIKLLRKEIGQLTQYLNGNLAHKKQKKINPHNKNKEEVTELLDKNKQKLQAYAKRLRRYNLSNQRKSDNKLFNINQKLFYRKLNSEHIKIAHPPDLNRVENYWKNIWSKPVQHNTHTSWAEIEKEETDSTDAMSEITISKDDVSTAVKKILNWKTPGPDKIQNYWIKYFTATHQYLANTFNYILHNPQEIPIFLTQGITYLIPKDSDTDNPEKYRPITCLPNLYKLLTSIISHKLNTHIQHNHIIPEEQKGCSEGSRGCKEQLVIDTEIHNHVKKNHRNLFYSYIDYQKAFDSVPHSWLLHVLKIYKVDNSLIHFLQYVMGNWTTRINLKANNITLITNRIRISRGLFQGDSLSPLWFCLALNPLSKILINSGYGYTIDKISNTKLTHLLYMDDIKLYAPNRQELDHLLKLTEKFSTDIKMTFGISKCKINSIIKGQHKETHSFNLGLQGGVIDSMEPNENYKYLGYQQSASLNHSEIKNTLKQKYEQRLKKILSTQLSGRNIIKAINTYAIPVLTYSFGVIKWSDTELEALNITARAASYKHRIHHIHSATQRFTLKRKFGGRGCIDIKNLHYQQIDSLRNYFITKANVSTLHKSIVKLSQPGTPLHLNKTHFDAKLKILTDTQKIENWKKKALHGKYPYQLEQDHIDRNASCSWLTKGNIFGETEGFLIAIQDQVIKTRNYTKNILKQAIETDKCRLCHQTSETIDHITGGCSFLAKKEYTHRHDNVAKHIHQQLALKYRLLDSYTPYYQYKPKKVLENTTTKLYWDRDVITDRTILSNRPDITLTLKSSKYTYLIDVAVPNTHNLKQKHTEKIQKYLPLAEEIQKMWHQESVKIIPLIISSTGVVPKTLKTSLKLLELNESTYIPMQKSIIIDTCSIVRRFLNPSTLMLQDEQHTNSTGTHTQT

SEQ ID NO: 1141 - protein, 1354 aa, Telemiades fides
MRLRNRQIPQAGTREGESRPGPSSSGCPTYSGGGNVSHRTAQTSAAAVDNTPITSHSSSPTSSTQSLFSSLASSPNSYTYQQSSSRSTPITPLLCDVAQEAHANSPGPITNITNPARDFQNNSLSRANFSTHTLTSNINTPARSVLQDMLPSTTLAGKSRQRMRWTDEINRTLLRCYYVVTHNEKNLTAWRSLLHQKFTESIPELNHLSEQRLADQIRVIHRNNRIPAVEREHIKQSVSLPTFLSNPSNDNSIINNIEQQSTNTTAISSNPVLTTDSHSQILSPQNTLDTIQQNNTITQIYQPLESCDLNRTEHPEITNRLSDLEEYNKIENTFTEMLIKYTGTNPTLRPTIPKLQTTRNTNKTLNTVNQIIDLHLQNKSVIKIEEIHDMIYCAAQTVITLHNKHFRQLENNTCDNGQTVIKPKKPLWERRIESKIVVLRKEIGQLTQYLNGNLTQKKQRKVNPNNRSIEEITEQLDYNKQKLQAYSKRLRRYHKSNQRKSHNKLFNSNQRLFYQKLNTEEIKITQTPDKDEIENYWKDLWSKPVQHNTHLPWTEIEEKLTENIDTMSALTIDKEDVTQAIKNTLNWKAPGLDKIQNFWIKYLPSTHEHMAKAFNHLINNPLDTPNFLTQGITYLKPKDNDTTNPAKYRPITCLPTIYKLLTSIICNKLNEHITLNNIISQEQKGCSKGSRGCKEQLVIDTEIHNQVKQKHRNLYYAYIDYQKAFDSVPHSWLIQILKIYKVDDKLIQFLQSIMTNWTTKLSLHTKDTSICTRPIKISRGIFQGDSLSPIWFCLAINPLSRILNETGFGYMINRDSKTKLTHLLYMDDIKLYAASRQQIDHLLKITEKFSTDIKMLLGTNKCKINSIIKGQQKETHPFELETQTGIIDSMEPKETYKYLGYHQSTYINHKHIKNTLKTKYKQRLNKIFNTQLSGKNKVKAVNTYAVPILTYSFGIIKWSDTELEELNTITRTASYKHNIHHIHSAVQRFTLNRKLGGRGFIDIKNLHYSQIDNLRKYFLSKANESELHKAIVHLPQSGTPLQLNNSEYEPKNKISHDEQKIDTWKRKALHGKYPHQLEQDHIDSSASHTWLTKGNIFAETEGFMFGIQDQIIKTRNYSKYILKEVIETDKCRLCHQTTETIDHIIGGCSALANKEYTHRHDNVAKHIHQQLALKYKLIEKYTPYYRYKPQKVLENATTKLYWDRDIITDRTILSNRPDITLTLKDSKTTYLIDIAVPNTHNLKQKHNEKIQKYIPLADEIKLMWHQETVRIVPIIISSTGVLPKTLKKSLKLLDLHENTYIPIQKSIIIDTCSIARRFLNSTSLTLLDYQEANRNTSTQNQPTYNNTHNENSYA

SEQ ID NO: 1142 - protein, 1360 aa, Euphyes dion
MRLRNRVLPQAGTHTGESRPGPSGSGRPTYSGGGTVSLRSAQSSTVAATGGDSPPQHHSTSPISSTHSLSQSPRSSPHSYELHQSSRSTTISPMSCDVAQDPVINSLVPTTDITNPTQIPQTNSLNCVDHNTQLSPININTPARSVLQEILPATTLAGKSRQRMKWTKEINIELLRCYYIVSLCETDMTAWRPLLYQKFIEKFPELSHISEQRLADQIRVIHRNNRIQSIERERIKQTISQTLSSTNNIDYTTEQEENSIAHAHNRQQITTQNTHTIQNTPTIQHTHSQICNQQTITPTLTTRPLEINVHIQTQENEENNRTIRPINYEEIKNVFTEMIIKYTGTDPILRPIIPKIQTTRQMIKTVNTLNDIVDKHFQSKEIITLVEVHEVIYCAAITVATLHTKQRKKTGKHTSFTLNNKTDKQKEPQWKIRIENKITSLRKEIGQLTQCLNGNLTRKKQDKLNLNNKTRQEIVDQLDTNKQKLQAQAKRLNRYKKSSQRRLDNTLFNNNQKLFYQKLNSENFTITQQPDMAQIQKYWENIWSKSVQHNAHTSWTKIEEQEMQKIEPMPGMTISKDDVTRAIKRTANWKSPGPDKIHNYWIKYLTSTHTHIANTLDNILHNPHEMPAFLTQGVTYLKPKDNETTNPAKFRPITCLPTIYKLLTSIITHKINLHITTNHIISEEQKGCSKGSMGCKEQLIIDAEIHNQVRVKNRNLYYSYIDYQKAFDSVPHSWLLHVLKIYKIDNKLIQFLQHAMSKWRTKLNLKTNTTTLTTSHIKIARGIFQGDSLSPLWFCLALNPLSRILNKSTHGYTIEREHKVKLTHLLYMDDIKLYASNKQELDHLLKLTEKFSSDIKMTFGTDKCKIGSINKGQHSKTDSFGLVLQGGTIDSMEPNETYKYLGYQQSASINHGDVKNTLKTKYKQRLNQIFNTQLSARNMVKAVNTYAIPILMYSFGIVKWSDTELDALNTLTRTVSNKHNIHHIHSALQRFTLNRKLGGRGFIDIKNLHYSQIENLRTYFIRKANDSLLHKAIVNIPHSGTPLQLNNKQFDPKTKIVQKEQKIETWKKKALHGKYPHQLEQDDVDQIASTAWLTNGNIFSETEGFLVAIQDQVIKTRNYSKFILKEAIETDKCRLCHRYTESIDHITGGCGLLANKEYTHRHDNVAKYIHQQLALKYKLTDTHTPYYKYKPKNVLENNNVKLYWDRDIITDRTILSNRPDITFTLKSIKTTYLIDIAIPNTNNLRQKHAEKIQKYIPLADELKQMWHQDAIKIVPIIISSIGIIPKTLHAALKLLDLHPKTYIPLQKSIVLDTCSIVRRFLNPTSLTLQNTPDPHSTQNTQHHRPHSLIIHHTQEPEYLA

SEQ ID NO: 1143 - protein, 1240 aa, Fabriciana adippe
MESTNNDNSIGPLPGGDRRGTSGAGAGRHSMRTASGRQLHRQAAVNQNATAYTDIDTQPTTSTNPTSSVLQEMMPATTLGGRNRQRMKWTDEINIELLRCYYTVTNLETNLTAYRPLLHQMFVQKYPELNFITEQRLSDQIRVIHRNNRIPATAREKIKKTIEEIINRENNEHSENTTQNTLFTNIQDNKTTEEEINTETQPSVAHSYTQYTQNNNDTETLITEHQITPSQERNTENENHTQLEYEKISTTFTEMLMKFKGTDPTLRPHIPKLQTCRKTIKTINTINQIIKAHLQDNDDTTVENLHDIIYCAAKTVTSLHTGKNTLNKKNTKRTETSENKPAWQKRIETKIAKLRKEIGQLTQHLNGKLSQKKQEKIKVNGKDRNEVVDELDKNKQKLAAQSKRLRRYKLSNLRKQQNRDFNNNEKVFYRNLHKTHTITQPPDITQVKKFWEDRWGNSVYHNHNAKWIELEENRVKHIENMTQFKIEKSDIETAIRKTLNWKAPGPDKIQNYWIKYFTSTHAHLAKALNTLIQEPQNIPSFLLQGITYLKPKDTDTTNPANYRPITCLPTIYKLLTSIIAHKLNIHITQNKIIPEEQKGCCKGSKGCKEQLVIDTEIHNQVKQKHRNLFYAYIDYEKAFDSVPHSWLIQILKLYKVDNILIHFLENTMEKWMTTLTLRTEKENLTTTPIKIARGIFQGDSLSPLWFCLAINPLSSILNSTECGYTIDREAKIKITHLLYMDDIKLYASNRTQLNQLLKQTEQFSNDIKMNFGTEKCKINSISKGQHKETETYNLTLQEGAISTMDSKEIYKYLGYQQSTCLNHTDIKQALKTKYSQRLNTILKTHLSARNKTKAINTYAVPILMYSFGIIKWSDTDLNALNTLTRSQAYKHNIHHIHTSTERFTLQRKHGGRGFIDIKNLHYTQIKNLRSYFLSKANNSKLHKAITTLTTSGTSLQFNDKNYEPETNIITEQKKIEHWKKKALHGKYPHQLEQTHIDKEASNTWLTKGNIFAETEGFFIAIQDQIIKTRNYSKYIIKESIETDLCRLCHQSKETIEHITGGCKILATKEYVKRHDNVAKQVHQSLALNYKLISTYTPYYKYIPPNVLENKTAKLYWNVDIITDKTIACNRPDITLTLKSSKTTYLIDISIPNTENLNTKHQEKIQKYIPLADEIKDMWHQNSIKIVPIIISSTGVVPKTLHKSIELLELHKSTYIHLQKSIVLDTCSIVRRFLNPSSLPP

SEQ ID NO: 1144 - protein, 1356 aa, Apotomis turbidana
MRLRNRKLPQAGTQPGESRTGSSDPGCPTYSGGGNVSLRAAQSQTVAANSDDNSSLLHNTPTSPLPSTSSSSLFTSPSSSPRSYQYPSSSSTSTTTSPMSYDVAEVAPANTLLPITDVTHPTRIFENCSPSSVDQNTPSLNNDSNTPARSVLQDMLPATTLAGKSRQRMKWTDEININLLRCYYTVTMCETDLTAWRPLLHQKFTEQFPELSHLSQQRLSDQIRVIHRNNRIPAPERDRIKQTLLPHTTNNILTTTEEEDTSNTSVSQIQQRVADSPPDTPSTQHTHNYIDEQEIDTQTIHVSQNSERIHTQETQPTDKHTDPIDYKQIEDTFTEMLIKYTDTDPTLRPTIPKQQTTRILIKTVNTLNEIIEKHLQNKDNITLKDIHDLIYCAALTVTTIHNKKIVKHNTANTTPYKEKKPKWESRLETNITTLRKEIGQLTQYLDGKLSQKKQQKINPNNKNTQELIELLDTHKQKLQSYAKRLKRYRKSNQRKSDNITFNTNQKIFYRKLNSENITVTQQPDVSEIQQYWENIWSKPAQHNRHSAWTEIEEQEMNSIEPMSQIIISKDDVTLAINKTLNWKAPGPDKIQNYWIKYLTATHTRIANALNHLIHNPHDTPAFLTQGITYLKPKDNDTTNPSKYRPITCLPTMYKLLTSIITHKINAHITSNAIIAEEQKGCSKGSMGCKEQLIIDAEIHNQVRQKHRNLYFSYIDYQKAFDSVPHSWLLHVLKIYKIDNSLIKILQHAMTKWTTKLNLRTNTTTLSTSQIKIARGIFQGDSLSPLWFCLALNPLSRILNNTEYGYVIDRQNKTKLTHLLYMDDIKLYASNKQELDHLLKLTEKFSTDIKMTFGTNKCKINSITKGQHNRTDDFTLELQGGTIDSMEPRETYKYLGYQQSTSINHKDIKNTLKTKYKHRLNQIFKTQLSARNIVKAVNTYAIPVLTYSFGIIKWSDTELNALNITTRTTCNKYNNHHIHSAIQRFTLKRKLGGRGFIDIKNLHYSQINNLRTYFIRKADHSPLHKAIVTLPQSGTPLHLNNNQYDPTSKILKDEHKLENWKNKALHGKYPHQLEQDYVDQTASTTWLTKGNLFSETEGFFIAIQDQVIKTRNYSKYILKEPIETDRCRLCHQYTESIDHITGGCNALASKDYTHRHDNVAKYIHQQLALKHDLTETHTPYYKYKPKPVLENNKVKLYWDRDIITDRTILSNRPDITLTFKPTKTTYLIDIAVPNTNNLKQKHVEKIQKYIPLADEIKQMWHQETVKIVPIIISSTGIIPKTLHTALKIIDLHPKTYIPLQKSIVLDTCSIVRRFLNPTSLTLLSVPETTTIPPTPHTQTTLQTSHRTQADIHQTQNI

SEQ ID NO: 1145 - protein, 1351 aa, Myscelus epimachia
MPMTNGALVKNNNAMRLRNRQIPQAGTREGESRPGPSGSGCPAYSGGGIVSHSTTQSSTVVADKSPSHTIPRPSSPKSSIRNRSHSSSSLICPKITTPLSKDVAQEAHANSPVPINDITSTTRAPDSNQLNRVHHETHTLTPNTNTPARSVLQDIFPATTLAGKSRQRMKWSNQINTELLRCYYIVTRNESNVTAWRSQLHQMFAERVPELNHLSEQRLADQIRVIHKNNRIPASERENIKHSVSLLISTPNSTTDQNITSNTVNQSNTIITHTATNHHSNTDSLYETHNSPHILTTTEPIDITTQASQSLENRKHNPQIQKSQITNKSPEYIEYNNLESTFMETLIKFAGTDPTLRPTIPKIHITPIFVKTVNTINKIIDKYLSTKDQITLTEVHEVIYCAALTIVTLYTKPIDKSHNNTHDNSKTTVKQQEQRKPNWEKRIESKIKKFRKEIGQLTQYLNGNLNKKKQQKLDQNHKDQDEIIQKLDSNKQKLQAYSKRLRRYRKSNERKLQNKLFNNNQKVFYQKLNAEQIEITQPPNNMDIQDYWKNLWSKSVQHNTHASWAEIERQEMENIHPMPEITIDVEDVTQAVRNTLNWKAPGLDKIQNYWIKYLTSTHKYIANTFNHLLHNPQDTPSFLTQGITYLKPKDDDTTNPAKYRPITCLPTIYKLLTSIISNKLNTHITQNKIIPEEQKGCCKGSKGCKEQLVIDIEIHNQAKLKHRNLFFSYIDYQKAFDSIPHSWLIHILKIYKVDYRLINFLQHSMKNWTTILNLRTKNISLSTCPIKILRGIFQGDSLSPLWFCLALNPLSRILNKTDCGYVIDRDKNIKLTHLLYMDDIKIYAANRQQLDHLLKLTDKFSTDIKMAFGINKCKINSIIKGQHKNTQPYELQTQGGTIESMEAKETYKYLGYHQSTTINHTDIKETLKHKYNQRLKKILGTHLSARNKIKAVNTYAVPILTYSFGVIKWSDTELEALNRATRTASNRHNIHHIHSAVERFTLKRKLGGRGFIDLKNLHYTQIDNLRTYFLLKANDSTLHKAIVNIPQPGTPLLLNNSQFNPKLKITNDEQKINNWKKKALHGKYPHQLEQDHVDQSASCTWLTKGNIFGETEGFLVAIQDQTIKTRNYCKYILKETIQTDKCRLCHQVTETIDHITGGCCVLANKEYTHRHDNVAKHIHQQLALKHKLLKEYTPYYQYKPKSVLENNMAKLYWNRDIVTDRTVLSNRPDITLSLKSSKTTYLIDISVPNTHNIKQKHTEKIQKYLNLADEIKQMWHQQHVQIIPIIISSTGIVPKTLKTALNILGLNTNTYIPLQKSIVIDTCSIVRRFLNPTSVPFDNYTTTHEGTKSHG

SEQ ID NO: 1146 - protein, 1235 aa, Emesis progne
MRLRNRVIPQAGTCKGESRPESSDLGCPTYSGEGNVSLNSAQSRTVADNDHTISYSSSNPVSFQSSFNTSTSSQNFHQHHDTCSLPTSSTSHLLCDVAQEILPCPLVPTTNNINSTSLTFMNSSNSVENEIHQSTLDTNSSVRNVLQEIMPATTLAGKSRQRMKWTNNINKDLLRCYYIVTNCEKDLTSYRHSLHEKFIESYPELLHISEQRLADQIRVIHKNNRISQPERERIKFLVTQMMSSSNNLHLERNNITDIQTVMSTVPIGEEQHLIDTLLTDLSPQDSIHTGTQEFDITTPSSSSVNISTLDSQILRNCDKISNETIVNTFKEMLIKYTGTDPILRPPISKIQITINTIKTVNVVNDIVGKHLQAMNTVTLEELHEVIYCAAKTVTTIHTYKVANSDIYTNKNKTHKQNKSPWEKRLDSRVEKLRKDIGQITQHLNGKLSYKKQLKLNIYNKTRDDIINILDTYKQKLQAYSKRLRRYKKSNQRKSDNNLFNNNQKLFYQRLNSNKITITHPPDTDAIQTYWKNIWSKPVKHNTHTPWTEIEEQEMSNIGFMARVVIDEEDIALSIKKTLNWKAPGPDQVQNYWLKYLTTTHKYIADTLNNIILNPHKTPAFLTQGITYLKPKDCDTTNPSKYRPITCLPTLYKLLTSIIANKLNAHISQHNIIPEEQKGCCKGSKGCKELLVIDTEIHNQVKQKQRNLYYSYIDYQKAFDSVPHSWLIHILKIYKIDKNIVKFLECAMTKWTTKLTLKTPDKTLCTQTIKIARGIFQGDSLSPLWFCLAINPLSRILNRTDYGYKIDRDNNIKLNHLLYMDDIKLYAGTRNQLDQLLRLTEQFSTDVKMTLGTDKCKINSISNGQYKHAEIFNLELHGGQIDSMEPKDTYKYLGYYQSTCINHSDIKNLLKSQYKQRLQKILSSQLSARNKTKAINTYAIPVLTYSFGIIKWSDTELNALNTATRVASYRHNIHHIHSSVERFTLKRKLGGRGFIDILDLNYSQIDNLRTYFFTKANNSAIHNAIINISQSGTPLQFNNNSFDPKLKIMSDTQKLENWKKKALHGKFPHQLDQNHIDRNASCDWLTKGNIFGETEGFLIAIQDQIIKTRNYSKYILKENIDTDKCRLCHKNTETIDHITGSCNILAYKEYTHRHDNVAKHIHQQLALKYKLLNLYTPYYKYKPKQVLESDSVKLYWNRDIITDRTILSNRPDITLTLKALKTTYLIDISIPNNPAS

SEQ ID NO: 1147 - protein, 1391 aa, Cecropterus takuta
MRLRNRQIPQAGTREGESRPGPNSPGCPTYSGGGNVSHKTAQSRIVAVDKPNTTSHPSSPISSTHSLFPSPTSSPYSFQLQSSPSSSRSSTITSLSRDVAQEAHADTPVPTTDSTNPARVTQNKQSDRVTHNTHSPSYTTNTPARSVLQDMLPATTLAGKSRKRMKWTDEINKELLRCYYIVTQNESHLTAWRPQLHRMFAQNVPVLSHLSEQRLADQIRVIHKNNRIPVPEREVIKQSVSFLIQSSSNSLNNQVARNDDDDHSNINTTLTTNNQLISDSHNQTLNPQHTLTITHDGITNTQVYQSCERSEHMHLRDSEEINNQLGSVDYKKIQEVFRAMLIKYTGTDPALRPIISKPQTTRNVIKTVNSINEIIDKYLKTKHSMTIEEIHEIIYCAAQTVVNIHTNSVKTLENSPKGNNDKERKPHWEKRIENKITILRKEIGQLTQFLNGNLSQKKQKKLNPNNRSKYEIIEQLDNSKQKLQAYTKRLRRYKKSNERKSHNKLFNANQKLFYQKLNSDQIHIIQPPDKIDIQNYWKNIWSTPVKHNTHASWTEIEEQEMENIDPMPEITITKDDVLLAIKKTLNWKAPGPDKIQNYWVKYLPATHQHIANALNHILRNPQDTPYFLTQGITYLKPKDDDTTNPAKYRPITCLPTIYKLLTSIIAHKLNSHITQNHIIPEEQKGCCKGSKGCKEQLVIDTEIHTQVKQRHRNLYYSYIDYQKAFDSIPHSWLIHILKIYKVDIRLIQFLTHTMKNWTTKLTLHTNNISLTTQKIKILRGIFQGDSLSPLWFCLALNPLSRILNKTGYGYVICKDTNIKLTHLLYMDDIKLYAANRKQLDHLLKLTENFSKDIKMTFGTNKCKINSIIKGLHQKTDPFQLETTGGTIDNMEFRETYKYLGYQQSTSIDHTAIKNTLKHKYKQRLHKIFNTELSARNKTKAVNTYAIPILTYSFGILKWSDTELESLNTATRMISHKHNIHHIHSAVQRFTLKRRLGGRGFIDIKTLHYTQIDNLRTYFLLKANESNLHKAIVHLPQAGTPLQLNNKQFDPKLKILKDDQKIENWKKKALHGKYPHQLQQDHIDYNASCTWLSKGNIFGETEGFLVAIQDQVIKTRNYAKYILKEAIETDKCRLCQNNTETVDHITGGCSVLANKEYTHRHDNIAKHIHQQLALKHKLLESYTPYYQYKPKKVLENSIAKLYWDRDIITDRTILSNRPDITLTLKSSKTTFLIDIAVPNTHNLKQKHTEKVQKYIPLADEIKQMWHQESVRIIPIIISSTGVIPKTLKIALKLLNLHENTYIPMQKSVVIDTCSIVRRFLNPTTLTLQTRQDTHSGSLNQDSFPRTITQNTQTRTHTHNSTVTLITTHPNHTNTLITTHPNHTNTHESGYLA

SEQ ID NO: 1148 - protein, 1331 aa, Udranomia orcinus
MRLRNRQIPQAGTREGESRPGPSSSGCPTYSGGGNVSHMTAQSRTVAVDKPQSPPSSPISSTHSLFQTPSSSPYSFQCQESSSRSTTITPLSCDVVQEIPSPITDITNPARVSQINSQNRVNHNTQTHALNINTPARSVLQDMLPATTLAGKSRQRMKWTDEINRALLRCYYTVTSNETNLTAWRSLLHQKFIIETPELSHISEQRLADQIRVIHRNNRISAPDRESIKQSVASFLSLTNIPTYQVTTNNIEHQSPTTHILPSTNTDQPIADDFTQAHNSSYAHNTTQQNNNILRRNQTLENTEHIQTQELHYTNEQTITIDYDKIENSFTEILIKYSGTDPSLRPTIPKLQITRKSIKIVNTLNEIVHKHLSSKETITLEEIHEVLYCAAQTVTTLHRQYIDKPKNYNHINEKVNQKKPQWERRIENKITLLRKEIGQLTQYLNGNLTQKKQQKLNPNNRNREELVDQLDKGKMKLQAYSKRLHRYKKSNERRSHNRLFNTNEKLFYQKLNTEQILIKQPPNKEELHNYWKNLWSKPVQHNLHSSSTELEEQEMENIIPMSEITINRDDVSQAIRKTLNWKAPGPDKIQNYWIKYFTATHEHIANSFNNILQNPQNTPHFLTQGITYLKPKDNDTTNPAKYRPITCLPTIYKLLTSIITYKLNTHITLNKIIPEEQKGCSKGSRGCKEQLIIDTEIHYQATHKHRNLFYSYIDYQKAFDSVPHSWLLHVLNIYKVDNTLIQFLQYSMNNWTTKLHLRTNNTLLQTHPIRILRGIFQGDSLSPLWFCLALNPLSRILNKTEYGYLIDRNSNIKLTHLLYMDDIKLYAANRQQLDHLLTLTEKFSSDIKMSFGVDKCKINSIVKGKHQDTEPFELEAEGQIIDSMDLMQTYKYLGYQQSTFINHADIKNKLKIKYKQRLNKVLNTQLSGRNKIKAVNTYAIPILTYSFGIIKWSDTELEGLNTLTRTTSNKHNIHHIHSAVQRFTLKRKQGGRGFIDIKNLHYTQIDNLRTYFLNKANDSTLHKAIVNLAPSGTPLLLNNDQFNPMLKILKDEQKIENWKKKALHGRYPHQLEQEHVDRNASCTWLTKGNIFSETEGFLVAIQDQIIKTRNYSKFILKESINTDKCRLCHQTTETIDHITGGCSVLANKEYTHRHDNVAKHIHQQLALKHKLIDTYTPYYQYKPKKVLENNGAKLYWDRDIITDRTILSNRPDITLTLKSTKTTYLIDVSVPNTQNLRQKHTEKIQKYIPLADEIKQMWHQEFVRIIPIILSSTGVVPKTLKTALNLLELHENTYIPLQKSIIIDTCSIVRRFLNPSTLTLQNYDEVNSNTI

SEQ ID NO: 1149 - protein, 1255 aa, Codatractus alcaeus
MRLRSRQIPQAGTREGESRPGPSSSGCPTYSGGGNVSHKTVQSCTVAVENQHTLTHPSSPISSTQSHYPSPSSSSSTRSSPTTRLSCDVAQEAHANSPVPTHDITIQTRAIQINRPNRVSQNTHSPTYTINTPGRSVLQDMLPATTLAGRSRQRMKWTDHINKELLRCYYLVTENETNLTAWRPQLHRRFAETIPELSHISEQRLADQIRVIHKNNRIPATEREQIKQSISLLISAPDNLKYHTTVTNIDHQLNINTAPLTNSQVTSSITNTHNQKRDSQQTVTNTQHHITTSQLYQPSETSEHIQTQDYEMTNSSLNSLNYKKIEHIFIEMLTKYAGIDPTLRPTILKPEITRNFIKTIKIINEILHNYLGTKNAITLEEIHEIIYCAAQAVSTVHTKHEKKAANNLTKTNIYTTETQRKPHWEKRLDNKITVLRKEIGQLTQYLNGNLTQKKQQKLNPNNKNRDQIIDQLDTDKQKLQAYTKRMRRYKISNERKSQNKLFNTNQKLFYQKLNAEQIHITQPPDINKIQNYWKNIWSIPVQHNIHTSWTKIEEHEMENIDPMPEVTISKDDVLQAIKKTFNWKAPGPDKIQNYWIKYLTATHEHIANTLNRLLHNPRETPYFLTQGITYLKPKHNNTTEPSNYRPITCLPTIYKLLTSIISHKLNAHITRNNIIPEEQKGCSKGSRGCKEQLVIDTEIHTQVKLKHRNLYYSYIDYQKAFDSIPHSWLIHILKIYKVDSTLIQFLQHTMKSWTTKLSLRANHMSFCSQKIKILRGIFQGDSLSPLWFCLALNPLSRILNTSDSGYIIDSNTNTKLTHLLYMDDIKLYAANRQQLDHLLRLTENFSTDIKMTFGIDKCKINSIIKGKHKYTEPFELGLQKATIESMEPRDTYKYLGYHQSTSINHTYIKNTLKTKYKQRLHKILNTQLSARNKIKAINTYAIPILTYSFGVIKWSDTELEALNTATRTISNKHNIHHIHSAVQRFTLKRRLGGRGFIDIKNLHYTQIDNLRTYFLLKAKESALHKAIVHLPQPGTPLQLNNSEFDPKLKILKDDIKIENWKSKALHGKYPHQLEQDHIDYNASCTWLTKGSIFGETEGFLVAIQDQIIKTRNYSKFILKEAIHTDKCRLCHQHTETIDHITGGCCVLANKEYTYRHDNVAKHIHQQLALKHKLLESYTPYYQYKPKNVLENDTAKLYWDRDIITDRTILSNRPDITLTLKSSKTTFLIDIAVPNTHNLKQKHTEKIQKYIPLADE

SEQ ID NO: 1150 - protein, 1380 aa, Cycloglypha thrasibulus
MRLRSGYKLPQASTGANRTGESCPEPTSSGCPMYSGGDTVSQTSAQSQTVAVNGPSSSHISPHSSSPVSSTPTHSLFPSPVSSPKSYELNHSLSRSSSMSPMSRDVVQEATATSPEPTTDINNPTRVSKNYFNTRVHHTNHPSSLHINTPVRSVLQDMLPATTLAGKSRQRMKWTDQINRELLRCYYVVTHCETDMTAWRPLLHQKFAESFPELQHLSEQRLADQIRVIYRNNRVPATERENIKTTVSSLITTTSTFNQLSQDYTPINLLEDTHQLTSSIGHTTIDHATQQYSDQNCEIFNTQHRSTISEEYSTQQTHINFEHTATQVTEITHSPQEATHQERIENVFTEMLIKYTNMDPTLRPIIPKVQISRNIIKTTATINKIIGNHLKNKEPTIEEIHNIIYCAAQTIAIVNNNYSEVGNKNKSNRVGKTGKPQWEKRIESKIITLRKEIGQLTQYKNGNLTQKKRQKLNPNNKSIDEIIDNLDKNKQKLQAYSKRLRRYKISNKRKSDNKLFNNNQKLFYQKLHTENIRVTSPPSIQDLENYWKDLWSKPVHHNTHSPWIEEEETANVDPMPILLISKDDISIAIRKTLNWKAPGPDKIHNYWLKYFTAAHEPLANVFNHLLQHPQECPPFLTQGITYLKPKDNDTTNPAKYRPITCLPTIYKLLTSIISLKLNTHITQNGIIPEEQKGCSKGSRGCKEQLAIDTEIHHNVKVQQRNLFYAYVDYQKAFDSVPHSWLLHILKLYKVDNKLIHFLQHIMKNWSTRLSLQTQNTSHFTQPIKILRGIFQGDSLSPLWFCLSLNPLSKILNKTNYGYVIDRQNNTKLTHLLYMDDIKLYASNREHLEHLLKLTEKFSIDIKMSFGINKCRINSIIKGKHDETNSFNLNLQEGTIESMEYKETYKYLGYQQSTSISHTEIKNTLKVKYKQRLHKILATQLSARNKIKAINAYAVPILTYSFGIIKWTDTELAALNTVTRIASNKHNIHHIHSAVQRFTLKRKLGGRGCIDIKNLHYTQIDNLRTYFLMKANTSRLHKAIANLPQSGTPLQLHNNLFDPKLKIIKDDHKIEQWKAKALHGKYPHQLEQDHVDRDASCTWLTKGNIFGETEGFLIAIQDHIVKTRNYAKYILKETIESDKCRLCHQTTETIDHITGGCSVLANKDYTHRHDNVAKHIHQHLALKYNLIKSYTPYYQYKPKSVIENATAKLYWDRDIVTDRTVLSNRPDITLTLKSTKTTYLIDIAVPNTHNLKNKHTEKIQKYLNLADEIKQMWHQELVKIVPIIISSTGVIPKNLKSALKLLDLNENLYIQLQKSIVIDTCSIVRRFLNPSSLTFQEEHHNSNLITHTTSTPQHNIHNRNVSNIQDTSNTQTIHQPYHTNI

SEQ ID NO: 1151 - protein, 808 aa, Urbanus sp.
MSQIFIDKDDVSHAIKNTLNWKAPGPEKIQNYWIKYLPATHKHIANAFNHLINNPQETPSFLTHGITYLKPKNNETTNPANYRPITCLPTIYKLLTSIISYKLNTHITQNHIIPEEQKGCSKGSRGCKEQLIIDTEIHNQVKHKHRNLYYAYIDYQKAFDSIPHSWLIQILKTYKVDNRLIEFLQDTMKNWTTKLSLRTNNTTITTHPIKILRGIFQGDSLSPLWFCLAINPLSRILNKTDYGYTIDKESNIRVTHLLYMDDIKLYAANREQIDHLLKLTENFSTDIKMTFGTNKCKINSIIKGKQKETHPFELQTQEGTIDSMEPKDTYKYLGYQQSASLNHTHIKHTLKTKYKQRLHKILNTQLSARNKVKAVNTYAIPILTYSFGIIKWSDTELEALNTITRTASYKHNIHHIHSAIQRFTLKRKFGGRGFLDIKNLHYTQVDNLRTYFLTKAHESNLHKAIVHLSQSGTPLQLHNSEFDPKLKILKDEQKIENWKKKALHGKYPHQLEQDHIDYTASCSWLTKGNIFGETEGFLVAIQDQIIKTRNYSKYILKETIGTDKCRLCHQTTETIDHITGGCSILANKEYTHRHDNVAKHIHQQLALKHKLLQSYTPYYQYKPKNVLENKTVKLYWDRDIITDRTILSNRPDITLTFKSSKITFLIDIAVPNTHNLKQKHTEKIQKYIPLADEIKQMWHQESVRIIPIIISSTGVIPKTLKTALKQLDLHENTYIPMQKSIVIDTCSIVRRFLNPTSLNLQPHQDTHTNLVPENSSTNTRNTQTHIAPNIHIINHPNHTNSHESGYLA

SEQ ID NO: 1152 - protein, 1345 aa, Muschampia orientalis
MRLRNRQLPHAGTREGQSRPGPSDPGCPTYSGEGNASHKTTQPHTVVVEKPHNTSGSTSPISSTHSLFNSPSSSSHSYELEHSSSRSTNTTPLSCDVAEEALAISPLSIPDITNHTRALQNNTSNRVNHNTHIPSLHNNTPVRSVLREMLPATTLTGKIRQRMKWTDQINKELLRCYYIVTQLETNLTAWRPLLKQKFSDSVPELSHLSEQRLADQIRVIHRNNRIPVSEREEIKESVSILLSSLHSPNSLLDTNNTIREIDTHVTLSNNNHQTQSITHLPSHFDLNQHITQVHNIQIRSNEPFINIEHVETQIPKILQNPPEQINYEKVENTFTEMLTKYTGTDPTLRPTIPKLQITRQTIKTVNATNEIIGKHLKNKNPISLEDIHDIIYCAAQTITTLHYHYDNKLRNTTENYNKVKHVKTQWEKRLESKIAMLRKEIGQLTQYLKGNLTQKKQRKLNPNNRSNQEIIELLDNCKQKLQAHSKRLRRYKISHQRKSHNKLFNTNQKLFYRTLNEGHMKITEPPEKDSIETYWKNLWSKAEHHNTHASWTKIEGQETSNIAPMPEITIDKEDVSIAIRKTLNWKAPGPDKIQNYWIKYLSSTHEYISKIFNHLIHNPQESPKFLTQGITYLKPKDNDTTNPAKYRPITCLPTIYKLLTSIISHKLNTHITRNQIILEEQKGCRKGSKGCKEQLIIDSEIHTQVKQKHTNLFYAYIDYQKAFDSVPHSWLVQILKIYKVDSKLVQFLQHTMKNWTTKLHLYTNKTPIITQAIKISRGIFQGDSLSPLWFCLALNPLSRILNNSDYGYIIDKENNTKITHLLYMDDIKLYAANKQQIDHLLRLTENFSIDIKMSFGVNKCKVNSIIKGQYKQTDAFDLNLQGGKIDSMEPNETYKYLGYQQSTSINHTDIKNTLKIKYKQRLHQILNTQLSARNIVKAINTYAIPILTYSFGIIKWSDTELEALNTLTRTVSYKHNIHHIHSAVQRFTLKRKLGGRGVIDIKNLHYIQIDNLRKYFIMKSKENALFNAISNLHQNGTPLKLKNNEFDPTLKIQTDEQKIESWKKKALHGRYPHQLEQEHIDQNASCTWLTKGNIFAETEGFLVAIQDQIIKTRNYSKYILKEAIETDKCRLCHQTTETIDHITGGCSILANKEYTHRHDNVAKHIHQTLALKYKLLETYTPYYQYKPKNVIENNTSKLYWNRDIITDRTILSNRPDITLTLKSTKTTYLIDISVPNTHNLKQKHAEKVQKYIPLADEIKQMWHQETVKIIPIIISSTGIIPKTLKTALKLLDLQENTYVPLQKSIVIDTCSIVRRFLNPTTLSLQEVNPTTFSSQQENQQHHLSE

SEQ ID NO: 1153 - protein, 783 aa, Ypsolopha scabrella
MPEISINIDDVTYAIKNTLNWKAPGPDKIQNYWLKYLTSTHKYIASTLNHLLHNPQDIPPFLTQGITYLKPKDNDTTNPAKYRPITCLPTIYKLLTSIISHKINSHLTSNKIIPEEQKGCSKGSRGCKEQLVIDTEIHNQVKKKHRNLYYSYIDYQKAFDSVPHSWLLHVLKMYKIDNRLIQLLEYAMTNWKTKLNIRTNNTTLSTPSIKIARGIFQGDSLSPLWFCLALNPLSRILNKTGYGYNIDTGNDIKLTHLLYMDDIKLFAANRQQINHLIRLTEEFSRDIKMTFGTDKCKINSMIKGQHKETDPYILEQQTGTIDSMEPKETYKYLGYQQSTSIDHTEIKNALKTKYKQRLNKILKTQLSARNKTKAINTYAIPILTYSFGIVKWSDTELEALNTTTRTTCNKHNIHHIHSAIQRFTLKRKLGGRGFIDIKNLHYTQIINLRSYFHTKANESAIHKAIVNLPQPGTPLQLNNSQFEPKHKITTDEQKLENWKKKALHGRFPHQLDQEHIDKTASCTWLTKNNIFGETEGFLIAIQDQIIKTRNYSKYILKETIETDKCRLCNLASETIDHITGGCSTLANKEYTHRHDNVAKHIHQQLALKYKLLQSYTPYYQYKPKKVIENSSAKLYWDRDIITDRTILSNRPDITLTLKSTKTTYLIDISVPNTHNLKQKHTEKIQKYIPLADEMKQMWKQETVKIVPIIISSTGIVPKTLKKALELLDLPIKTFIPMQKSIVIDTCSIVRRFLNPTSLPLLTNHTTPHINTTHSMPPNTQEMQ

SEQ ID NO: 1154 - protein, 1305 aa, Blastobasis lacticolella
MRRSTRIKNKNAAQSTTVAATSSSSSPTRISTASSPISSTQSIFQSPSSSPHSYQHHYGSSSRSTTISPVSYDVAHEASADSHVSTVDTTNPTLLSQTNTLNCVDHNTQISLPIRDTPARSVLQEMLPATTIAGKSRQRMKWTNEINIELLRCYYIVTICETDLTAWRPLLRQKFVEKFPELNHLSEQRLSDQIRVIHRNNRIPAPERERIKQSLSTNLIDDRINQSNNILVDPHISNTPTQCDIEQTMIVSQSPPQAIINTQQTPNDIETTQIITPIEQTQNTEIESATEPIVYEEIESIFTEMLIKYSGTDPTLRPAIPKQQTTRKLIKTMNTVNDIVEKHLQNKEAVSIEVIHEIIYCAAMTVTKIHAKKPTKVVETASNTSNTTKDNQKRPCWELRLENKIKALRKSIGQLTQYLNGHLTKKNQQKLNPNNKSRQEMVDLLDTNKQKLQAQAKRLSRYKKSNRRKSDNILFNTNQKIFYKKLNSENITVTQHPDTANVQKYWENLWSIPVQHNAHTSWTEIEEREMENINPMPEITIETEDVTQAIKRTLNWKAPGPDKIQNYWIKYLTSTHTHIAIALNHLIHNPQDIPAFMTQGVTYLKPKDNDTTNPAKYRPITCLPTSYKLLTSIISQKINTHISTNKILPEEQKGCSKGSMGCKEQLIIDTEIHNQVKKRHRNLHYSYIDYQKAFDSVPHSWLLHVLKIYKIDNSLIQFLQHAMTKWTTKLSLSTNSTTLTTAPINIARGIFQGDSLSPLWFCLAINPLSRILNNTPYGYTIDRENNIKITHLLYMDDIKLYASNKRALDHLLKLTENFSTDIRMTFGTNKCKINSIIKGQHSKTDSFALELQGGTIDSMEPKESYKYLGYHQSTSINHTDIKNLLKSKYKQRLHKILSTQLSGRNKVKAVNTYAVPILTYSFGVINWSDTELNALNTLTRTTSNKYNIHHLHSAVQRFTLKRKLGGRGFIDIKNLHYTQIDNLRSYFLQKSQESTLHKAIVNLTTSGTPLQINNNQFEPKTKVLQDEQKIENWKNKALHGKYPHQLAQDHVDPIASSTWLTKGNIFGETEGFLVAIQDQTIKTRNYAKYILKESIETDKCRLCHQHTENIDHITGGCSILANKEYTHRHDNVAKHIHQQLALKHKLLETHTPYYKYKPKNVLENDKANLYWDRDIITDRTILSNRPDITLILKPAKTTYLIDIAVPNSHNLKQKHAEKVQKYIPLADEVKQMWHQETVRIIPIIISSTGVVPKTLHTALKMLDLHEKTYVPLQKSIVIDTCSIVRRFLNPTSLTLQDSQITNQDI

SEQ ID NO: 1155 - protein, 1002 aa, Thymelicus sylvestris
MVVKYAGMDPTLRPTIPKLQITRQNIKTVNATNEIVDKYLKNKDTITLEIVHDVIYCAAITVATFHTKQPNKTTTHTSFTSNNKTEKQKEPQWKKRIENKITLLRKEIGQLTQYLNGNLTQKKQQKLNLHNANRQEIVDQLDTKKQKLQAQAKRLNRYKKSNQRKSDNILFKNNQKIFYQKLNSESITVTQQPDITHVQKYWENIWSKPVQHNTHTTWTKIEEQEMGNIEPMLEITISKDDVTHAIKRTLNWKAPGPDKIQNYWIKYFTSTHIHIANAFNYLIKNPKDMPAFLTQGVTYLKPKDNDTTNPAKYRPITCLPTIYKLLTSIVTHKINSHISINKIIPEEQKGCSKGSMGCKEQLIIDAEIHNQVKHKNRSLYYSYIDYQKAFDSVPHSWLLHVLKIYKIDNNLIQFLQHAMTKWTTKLNLRTHTTTLSTSQIKIARGIFQGDSLSPLWFCLALNPLSRILNNTPYGYTIDKENKIKLTHLLYMDDIKLYASNKQELNHLLSLTEKFSTDIKMTFGTSKCKINSISKGQHCKTDSFELALQGGTIDSMEPRESYKYLGYQQSTSLNHTDIKNTLKTKYKQRLNKILNTQLSARNIVKAVNAYAVPILTYSFGIIKWSDTELNALNTVTRTLCNKHNIHHIHSAVQRFTLNRKLGGRGFIDLKNLHYTQVQNLRTYFIQKADDSTLHKAILNIYHSGTPLQLNNHQFDPKTKILRVDQKIENWKNKALHGKYPHQLEQDHVDKNASTAWLTNGNIFCETEGFMIAIQDQVIKTRNYSKFILKDPIETDKCRLCHRYTESIDHITGGCGVLANKDYTHRHDNVAKYIHQQLALKYKLTDTHTPYYKYKPVNVLENSNVKLYWDRDIITDRTILSNRPDITLILKSTKTTYLIDIAVPNTNNLKQKHTEKIQKYIPLADELKQMWHQESIKIVPLIISSTGVIPKTLHTALKTLDLHPKTYIPLQKSIILDTCSIVRRFLNPTSLTLQDSPDITNTQT

SEQ ID NO: 1156 - protein, 1360 aa, Pyrgus malvae
MRLRNRQIPQVGTREGESRPGPSGSGSPAYSGGGNALHMTAQARTDAANTNNQNHTSSHISSDPPSPISSTESLFQSPSSSPHSFQFQSTSRSTTISPLSCDVAQEALAISPVPTLGNNDPTRPSENNINNRVNHYTSSSLNHNTPARSALQEMLPATTLAGKCRQRMKWTEQINTELLRCYYIVTCKETNFTAWRPLLHERFIQKFPDLSHLSEQRLSDQIRVIHRNNRIPASKRELIKQSISVTTTPHCSNVHQPTNNDISTENGCNSNIDTITDIVVQNNSITAQSVTSLQTHNHPTQTHPIPINTEHVQIQDFETTNTTPESINYTKVENTFKEMLIKYTYTDPTLRPIIPKLKITRHVIKTVSTINQIVDKHLSTKNTLSLEEIHVVIYCAAQTVATLYTSRLNNFENHTKDNNANRQIKSRKPKWEKRIETKIETLRREIGQLTQYLNGNLSLKKQYKLNPHSRSRDDITTQLDTDKQKLQAYSKRLRRYKKSNERKYHNKLFNNNQKLFYQKLSTDQIQITQPPDKNDVHNYWTKLWSNPVQHNTHLSWSEIEEEEHANVNPMSELKIDVEDVIQAVKKTLNWKAPGPDKIQNYWLKYISATHKYIANTFNHLLHNPQDTPLFLTQGITYLKPKDNDTTNPAKYRPITCLPTIYKLLTSIISHKLNTHITTNQIIPEEQKGCSKGSRGCKEQLVIDTEVHYQVKKKHRNLAYCYIDYRKAFDSVPHSWLIHILKIYKVDSILINFLQHTLKNWTTKLHLRTENTTLSTPIIKILRGIFQGDSLSPLWFCLAINPLSKILNNSGYGYIIDREHNVKLTHLLYMDDIKLYASNRTQLNHLLKLTEKFSADIKMSFGTEKCKINSIVKGKYDEAQPFDLHIQRGTIDRMEPMETYKYLGYQQSTSVNHTDIKNTLKVKYKQRLHKILNTQLSARNIVKAVNTYAVPILTYSFGIIKWSDTELEALNTTTRTVSYKHNIHHIHSALQRFTLKRKLGGRGFIDIKNLHYIQIKNLREYFLTKADTSPLHNAIVNLSQSGTPLQLNNHAFDPKIKILTQDQKIEGWKNKALHGRYPHQLDQDHIDRNASCTWLTRGNIFSETEGFLIAIQDQIIKTRNYAKYILKESVLTDKCRLCHQSTETIDHITGGCSALASKEYTHRHDNVAKHIHQQLALKYKLLESYTPYYQYKPKHVIENNAAKLYWDRDIITDRTILSNRPDITLTLKSSKTTYLIDIAVPNTHNLRQKHTEKIQKYIPLADEIKQMWHQDTVRIIPIIISSTGLIPKTLLTALKILDLKENTYIPIQKSIIIDTCSLVRRFLNPTSLIINDEHNTNTNTTSHNTTHMHTTADTQEPGYLA

SEQ ID NO: 1157 - protein, 1354 aa, Lobocla liliana
MRLRNRVLPQAGTHTGESRPGPSGSGRPTYSGGGTVSLRSAQSSTVAATGDKSSPLHHSPASSISSTHSLFQSPSSSPHSYELHQAYKSTTTSPMSSDVAQEPPVNSLVPTTDITHPTQILPNNLSNCVDHNIHNTPTSSLDINTPARSVLQEMLPATTLAGKSRQRMKWTKEINIELLRCYYTVSLCETDMTAWRPLLYQKFIEQFPELSHISEQRLADQIRVIHRNNRIPVNQRESIKQTILQTLPSTNNIDNTIDEEVLTQDTPTTQNTPNTQHTQSHIRDHQTITLPQTTRALETSEHIQTQENEQVNTAVKPINYEQIENIFTEMIIKYTGTDPTLRPTIPKLQTTRQMIKTVNTINEIVDKHMQNKETITLVEVHEVIYCAAITVATLHDKKSIKTVEHTSFTSNSQTNKQKEPQWKRRIENKIASLRKEIGQLTQYLNGNLTMKKQHKLNPNNKNRQEMVDQLDTNKQKLQAQAKRLHRYNKSNQRKSDNILFKNNQKIFYHKLNSENITVTQQPDIAHVQKYWENIWSKPVQHNTHTSWTEIEEQEMENIEPMQEITIDKDDVTQAIKRTLNWKAPGPDKIHNYWIKYLTSTHIHIANTLNNIIKNPHEMPAFLTQAVTYLKPKDNDTINPEKYRPITCLPTIYKLLTSIITHKINLHITTNKIIPEEQKGCSKGSMGCKEQLIIDAEIHHQVKVKNRNLYYSYIDYQKAFDSVPHSWLLHVLKIYKIDNNLIQFLQHAMSKWKTKLNLRTNTTTLSTSHIKIARGIFQGDSLSPLWFCLALNPLSRILNSTTHGYTIDRENKIKLTHLLYMDDIKLYASNKQELDDLLRLTEKFSTDIKMTFGTSKCKISSITKGQHSGTDSFELELQGGTIDSMEPRETYKYLGYHQSTSINHGDIKNTLKIKYKQRLNKIFSTQLSARNTVKAVNTYAIPILTYSFGIVKWSDTELDALNTVTRTISNKHNIHHIHSAVQRFTLKRKLGGRGFIDIKNLHYTQIENLRKYFNRKAHDSTLHEAIVNMPHSGTSLQLNNERFDPKTKILKEEQKIESWKKKALHGKYPHQLEQDHVDRNASIAWLTNGNIFSETEGFLIAIQDQIIKTRNYSKYILKEAIETDKCRLCHRYTESIDHITGGCNALASKEYTHRHDNVAKYIHQQLALKYHLTDTHTPYYKYKPKNVLENRNVKLYWDRDIITDRTILSNRPDITLIVKSIKTTYLIDIAVPNTNNLKQKHTEKIQKYIPLADEIKQMWHQETIKIVPIIISSTGIIPNTLHTALRTLDLHPKTYIPLQKSIILDTCSIVRRFLNPTSLSLQNAPDNTTTLISTRTHNMQTDTHSTHYHHSPSSQ

SEQ ID NO: 1158 - protein, 1373 aa, Emesis angularis
MRLRNRKLPQAGPQTGESRPGPSGSGCPTYSGGGTVSLRSAQSSTVAARDVNASPLHYTNSSSPISSTHSLFQSPSSSPHSYQFHQSPSSTPTSIMSIDVTQVAPASYLVPTIDITNSTRFSPSNYALPCVDHNTQSSHSNINTPARTVLQDMLPATTLAGKSRQRMKWTNDINKELLRCYYLVTNCEKDLTGYRHSLQAKFIETYPELHHISEQRLADQIRVIHKNNRISQPERERVKHSVTQINSSSNNIHLENNNITETQGATSIHSINIEQSRPDLPLIEGSSQDSIHTSTQQSYITIQPSPIVVNNDHNIQTTDSEILTRNLNKITSETIVNTFKEMLIKYTGTDPTLRPPIPKIQTTRYTIKTINIINDIVGQHLQRMNTHTLEELHEVIYSAALTVTIIHTKRVANSDKNANTNKIKTYGLNQSPWEKRLDSKIAMLRKDIGQLTQYLKGNLSYKKQLKLNIYDKNGDEIMNILDNYKQKLQAYSKRLKRYKKSNQRKSDNNLFNTNQKLFYQKLNSNRIQITQTPDIDTIQTYWKSIWSKPVKHNTHTPWTEIEEQEMSNIDLMAKVVINEEDIVLSIRKTLNWKAPGPDKIQNYWYKYLTTTHKYIARTLNDVILNPEKMPTFLTQGITYLKPKDCDTTNPSKYRPITCLPTLYKLLTSIIANKLQTHISQHNILPEEQKGCSKGSKGCKELLVIDTEIHNQVKQKHRNLYYSYIDYQKAFDSVPHSWLIHILKIYKIDNDIIQFLQYAMTKWTTKLTVRTLDKTLCTQPIKIARGIFQGDSLSPLWFCLSINPLSRILNRTDYGYKIDRDNNIKLNHLLYMDDIKLYAGTRNQLDQLLKLTEQFSTDIKMTLGTDKCKINCINNGQYKQTDNFNLELHGGLIESMEPKDTYKYLGYHQSTCINHSDIKNILKSKYKQRLQKILNSQLSARNKTKAVNTYAIPILTYSFGIIKWSDTELNALNTATRVASYRHNIHHIHSSVERFTLKRQLGGRGFIDILNLHYSQIDKLRSYFFTKANNSAIHNAVINISHSGTPLQFNNRSFDPKSKKMSETQKLENWKKKALHGKFPHQIDQNHIDRNASCHWLTKGNLFGETEGFMVAIQDQVVKTRNYSRYIMKENIETDKCRLCHKNTETIDHITGSCSILAYKEYTHRHDNVAKHIHQQLALKYGLINQYTPYYKYKPKQVLENNTIKLYWNRDIITDRTILSNRPDITLSLKSLKTTYLIDISIPNTHNLQQKHTEKIQKYIPLADEIKQMWHQETVTIIPIIISATGVIPKTLHKSLSVLDLQENTYIPLQKSIVIDTCAIVRRFLNPTTLSLQNTQNVVNTNQASTSSTLPPTSQNTTFMQIYNGHSTFNKHMN

SEQ ID NO: 1159 - protein, 1336 aa, Ernsta delagoae
MEKSSKRIYSLRPLPGGRRGTSGVGAGCDSMRTVDGQELSRRAPAGNVPEVTTAEIVSSPSSPISSNRSLFQSPSSSPHSYENPSTSRSSSISPMSFNVARRPLANSVVPMNDTNKSTQGSIRDTNNICVEDSNIPPTLPHKNVLQEMLPATTLAGKSRQRMKWTDEINRELLRCYYKVTKCETELTTYRPLLYDTFTSIYPELRNLTQQRLSDQIRVIHKNNRISPSERLRIKQEITSLITTRNTESQNTTLNNNITQTQDNHILDRTLISGALDENLSTANIICTETENPPAQNDITQYTDIFTQNTHMIRRTQNNSDIDVNLEKIKEKFHENLKNFKNIDPTLRKPIPKLQISHAAIKTVNLMNSILHTYLQNKNTHSLEELHLIIYSAAITITSIHVKTNQKTINTSNKNKQKKPFWKIRIIKNIETLRKSIAHMTQYLNGNLSLKKQKKVNPKNLDSDQLIEELDKSKQKLAAYSKRLKRYEESNRRKIENNLFQSNQKLFYRQLNSEHINITQTPDESHLQQFWEGIWSTSENHNSDAEFIELEKLETVDIEMMPPVAINVDDVKCSIKKVLNWKAPGPDKIQNYWLKYLTSTHTQLANAYNTIIHQPHNMPTFLTQGVTYLKPKDSDTANPAKYRPITCLPTMYKLLTSIITHKLNTHITRNNIIPEEQKGCCKGSMGCKEQLVIDAEIHNQVKQKHRNIFYSYIDYQKAFDSVPHSWLIDVLKLYKIDDNLINFLRYTMTSWTTTLNIHTDNTILKTNVIKIRRGIFQGDSLSPLWFCLAINPLSKILNRTNYGYTLDKKNNIKITHLLYMDDIKLYATNRQQLNHLLTLTEQFSKDIKMAFGLDKCKINCIMKGKYKETEPHILTVQEGTINNMSYRETYKYLGYEQNTTIKHAEIKANLKTIYKSRLNKILKTRLSARNKTKAINTYAVPILTYSFGIINWSETELNALNTLTRTTCNKYNIHHSHSAIERFTIKRKNGGRGFVDIKNLHYSQIHNLRVYFQNKADNSSLHNAIVNLNTSGTPLKLNNIQYDPKQKIQTEEEKIENWKKKTLHGKYPLQLQQPHIDKDASNTWLTKGNIFGETEGFLVAIQDQVIKTRNYSKYIIKERIETDKCRLCHQTTESIDHITGGCSFLANKEYTYRHDNVAKHIHQQLAIKHKLLHTYTPYYQYKPKNVLDSSDAKLYWNRDIITDRTILSNRPDLTLTLKATKTTYLIDISVPNTNNLQQKFTEKIQKYLPLADEIKQMWHQDSVRVIPIIISSTGIVPKTLITALHSLQLPKNTYIPLQKSVVLDTCSIVRRFMNPSTQPFHTSNHTETHTEQNINTT

SEQ ID NO: 1160 - protein, 1172 aa, Telemiades fides
MKWTDEINKTLLRCYYIVTHNETDLTAWRSLLHQKFVETIPELRHLTEQRLADQIRVIHRNNRISANEREQLKRSLSSLTPPSNLPSDYNSTNIVEHQSAFNTTPTINNHTQTTNLQSEMLTPQNVLTTIQYPSTIAQSYGPIENSDHTQTDHSEKTNRQSDSPDYNKIENTFTEMLIKYTGTDATLRPSIPKIQTTRNMIKTVNVINEVINKHLQTKSTISLEVIHTIIYCAAQAVVTLHTKLENNAYYNDRKKINQQKKPQWEKRIENKIVILRKEIGQLTQYLKGNLTQKKQYKLNLNNKSRHEITDQLDSNKQKLQAYSKRLRRYKKSNQRKSQNKLFNTNQRLFYQKLNTEEIQVTQTPNKDDVYNYWRNLWSKPVQHNIHPPWTELEGEEMENVETMPQIIIAKEDVLQAIRKTLNWKAPGPDKIQNYWIKYLPATHGHLANIFNHLINNPLDTPHFLTQGITYLKPKDNNTSNPSNYRPITCLPTIYKLLTSIISHKLNTHIKRNQIISVEQKGCSEGSKGCKEQLIIDTEIHNQVKQKHRNLYYAYIDYQKAFDSVPHSWLIQILHIYKVDHRLVQFLQSIMTHWTTKLSLRTNNTSFCTQPIKILRGIFQGDSLSPLWFCLAINPLSKILNKTGHGYIIDRESNIKLTHLLYMDDIKLYAASRPQIEHLLKLTENFSTDIKMSFGTNKCKINSIIKGQQKETDPFELEIQRGTIDSMQPKETYKYLGYQQSNSLNHTHIKNNLKSIYKQRLHKILKTTLSARNKVKAINAYAIPTLTYSFGIIKWSDTELEALNRMTRTASNVHNIHHIHSAVQRFTIKRRLGGRGFIDIKNLHYTQIDNLRTYFLTMAKESALHKAIVHTSQGGTPLHLKNNQFDPNLKILKEEQKIVSWKMKALHGKYPHQLEQDHIDYSASCSWLTKGNIFGETEGFLVAIQDQIIKTRNYSKYILKEPIDTDKCRLCHQATETIDHITGGCSVLANKEYTHRHDNVAKHIHQQLALKHNLVESYTPYYQYKPKHVLENNTAKLYWDRDIITDRTILSNRPDITLILKSCKKTYLIDIAVPNSHNLKQKHTEKIQKYIPLADEVKQMWHQESVKIVPVIISSTGVIPKSLKTALKMLDLHENTYIPMQKSIIIDTCSIVRRFLNPTTLTFQNNETHTPTQ

SEQ ID NO: 1161 - protein, 1392 aa, Zerynthia polyxena
MPREGRTLAALGYTLTNDQRSTSKSKIVMRLRSKTRLLQAGTRNGESRPEPISSGSLTYSGGGTVSLELAQTSTAAGNTNKNNIKSSDTPSYPLSSQSSTQSFSQSSNSPPQYIQSTSSSRASTLSPILGNAVQEALANCPAPITDIINPTHTSQTNLFSNRVDINTQTHDTNSNTPTRSALLDMLPATTLAGKSRQRMKWTNKINHELLRCYYIVTNCEENLTAYRPLLHKKFTDIFPELGHLTEQRLADQIRVIHRNNRISAADRETIKQSVSHKIVTLHNPNILTNVNDLGAQISTNGNHSINSHTRQTIINNNNLIDNDDENIHTPEIINNTQQAPVPTLHTSPMTHSSYSIPTEHTLYIGPQETYEHSLTQDPEEDIATKDHENYREIEKTFIEMYIKYTGTDPTLRPVIPKIQTTRRTIKTVNTINEILNKFLQNKELVTTEDIHEVIYCAALTVSTLHTKAKNNKDLTKTNTYSNSAYRQKIPQWQFRLENKITVLRKKIGQLTQYLNGNITQKKQQKINPNNKNKDEILDELDNYKQKLQAYSKRLRRYKISNQRKADNNLFNSNQKLFYRNLNKEHILTTEPPNMSEVKQYWENIWSKPLQHNSHSSWATIEEQEVDDIDPMPEFTINKEDVERAIRNTLNWKAPGPDKVQNYWLKYLTATHEHLAIALNLLIREPHNTPAFLTQGITYLKPKDTDTTNPTNYRPITCLPTMYKLLTSIISYKLNIHITQNNIIAEEQKGCCKNSRGCKEQLAIDAEIHYQVKQKHRNLFYSYIDYQKAFDSVPHSWLIHVLKIYKTDHNLIQFLKTIMTKWTTKLNIRINDTNLTTAPINILRGIFQGDSLSPLWFCLALNPLSRILNTTGHGYILDKETNTKLTHLLYMDDIKLYATSRQHLEYLLRLTEQFSKDIKMTFGTDKCKINSIIRGQHKQTNPHHLDFQNGLINSMEFRETYKYLGYHQSTTLPHSEIKDTLRNKYKQRLNQILKTQLSARNKTKAINTYAVPILTYSFGIIKWSFTELEALNTLTRRICNTHNIHHIHSAVERFTIERKNGGRGFIDIKNLHYLQVYNLRTYFYNKADNSKLHKAIINLSTCGTPLQLNNRQFNPKQKITENEKKIENWKKKALHGKYPHQLQQEHIDHKASNTWLTKGNIFGETEGFLIAIQDQIIKTRNYSLYILKEHVETDKCRLCHHSTETIEHITGGCSALANKEYTYRHDNVAKHIHQQLALKHNLLKTYTPYYKYKPTNVLENNNAKLYWNRDIITDRTILSNRPDITLTLKSVKTTYLIDISVPNTNNLKQKHTEKIQKYIPLADEIKQMWHQDFVKVVPIIISSTGVVPKTLSNAMRLLELEKSTYIPLQKSIVIDTCSIVRRFLNPSSLPIHN

SEQ ID NO: 1162 - protein, 875 aa, Codatractus imalena
MRRYKISNERKSQNKLFNTNQKLFYQKLNAEQIHITQPPDINDTQNYWKNIWSNPGQHNTHTSWSKIEEQEVENIDPMPEVTISKDDVLRAIKKTLNWKAPGPDKIQNYWIKYLTATHEHIANTLNRLLHNPRETPYFLTQGITYLKPKDHNTTDPSNYRPITCLPTIYKLLTSIISHKLNEHITQNHIIPEEQKGCSKGSRGCKEQLVIDSEIHTQVKLKHRNLYYSYIDYQKAFDSIPHSWLIHILKIYKVDSTLIQFLQHTMKSWTTKLNLRTNHMSFCTQKIKILRGIFQGDSLSPLWFCLAINPLSRILNRSDSGYVIDSNTNTKLTHLLYMDDIKLYAANRQQLDHLLRLTENFSTDIKMTFGIDKCKINSIIKGKHKDIEPFELVSQKGTIESMVQRDTYKYLGYHQSTSINHTDIKNTLKTKYKQRLHKILNTQLSARNKIKAVNTYAIPILTYSFGVVKWSDTELESLNTATRTISNKHNIHHIHSAVQRFTLKRRLGGRGFIDIKNLHYTQIDNLRTYFLLKAKESTLHKAIVRLPQTGTPLQLNNSEFDPKLKILKDDIKIENWKSKALHGKYPHQLEQDHIDYNASCTWLTKGSIFGETEGFLVAIQDQIIKTRNYSKFILKEAIDTDKCRLCHQSTETIDHITGGCSVLANKEYTYRHDNVAKHIHQQLALKHNLLQSYTPYYQYKPKNVLENDTAKLYWDRDIITDRTILSNRPDITLTLKSSKTTFLIDIAVPNTHNLKQKHTEKNQKYIPLADEIKQMWHQETVRIVPIIISSTGVIPKTLKPALKLLNLHENTYIPMQKSIVIDTCSLVRRFLNPTTLTLQNHQHNSTELIHAHTKYTSTQGTKHTHHHPPHPHKHMN

SEQ ID NO: 1163 - protein, 1350 aa, Typhedanus ampyx
MRLRSRQIPQAGTRKGESRPGPSRSGSPTYSGEGNASHKTTQCRTVVVDKSQTNSTSHPSSPISSTHSLFQSPSSSPYSYQQSLSRSTTVTPLSCDVAQEAQADSPEPTTDITNHTRVLVLQNNTLNRVDHNAQTDTSHMNTPARSVLQNMLPATTIAGKSRQRMKWTDQINQELLRCYYMVTQNETNLTAWRPLLHHKFSERFPELKHISEQRLADQIRVIHRNNRIPAPDRERIKQHISTLTIATNRSNNTNTNHSQQQIISPLTHVPKSQHQSTITQVKATTQTSYFFENHEHAQTQDLNKTNKPCDHIDYEKTENTFNEMLIKFTGTDPCLRPTIPKPQIDRRVIQTINDTNKIIEKHLQAKKVITLEEIHEVIYCAAQTIGTIHTQHIKKIENTNKKINDVDIINTRKPQWEKRIDNKIDILRKEIGQLTQYLKGNLTQKKMQKLNPYNNSRDDIIEKLDKSKQKLQAYSKRLRRYKKSNQRKSQNLLFNTNQKRFYQNLNADKIKIITPPNKDDLQNYWRDLWSKPVQHNTGASWIKIEEHDIQKIDPMQKINIDINDVSQAIKKSLNWKAPGPDKIQNYWIKYLSATHKHIAVAFNKIIENPQETPSFLTQGITYLKPKDQETSNPANYRPITCLPTMYKLFTSIITNKLNIHITQNNIIGEEQKGCRKGSRGCKEQLVIDTEIHNQVRQKHRNLFYSYIDYQKAFDSIPHSWLIHTLKIYKVDNTLIKFLQHTMNNWSTKLHLQANNTSINTYPIKIRRGIFQGDSLSPLWFCLALNPLSRLLNKSGFGYVINRDSNIILTHLLYMDDIKLYASTRQHINHLLRLTENFSTDIKMILGTDKCKISSIIKGHHKETDPFQLETQEGIIDSMDYKDTYKYLGYKQSTSINHTEIKNILKAKYKQRLHKILNTQLSARNKIKAVNTYAIPILTYSFGIIKWSDTELEALNIATRTASYKHNIHHIHSSVQRFTLKRNLGGRGFIDIRNLNYIQIHNLRSYFLIKANDSALHRAIVQLPHSGTPLQLNNNEYDPTLKIIKDEDKLESWKKKALHGKYPHQIEQDHIDRNASCTWLTKGNIFGETEGFMIAIQDQTIKTRNYSKYILKEPIQTDKCRLCHQTTETIDHITGGCSVLANKEYTHRHDNVAKHIHQQLALKYKLIDSYTPYYKYKPKKVMENSSVKLYWDRDIITDRTILSNRPDITLTLKTSKTTYLIDISVPNTHNLKQKHSEKIQKYIPLVDEIMQMWHQEFVKIVPIVISSTGVIPKTLKFALQILDLHEKTYIPLQKSIILDTCSIVRRFLNPTTVTLPNDTTANITTGNLHTQTTYDTQLHHTSHHPNLTLLT

SEQ ID NO: 1164 - protein, 1353 aa, Ebrietas anacreon
MRLRSRYIPQAGTSLPGEGESGPEPSSSGCPTYSGGGNVAHMTAQPPAVAVEQSPPSHSPVHSSSPISSTHCLFPSPNSSPQSYNLHESSSSCSPPTSSMSCDAVQEASAILHEPTTDITNLTRASQRNTNSRVHHTVYSSSSIINTPARSVLQDMLPATTLAGKSRRRMKWSDAINKELLRSYYLVTHNETNLTAWRTLLHQHFIEKFPELRHLPEQRLADQIRVIHKNNRIPVTERESMKQLVSSLILSNTNQHSDTNTQSNVNTPTTSTNPQINTNTPLQTLSPQNSQTLNPAQVDLNWEHAHTQTFPTINDPHNLVDYKLIENTFTEMLIKYTGTDPTFRPTIPKLQTSRKTIITVTTANEVINKYLQNKETISLEDIHDVIYCAAKAVTLLHSNFHDKNDSVVESTPEKKCNIQRKPQWEKRIEDKIITLRKEIGQLTQHLKGNLTQKKQYKLNVEYKSKDEIIEKLDKDKQKLMAYSKRLRRYKISNQRKSHNKLFNSNQKLFYQKLDTNCINVIQPPNIDDLQNYWKTLWSKPVEHNKNTSWAHIEEQETDRIRPMPAILIDKDDVSEAIRKTLNWKAPGPDKIQNYWLKYFTATHIHIAKMFNNLIKNPQDTPSFLTHGITYLKPKDNDTTNPAKYRPITCLPTIYKLLTSIITHKLNTHITLNQIIPEEQKGCSKGSRGCKEQLIIDTEIHNQVNQKHRNLFYSYIDYQKAFDSVPHSWLIHILKIYKVDAILIEFLQYLMKNWTTKINLRTSNNIICTSTIKILRGIFQGDSLSPLWFCLALNPLSNILNKTGYGYVIDKENNTKLSHLLYMDDIKLYAASRQELNHLLKIIETFSTDIKMAFGTDKCKINSIIKGLYNETDGFALNKQGGTIDSMDPTETYKYLGYQQSSSLNHTEIKNTLKTKYKQRLHKILNTQLSARNKTKAVNTYAIPILTYSFGIIKWSDTELEALNITTRTMSNKHNIHHIHSSVQRFTLQRKLGGRGFIDIKNLHYTQIDNLRTYFIEKSHTSSLHKAIVNLSHSGTPLQLQNKQYNPKLKILTDDQKLENWKKKALHGKFPNIVQQEHVDRNATYTWLTKGNIFSETEGFLIAIQDQIIKTRNYSKFILKETIESDRCRLCHQAPETIDHITGGCNTLANKEYTHRHDNVAKHIHQQLALKHNLIDSYIPYYKYKPKNVIENNTAKLYWDRDIITDRTVLSNRPDITLTIKASKTTYLIDISVPNTHNLKQKHTEKIQKYINLADEIKHMWNQESVRIVPIIISSTGVVPKTLKSALKLLDLHENTYIPLQKSIVIDTCSIVRRFLNPTTLTLQTYSYFDSNPPPHNSSTPAATNTHHTSDTYS

SEQ ID NO: 1165 - protein, 1395 aa, Urbanus proteus
MPREGRTLDSILLHYSSDQQSHSKSKYAMRLRNRQIPQAGTREGESRPGPSSPGCPTYSGGGNVSHRNAQSSTVAFDKSHSPFQPSSPISSTHSLFPSPTSSPYSYQCQPSSSRSSTITPLSCDVAQEAHANSPAPTADSNNHTRVIQSNQSNRVIHNTCSPSHATNTPARSVLQDMLPATTLAGKSRQRMKWTDEINKELLRCYYIVTQNETNLTAWRPQLHRMFAETVPVLSHLSEQRLADQIRVIHKNNRIPAPQRDQIKQSVSLLLASSANSLNDHAITRHTDNLDNINTTLLTNNQLITDSHNQSPILQHTVTNTHHTYTEHPSHYRSCESSEHMQTQDSEPINRLLSLVDNQKIQEVFREMLIKYTGTDPTLRPSITKPQTTRNFVKTLNSMNEIVDKYLKTKNLVTIEEIHEVIYCAAQTVASLYTKHVKTLENSACYNNNNIRKPQWEKRIENKIITLRKEIGQLTQYLNGNLSQKKQHKLNPNNKSRDEIVEQLDNSKQKLQAYTKRLRRYKKSNERKSHNKLFNTNQKLFYQKFNSEQIQIIQPPNKTDIEDYWKNIWSVPVQHNAHNSWTEIEEQEMGNIDPMPEITIDKDDVTQAIKKTLNWKAPGPDKIQNYWLKYLPATHEYIANALNHILCNPQDTPSFLTQGITYLKPKDHDTINPAKYRPITCLPTIYKLLTSIIAHKLNSHITQNHIIPEEQKGCCKGSKGCKEQLVIDTEIHTQVKQKHRNLYYSYIDYQKAFDSVPHSWLIHVLKIYKVDNRLITFLLHTMKYWSTKLTLHTNNISLSTQKIKILRGIFQGDSLSPLWFCLALNPLSRILNKTGSGYEIDRENNIKVTHLLYMDDIKLYATNRQQLLHLLKLTEKFSTDIKMTFGINKCKINSIVKGQHHETDPHQLETQGGTIDSMEFRETYKYLGYQQSTSINHADIKNTLKNKYKQRLHKIFNTQLSARNKVKAVNTYAIPILTYSFGIVKWSDTELEALNTATRTISNKHNFHHIHSAVQRFTLKRRLGGRGFIDIKNLHYTQVDNLRTYFLFKSNESALHKAIALLPHSGTPLQLSNRQFDPKLKILKDDQKIENWKKKALHGKYPHLLEQDHIDYNASCSWLTKGNIFGESEGFLVAIQDQIIKTRNYSKYILKEPIDTDRCRLCHQYTETIDHITGGCSVLANKEYTHRHDNVAKHIHQQLALKHKLLESYTPYYQYKPKNVLENNAVKLYWDRDIVTDRTILSNRPDITLTLKASKTTFLIDIAVPNSHNLKQKHTEKIQKYIALADEIKQMWHQEHVRIIPIIISSTGIVPKTLKTALKLLDLHENTYVPMQKSIVIDTCSIVRRFLNPTTLTLQTHQDTHSSPPIQNSTKNTHNTQTHNAPNTFITVSHSNHTNT

SEQ ID NO: 1166 - protein, 1345 aa, Camptopleura auxo
MRLRSRVIPQAGTSPPSEEESGPGPSSSGCPTYSGGGNVSRMAAQPSAVAVEESPSPHIPSSLSSPISSTQSLFQSPISSPQSYEFHESLSYSSPTSHMSCDVAQEAFANYPEPTTDITINPTRAVHNDPNCRVNHNIIASTLNTNTPVRSFLQDMLPATTLAGKSRQRMKWTDQINTELLRCYYLATHNETNLTAWRPVLHQKFTEKYPELSHLSEQRLADQIRVIHKNNRISINEREKLKHTVSLSLATTNTSDYQIHTNNSQHTSSIYIAHTIQDTQTYSDSHNHVPNSQHTLVATQQMNTPTQSYLNMEHIQTPVSEITNRQQEPIHNEVIENTLTEMLIKYRGTDPTLRPAIPKLQVSHRVIRTIHNANKIVDTYLKNIEKVTLEEIHDITYCAARTITKLHGKHMGQSNTTKYNINNDTTPKKLKPQWEKRLENKITAVRKEIGQLTQLVKGNLSHKKQRKLNPSNKNIDEIVEQLDNKKQKLQAYSKRLRRYKISNQRKSDNKLFNTNQKLFYQKLHTDEIHVTQPPKSDEVETYWKNLWSKPVQHNVPTSWMEIEEHETVHINPMTEVIINKDDITFAIRKTLNWKSPGPDKIQNYWIKYLPATHEYLANTFNHLIHNPQEAPSFLTQGVTYLKPKDNDTTNPAKYRPITCLPTIYKLLTSIISHKLNAHITQNKIMTEEQKGCSKGSRGCKEQLIIDSAIHCQVKQNKRNLFYSYIDYQKVFDSVPHSWLLYILKLYKVDNQLIQFLQHTMSNWTTRLSLKTHNTSFSSHPIKILRGIFQGDSLSPLWFCLALNPLSKILNKTGHGYIINRDKNIKLSHLLYMDDIKLYAANRHQLDHLLQLTEQFSADIRMNLGIDKCKINSIVKGQYSKTEIFDLSRQEGKIDSMAADEVYKYLGYVQNTSINHTEIKNTLKTKYKHRLRRILNTQLSARNKVKAINSYAIPILTYSFGIIRWSDTELEALNIITRSTCNKHNIHHIHSATQRFTLKRKLGGRGFIDIKNLHYTQLDNLRSYFYAKSKESALHQAIVNVPKSGTSLQLNNRQFDPKLKIVSDDKKIEIWKNKALHGKYPHQLQQEHIDHDASCTWLTKGNIFSETEGFLVAIQDQVIKTRNYTKYILKQTINTDKCRLCNQNTENIDHITGGCNVLANKEYTHRHDNVAKHIHQQLALKHKLLDTYTPYYQYKPKKVLENNFAKLYWDRDIITDRTILSNRPDITLTLKCIRTTYLIDVAVPNTHNLKQKHTEKIQKYISLAEEIKQMWHQESVRIIPIIISSTGVIPKSLKTALKVLDLHENTYIPLQKSIIIDTCSIVRRFLNPTTLPLQDEHSTYHETMTQ

SEQ ID NO: 1167 - protein, 1267 aa, Cycloglypha thrasibulus
MSPMSCDVAQEATATFPEPIPDTTNPARVSENNLNTRVHHTTHLSSHISNTPTRSVLQDMLPTTTLAGKNRQRMRWTDHINRELIRCYYLVTHCETNMTAWRPLLHKKFSESFPELSHLSEQRLADQIRVIHRNNRIHASERENIKTAVSTLITQPSSLNQNIDMNTTHQLTSNVRHTCTDHTVQPNNEQNRETPDTEQTLTTTQECSTQQIQTSIEHAQTQLAEVTNGPQEMVDHKRIENVFNEMLIKYIDVDPTLRPIIPKIQISRNIINSISTVNKIIKNHFQNKETAIEEIHDMIYCAAQTIVALHNKDAKIVNKTNNDSKTVFKKEKSGWERRLENKIIKLRKEVGQLTQYKNGNLTHKKQQKLNPSNKCLDEMIDQLDNSKQKLQAYSKRLRRFKISNKRKSDNKLFNTNQKLFYQKLNNENVHIKNPPNIDDVESYWKELWSKPVYHNTHTSWIEEEETAIVDPMPRIIIEKEDVSRAIRKTLNWKAPGPDKIQNYWIKYLTATHEPLANAFNHLIQNPQDTPNFLTQGITYLKPKDNDTTNPAKYRPITCLPTIYKLLTSIISFKLNSHITRNSIIPEEQKGCSKGSKGCKEQLVIDTAIHNHVRTKQKNLYYSYIDYQKAFDSVPHSWLLYVLKLYKVDNTIIQFLQHTMHNWSTKLNIRTQNTIHCTQPIKILRGIFQGDSLSPLWFCLSLNPLSTLLNRTGYGFVIDKENNTKMTHLLYMDDIKLYASNREELDHLLKLTERFSTDIKMSFGTNKCKINSVIKGQHSETNSLNLSIQGGTIESMEFKETYKYLGFQQSTSLNHTEIKNTLKNKYKQRLHKILTTQLSARNKIKAINTYAIPILTYSFGVIKWSDTELAALNTTTRSTSNKYNIHHIHSAVQRFTLPRKLGGRGCIDIKNLHYSQIDNLRTYFLNKADTSTLHKAIVHLPQSGTALQFHNSLFDPKLKIVKDEQKIEHWKAKALHGKYPHQLEQEHVDRNASCTWLTKGNIFGETEGFLIAIQDQIIKTRNYAKYILKEIIETDKCRLCQQATENIDHITGGCSVLAKKEYTHRHNNVAKHIHQQLALKYNLVKEYTPYYQYKPKNVLENATTKLYWDRDIITDRTILSNRPDITLTIKTSKITYLIDIAVPNTHNLKQKHTEKIQKYLNLADEIKQMWHQETVRIVPIIISSTGLVPKNLKSALKLLNLNENIYIPLQKSIVIDTCSIVRRFLNPSSLSCQEEHQNPSSDYHTPNFSNVHNIPNTRTRHHSYHSNI

SEQ ID NO: 1168 - protein, 1017 aa, Parapoynx stratiotata
MSRYTIKTVNCLDFLIKQHLQNKTTVTLYDIHNAIYCAAITVTTINSKQGKKIHINTKNTNNTHTNSTQDNTPTNTKHTAGPKIPQWQRRIENKITGFRKEIGQLTQYLNGNLNQKKQLKVNPNNFSKDEIIDRLDNYKQKLQAYSKRLRRLKVSNQRKKDNSLFSTNEKLFYQNLNSEHIKITQPPNSIDIQRYWEKLWSMPVQHNTSTSWAEIEEEETRDIETMPEIIITKDDITQAIKKTMNWKAPGPDKIQNYWIKYLPSTHEYLAKTFNDIIQNPQDMPDFMTQGVTYLKPKDNDTTNPSKYRPITCLPTLYKLLTSIISQKLNMHVTQNKIIPEEQKGCIKGSRGCKEQLVIDTEIHNKVKQSHGNLFYSYIDYQKAFDSVPHSWLIHILYRYKVDNKLIHFLQCAMNNWITKLSLKTNDSTLSSKPIKIKRGIFQGDSLSPLWFCLALNPLSRVLNKTVSGYTIDKQNNTKLTHLLYMDDIKLYAANRDELNHLLQLTDKFSSDIKMTFGTNKCKINGIIKGKHSRLEPFNVEQQGGIIDSMDPKESYKYLGYQQTTSINHTEIKNNLKAKYKQRLNKLLNSQLAARNKIKAINTYAIPILTYSFGIIKWSETELEALNIATRTACYKHNIHHIHSAVQRFTLKRKLGGRGVIDIKNLHYKQIDNLRTYFLKKAKESELHRAIANLPYSGTPLQLSNGQYDPKLKIITDEKKIELWKTKALHGKYPHQIEQDHINRTASCTWLSKGNIFGETEGFLIAIQDQIVKTRNYSKYILKENIATDKCRLCHQTTETIDHITGGCSILANKEYTHRHDNVAKHIHQLLALKHKLLDTYTAYYKYNPKNVLENNSAKLYWNRDIITDRTMLSNRPDITLTLKTTKITYLIDIAVPNTHNLKQKHTEKIQKYIPLAEEIKQMWHQDAVNIIPVIISSTGVIPKNLSVALKQLDLHENTYIPLQKSIIIDTCSIVRRFLNPTTLLRQNNEQTDTLDTLTHTNLVHHTTQSHTTQLNTT

SEQ ID NO: 1169 - protein, 1066 aa, Ypsolopha scabrella
MTLSDNEITTESASVAFQETYEHTQSQEPEIDITSEESINYQKIEDTFTEILIKYTGTDPTQRPIISKIQTTRKVIKTIKTVNEIINKHLQNKEDVTIVEIHEIIYCAALTVTTYTNSTNKGKKKEHNKTNTNINQANKKKTPQWQKRLENKIAILRKEIGRLTQYLNGNLTQKKQQKLNPNNKSRDEILNELDNYKQKLQAYSKRLRRYKISNQRKSDNNLFNTNQKLFYRNLNSDQIEITEPPNIDEVKHYWENLWSNPLQHNSHSSWAKIEEQEVDNIDPMPEISINIDDVTYAIKNTLNWKAPGPDKIQNYWLKYLTSTHKYIASTLNHLLHNPQDIPPFLTQGITYLKPKDNDTTNPAKYRPITCLPTIYKLLTSIISHKINSHLTSNKIIPEEQKGCSKGSRGCKEQLVIDTEIHNQVKKKHRNLYYSYIDYQKAFDSVPHSWLLHVLKMYKIDNRLIQLLEYAMTNWKTKLNIRTNNITLSTPSIKIARGIFQGDSLSPLWFCLALNPLSRILNKTGYGYNIDTGNDIKLTHLLYMDDIKLFAANRQQINHLIRLTEEFSRDIKMTFGTDKCKINSMIKGQHKETDPYILEQQTGTIDSMEPKETYKYLGYQQSTSIDHTEIKNALKTKYKQRLSKILKTQLSARNKTKAINTYAIPILTYSFGIVKWSDTELEALNTTTRTTCNKHNIHHIHSAIQRFTLKRKLGGRGFIDIKNLHYTQIINLRSYFHTKANESAIHKAIVNLPQPGTPLQLKNSQFEPKHKITTDEQKLENWKKKALHGRFPHQLDQEHIDRTASCTWLTKNNIFGETEGFLIAIQDQIIKTRNYSKYILKETIETDKCRLCNLASETIDHITGGCSTLANKEYTHRHDNVAKHIHQQLALEYKLLQSYTPYYQYKPKKVIENSSAKLYWDRDIITDRTILSNRPDITLTLKSTKTTYLIDISVPNTHNLKQKHTEKIQKYIPLADEMKQMWKQETVKIVPIIISSTGIVPKTLKKALELLDLPIKTFIPMQKSIVIDTCSIVRRFLNPTLLPLLTNHTTPHINTTHSMPPNTQVMQ

SEQ ID NO: 1170 - protein, 1254 aa, Apotomis turbidana
MYLHKLTHYEYKYYNIKETNLYIYNNNNNNNNQNTPSLNNDSNTPARSVLQDMLPATTLAGKSRQRMKWTDEININLLRCYYTVTMCETDLTAWRPLLHQKFTEQFPELSHLSQQRLSDQIRVIHRNNRIPAPERDRIKQTLLPHTTNNILTTTEEEDTSNTSVSQIQQRVADSPPDTPSTQHTHNYIDEQEIDTQTIHVSQNSERIHTQETQPTDKHTDPIDYKQIEDTFTEMLIKYTDTDPTLRPTIPKQQTTRILIKTVNTLNEIIEKHLQNKDNITLKDIHDLIYCAALTVTTIHNKKIVKHNTANTTPYKEKKPKWESRLETNITTLRKEIGQLTQYLDGKLSQKKQQKINPNNKNTQELIELLDTHKQKLQSYAKRLKRYRKSNQRKSDNITFNTNQKIFYRKLNSENITVTQQPDVSEIQQYWENIWSKPAQHNRHSAWTEIEEQEMNSIEPMSQIIISKDDVTLAINKTLNWKAPGPDKIQNYWIKYLTATHTRIANALNHLIHNPHDTPAFLTQGITYLKPKDNDTTNPSKYRPITCLPTMYKLLTSIITHKINAHITSNAIIAEEQKGCSKGSMGCKEQLIIDAEIHNQVRQKHRNLYFSYIDYQKAFDSVPHSWLLHVLKIYKIDNSLIKFLQHAMTKWTTKLNLRTNTTTLSTSQIKIARGIFQGDSLSPLWFCLALNPLSRILNNTEYGYVIDRQNKTKLTHLLYMDDIKLYASNKQELDHLLKLTEKFSTDIKMTFGTNKCKINSITKGQHNRTDDFTLELQGGTIDSMEPRETYKYLGYQQSTSINHKDIKNTLKTKYKHRLNQIFKTQLSARNIVKAVNTYAIPVLTYSFGIIKWSDTELNALNITTRTTCNKYNNHHIHSAIQRFTLKRKLGGRGFIDIKNLHYSQINNLRTYFIRKADHSPLHKAIVTLPQSGTPLHLNNNQYDPTSKILKDEHKLENWKNKALHGKYPHQLEQDYVDQTASTTWLTKGNLFSETEGFFIAIQDQVIKTRNYSKYILKEPIETDRCRLCHQYTESIDHITGGCNALASEDYTHRHDNVAKYIHQQLALKHDLTETHTPYYKYKPKPVLENNKVKLYWDRDIITDRTILSNRPDITLTFKPTKTTYLIDIAVPNTNNLKQKHVEKIQKYIPLADEIKQMWHQETVKIVPIIISSTGIIPKTLHTALKIIDLHPKTYIPLQKSIVLDTCSIVRRFLNPTSLTLLSVPETTTIPPTPHTQTTLQTSHRTQADIHQTQNI

SEQ ID NO: 1171 - protein, 760 aa, Boloria selene
MTQFVIDTNDVKTAIRKTLNWKAPGPDKIQNYWIKYFTSTHAHLAKALNTLIQEPQNIPTFLLQGITYLKPKDTDTTNPAKYRPITCLPTIYKLLTSIIAYKLDIHITQNQIIPEEQKGCCKGSKGCKEQLVIDTEIHNQVKQKHRNLFYAYIDYEKAFDSVPHSWLIEILKLYKVDKVLINFLENAMKEWTTTLTLRTEKENLTTTPIKIARGIFQGDSLSPLWFCLAINPLSSILNSTEYGYTIDREAKTKITHLLYMDDIKLFASNRSQLNHLLKQTEQFSNDIKMNFGTEKCKINSILKGQHKKTEAYNLTLHEGTIGAMDSTEIYKYLGYQQSTCLNHTDIKQTLKTKYTQRLNTILKTHLSARNKTKAINTYAVPILMYSFGVIKWSDTDLNALNTLTRSQAFKHHIHHIHSSTERFTLQRKQGGRGFIDIKNLHYTQIENLRSYFLSKSNNSKLHKAITTMTTAGTPLQLNDNNYEPVRKVIQEQKKIEDWKKKALHGKYPHQLEQIHIDKEASNTWLTKGNLFAETEGLFIAIQDQIIKTRNYSKYIIKESIEIDVCRLCHQSKETIEHITGGCKILATKEYIKRHDNVAKQIHQILALKYKLINTYTPYYKYTPRNVLENQTAKLYWNVDIITDKTIACNRPDITLTLKSPKITYLIDISIPNTENLKNKHQEKIQKYIPLADEIKDMWHQDLIKIVPIILSSTGVVPKTLHKSIELLELHKLTYIQLQKSIVLDTCSIVRRFLNPSSLSP

SEQ ID NO: 1172 - protein, 1246 aa, Epargyreus clarus
MLPATTLAGRSRQRMKWTDDINKELLRCYHVVTQNESNLTAWRPQLHRTFSESIPELSHLSEQRLTDQIRVIHKNNRIPAIEREQIKQSVSLIISSTSNRLNDHSTARHTDHQSNINTSPLTNNRQSTTDSHSHTLNLQQTISITHHATTTSQANQSCESIEHMQTQDSELPNQPSNLVQYEKIENVFREMLMKYKGTDPTLRPTISKPQITHNFIKTLNSMNEIINKYLQNKGSITIEQIHEIIYCAAQTVTTIHTQHPHTLENNTNNSNRKQKKPQWEKRIENKITILRKEIGQLSQYLNGNLSLKKQQKINPNSRSRDEILEQLDSNKQKLQAYTKRLRRYKKSNERKSHNKLFNTNQKLFYQKLNSEQIQISQPPEKIDIQNYWKNIWSVPTQHNTHTSWAVIEEQEMENIDAMPEITIDKEDVLVAIKKTLNWKAPGPDKIQNYWIKYLPATHEHLANALNHILSNPQDTPFLLTQGITYLKPKDGDTTNPSKYRPITCLPTIYKLLTSIIAHKLNSHIIRNHIIPEEQKGCCKGSRGCKEQLVIDTEIHNQVKQKHRNLYYSYIDYQKAFDSVPHSWLIHILKIYKVDNRLIQFLLHTMKYWTTKLTLHTKNISLCTQKIKILRGIFQGDSLSPLWFCLALNPLSRILNKTDFGYVIDRNANIKLTHLLYMDDIKLYAANRQQLDHLLRLTENFSADIKMTFGTNKCKVNSIIKGQHQETNPFQLETQGGTIDSMESRETYKYLGYQQSTSINHANIKNTLKSKYKHRLHKIFNTQLSAKNKIKAVNTYAVPILTYSFGVVKWSDTELEALNTATRSISNKHNIHHIHSAVQRFTLKRKLGGRGFVDIKNLHYTQIDNLRTYFLLKANESALHKAIVDLPQSGTPLQLSNSQFDPKLKILKDDQKIENWKKKALHGKYPHQLEQDHIDYNASCTWLTKGNIFGETEGFLVAIQDQIIKTRNYSKYILKETIDTDKCRLCHQNTETIDHITGGCSVLANKEYTHRHDNVAKHIHQQLALKHKLLQSYTPYYQYKPKNVLENNTAKLYWDRDIITDRTILSNRPDITLTMKSSKTTYLIDITVPNTHNLKQKHTEKIQKYIPLADEIKQMWHQDIVRIIPIIISSTGVVPKTLKTALKLLDLHENTYIPMQKSIVIDTCSIVRRFLNPTTLTLQNHQDARPKLLTQQHKTHLHTTLKHIHTIHQIHSSPLTPITQSYMNKVTWRKPVPFSHKTDSSREQKVS

SEQ ID NO: 1173 - protein, 1190 aa, Azonax typhaon
MYPATTLAGKSRQRMKWTNEINRELLRCYYTVTNNETDLTAWRAKLHQTFAEKIPELNHLSEQRLADQIRVIHRNNRISATEREQIKQTVSLLTAGPISHIDQNAPSDVLTESNINTTHTTHNHQPIPDSLTQIRNSLHTPSSPRQISNTTQTSQLLDNNEHIAQSQDSETVNRPTDTIEINKIENKFVETLIKYAGTDPILRPSIPKIQTTPNVIKTVNATNEIIHKYLHTKDTVTLEEIHEVIYCAAQTITTLHTKPISKPVSNRKDNSNVIGKEKKPHWEKRIENKIVLLRKEIGQLTQYLNGNLTQKKQHKLNPHNKNQDEIIEILDKSKQKLQAYSKRLRRYKKSNERKSHNKLFNTNQKLFYQRLNTEQIEITQAPDRNDIQNYWKNLWSKPVQHIIHSRWTEIEEREMKNIYPMPEIRIEKDDVTQAIKKTLNWKAPGPDKIQNYWIKYLSSTHEYLAHTLNHIIHNPQTFPSFLTQGVTYLKPKDNDTTNPAKYRPITCLPTIYKLLTSIISQKLNTHITQNQIIPEEQKGCCKGSRGCKEQLIIDTEIHNQVRLKHRNLFYSYIDYQKAFDSVPHSWLIHILKIYKVDYRLIQFLQHAMKHWTTTLNLRTKNTSLSTYPIKISRGIFQGDSLSPLWFCLALNPLSRILNNTEYGYIIDREKNTKLTHLLYMDDIKLYAADRHQLEYLLKLTEKFSEDIKMTFGTNKCKINSIIKGKHKDTDRFELELQGGIIESMEAKDTYKYLGYQQSTSINHTDIKNTLKFKYKQRVNKILNTQLSARNKIKAINTYAVPILTYSFGVIKWSDTDLEALNMVTRTVSNKHNIHHIHSAVERFTLKRKLGGRGFIDIKNLHYTQIDNLRTYFLTKANESRLHKAIVTLPHPGTPLHLNNGEFDAKHKIVKDEHKIENWKKKALHGKYPHQLEQDHVDKNASCTWLTKGNIFGETEGFMVAIQDQIIKTRNYAKYILKENIQTDKCRQCHQVTETMDHITGGCSTLANKEYTHRHNNVAKHIHQLLALKHKLLNAYTPYYQYKPKNVLENNTAKLYWDRDIITDRTVLSNRPDITLTLKSSKTTYLIDISIPNTHNLKQKHTEKIQKYINLADEIKQMWHQESVRIVPIIISSTGIIPKTLKTALNLLDLHKNTYIPLQKSVIIDTCSIVRRFLNPTTLTLQNENEQNQTQ

SEQ ID NO: 1174 - protein, 1369 aa, Ebrietas anacreon
MRLRSGYKLPQASTGAIRTGESCPEPTSSGCPTYSGGDIVSQTSAQSRTVAVNKTSSSHTSSHLSSPASSTHSLFPSPVSSPRSYELNHSSSHSSSMSPMSCDVAQEAIATFPEPIPDTTNPARVFQNNSNNRVHHTPHLSSHLNNTPARSVLQDMLPTTTLAGKNRQRMKWTDPINRELIRCYYLVTHCETNMTAWRPLLHQKFSESFPELNHLSEQRLADQIRVIHRNNRIHASERENIKTAVSTLITQPSSLNHNIDLNAMHQLTSNVGHTCTDHTVQPYSEQSKTPNTEQTLTTTQDCSTRQINMNIEHAQTQVAEVTDGPQELLAHKKIENIFNEMLIKYIDTDPTLRPIIPKIPRNIIKTISTVNRIIINHLQNKETTIEEIHNIIYCAAQTIVAIHNKHTNIIDKTNKDSNTVIKKGKSGWERRIENKIMALRKEVGQLTQYKNGNLTHKKQQKLNPSNKSMDEIIDHLDNCKQKLQAYSKRLRRYKISNKRKSDNKLFNTNQKLFYQKLNTENIIIQNPPNIDDVESYWKDLWSKPVYHNTHTSWIEEEETAFVDPMPTIIIEKEDVSRAIRKTLNWKAPGPDKIQNYWIKYLTSTHEPLANAFNHLVQNPQDTPNFLTQGITYLKPKDNDTSDPAKYRPITCLPTIYKLLTSIISFKLNLHITRNSIIPEEQKGCSKGSRGCKEQLVIDTEIHQHVRIKQKDLFYSYIDYQKAFDSVPHSWLLYVLKFYKVDNTLIQFLQHTMQNWSTKLNIRTQNTIHCTQPIKILRGIFQGDSLSPLWFCLSLNPLSTLLNRTGYGLIIDKENNTKITHLLYMDDIKLYASNREQLDHLLKLTERFSTDIKMSFGTNKCKINSVIKGQYSETNSLNLNIQGGIIESMEVKETYKYLGFQQGTSLNHTEIKNTLKTKYKQRLHKILTTQLSARNKIKAINTYAIPILTYSFGVIKWSESELSALNTATRSASNKYNIHHIHSAVQRFTLPRKLGGRGCIDIKNLHYSQIENLRIYFHNKANTSTLHRAIVHLPQSGTPLQLHNSLFDPKLKIVKDEQKIEHWKAKALHGKYPHQLEQEHVDRNASCTWLTKGNIFAETEGFLIAIQDQIIKTRNYAKYILKEVIETDKCRLCHQATENIDHITGGCSVLAKKEYTHRHDNVAKHIHQQLALKHNLIKEYTPYYQYKPKNVLENATTKLYWDRDIITDRTVLSNRPDITLTIKPSKTTYLIDIAVPNTHNLKQKHTEKIQKYLNLADEIKQMWHQETVRIVPIIISSTGVVPKNLKSALKLLNLNENTYIPLQKSIILDTCSIVRRFLNPSSLTLQEEQQNPNLVTNTSSIPDYTHPRNFSNVRDTPNTRTHHHSYHSNT

SEQ ID NO: 1175 - protein, 1164 aa, Quadrus cerialis
MKWTNKINTDLLRCYYIVTHNETNLTAWRPLLHRKFIEMVPELSHLSEQRLADQIRVIHRNNRVQTSEREAIKESLRSVMINSYNTPNQNTPQHNTLNQIPLLDTQSTIQHNNSQCTSSINQQTELRTQTYQNFTNPEHIETQTLDVTYTPLALADYKTLENTFTEMLIKYSDTDPSLRPVIPKLQITRISIKAVNALNEIIGRHLRTKESPHIREIHEAIYCAAQTITTHTTKYKINTFVNNGNTFTQNKPRWKNRLENKITLLRKDIGQLTQYLKGNLALKKQQKVNPNNKSRNEIVELLDINKQKLQACSKRLRRYNTSNQRKTHNKLFNTNQKRFYQKLNTEHTQITQLPDIDDLQNYWQNLWSKPVQYNTHINWKEIEEQETKNINPMPEITIDKNDVSQAIKKTLNWKAPGPDKIQNYWIKYLSSTHEYIAKAFNYLMHFPQETPSFLTHGMTYLKPKDDNTNNPSKYRPITCLPTIYKLLTSIFSHKLHTHITQNQIIPEEQKGCRKGSKGCKEQLVIDTEIHNQVKQKHRNLFYAYIDYQKAFDSVPHSWLTYILKLYKVNNNLIHFLEHTMNNWTTKISISTDKTSICTHPIKIRRGIFQGDSLSPLWFCLALNPLSKILANTGYGYIVDKDSDTKITHLLYMDDIKLYAANRQQLDHLLKLTEKFSTDIHMTFGTNKCKVNSIIKGKHKDTDQFELSMQGGKIDSMEPKETYKYLGYQQSTCINHTQIKNTLKAKYKQRLHQVLNTQLSARNKTKAINTYAIPILMYSFGIIKWSDTELEALNTTTRTLSNKHNIHHIHSAVQRFTLKRKLGGRGIIDIKNLHYNQIDNLRTYFLTKATENGLFKAIVNLRQTGTPLQLNNNNFDPQKKLLKDDQKIEDWKKKALHGKYPYQLEQDHIDRNASLSWLTRGNIFGETEGFIVAIQDQIIKTRNYSKFILKENIETDRCRLCHQTTETIDHITGGCSILAQKEYTHRHDNVAKHIHQQLALKHKLLDSYTPYYQYKPKNVIENKLAKLYWDRDIITDRTILSNRPDITLTLKSTNTTYLIDVAVPNTHNLQQKHSEKIQKYIPLADEIKQMWHQESVRIIPIIISSTGVIPKTLKTALKLLDLNDNSYIPLQKSIIIDTCSIVRRFLNPTSLTLLQEAQQNGHFPS

SEQ ID NO: 1176 - protein, 1266 aa, Ypsolopha scabrella
MRLRSRNILPQAGTSNGESRPEPTSSGSPTYSGEGNVSLHPAQSSTVAGQENNTPSPDMLSYASSPISSTHSLFQSPSSSPYDFQLTSTSRSTTISPMSCDVVQEALAICPAPITGIMNPTRTSETNSHSNRVDTNTERHTTDTNTPARSVLQDMLPATTLAGKSRQRMRWTNQINHELLRCYYMVTNCEENLTAYRPLLHQKFTENFPELSHLTEQRLADQIRVIYRNNRIPASERESIKQAVLQTITTLDNPNTNNFETQVNTNNNDVMYNQFQNSHTLEQRDNTQQIIASTPQPIIMTLSDNEITTESASVAFQETYEHTQSQGPEIDITSEESINYQKIEDTFTEILIKYTGTDPTQRPIISKIQTTQKVIKTIKTVNEIINKHLQNKEDVTIVEIHEIIYCAALTVTTYTNSTNKEKKKEHNKTNTNIYQANKKKTPQWQKRLENKIAILRKEIGRLTQYLNGNLTQKKQQKLNPNNKSRDEIVNELDNYKQKLQAYSKRRRRYKISNQRKSDNNLFNTNQKLFYRNLNSDQIEITEPPNIDEVKHYWENLWSNPLQHNSHSSWAKIEEQEVDNIDPMPEISINIDDVTYAIKNTLNWKAPGPDKIQNYWLKYLTSTHKYIASTLNHLLHNPQDIPPFLTQGITYLKPKDNDTTNPAKYRPITCLPTIYKLLTSIISHKINSHLTRNKIIPEEQKGCSKGSRGCKEQLVIDTEIHNQVKKKHRNLYYSYIDYQKAFDSVPHSWLLHVLKMYKIDNRLIQLLEYAMTNWKTKLNIRTNNTTLSTPSIKIARGIFQGDSLSPLWFCLALNPLSRILNKTGYGYNIDTGNDIKLTHLLYMDDIKLFAANRQQINHLIRLTEEFSRDIKMTFGTDKCKINSMIKGQHKETDPYILEQQTGTIDSMEPKETYKYLGYQQSTSIDHTEIKNALKTKYKQRLSKILKTQLSARNKTKASNTYAIPILTYSFGIVKWSDTELEALNTTTRTTCNKHNIHHIHSAIQRFTLKRKLGGRGFIDIKNLHYTQIINLRFYFHTKANESAIHKAIVNLPQPGTPLQLNNSQFEPKHKITTDEQKLENWKKKALHGRFPHQLDQEHIDRTASCTWLTKNNIFGETEGFLIAIQDQIIKTRNYSKYILKETIETDKCRLCNLASETIDHITGGCSTLANKEYTHRHDNVAKHIHQQLALKYKLLQSYTPYYQYKPKKVIENSSAKLYWDRDIITDRTILSNRPDITLTLKSTKTTYLIDISVPNTHNLKDRKRNSR

SEQ ID NO: 1177 - protein, 1329 aa, Tiana niger
MKKSIQRKYSLRPLPGGRRGTPGVGAGCDSMRTIDGLELSRRAPAGRVPETTTADIISNPSSPISSTHSLFQSPHSSCHSFENPSTSRSSSISPVSFNVARRPSAKSLVPIHDTNKTTQGSNRDTNNICVETNPIISHTLTTPTSFTHDSPTKSVLGDMFPATTLGGKTRQRMKWTDEINRQLLRCYYRVTNCEKDLTAYRPLLYHTFTDIYPELQHITQQRLSDQIRVIHKNNRISPTERQYIKQDVARLITLTENTEEQNNVTASNNNSTINITSTHGPVDNISCPTLTINLLTQNNFMQHTDISRQPSPTLQTKQYKSTVELDYNKIQDTFKEKLIKYKDTNPTLRAAIPKLQISRSVIKTVNTMNDIIKTFLEDKVTLPIQALHEIIYCAAVTVTSLHVKTSKHNNNTNRNNNLHKQPPWKIRLTTQITTLRKSIGRMTQYIKGNLSFKKRRKINPKDLNTDQLIEELDKSKQKLAAYTKRLKRYEESNRRKADNNLFHNNQKIFYRNLNSEHIKITKAPDESKVQKFWENVWSTPENHNSNAEFIELEQKETENIERMLPININVEDLRNAIRKIHNWKAPGPDKIQNYWLKYLTSMHNHLVNAYNTLIEDPHCMPAFLTQGVTYLKPKDLDTTNPAKYRPITCLPTLYKLLTSIITHKLNTHITQNNIIPEEQKGCCKGSMGCKEQLVIDTEIHNQVKQNNRNLFYAYIDYQKAFDSVPHSWLIHVLKLYKIDDKIVNFLQYAMTFWTTTLHIHTQNKTLNTNLIKISRGIFQGDSLSPLWFCLAINPLSRILNKTNYGYTIDKQNNFKIAHLLYMDDIKLYAANKQQLHYLLTLTEKYSKDIKMTFGTDKCKINCIIRGKYKETDSHILTQQEGTIRNMLFRETYKYLGYEQATTLNHSQIKTQLKTVYKHRLNTILKTKLSARNKTKAINSYAMPILTYSFGIINWSETELNALNTLTRTTCNKHNIHHIHSAVERFTIKRKNGGRGFIDIKNLHYTQVHSLRIYFQNKASNSHLHKAIISLRTSGTPLKFNNIQYNPNQKIETEEEKIEKWKKKALHGKYANQIEQPHIDKEASNSWLTKGNIFGETEGFLIAIQDQIIKTRNYSRHILKEKIDTDKCRLCHQATESIDHITGGCSVLASKEYTHRHDNVAKHIHQQLAIKYKLLHTHTPYYQYKPKNVLESKDVKLYWNRDIITDRTILSNRPDITLTLKTTKTTYLIDVSVPNSNNLKQKFTEKIQKYTPLADEIKEMWHQDLVRIIPIIISSTGIIPKTLFVALQSLQLSKTTFIPIQKSVVLDTCSIVRRFLNPNSLPLLSSNSEN

SEQ ID NO: 1178 - protein, 767 aa, Emesis brimo
MNEILINEEDVTQSIKTTVNWKAPGPDKIQNYWLKYLSTTHKYIASTLNYLIRNPQNMPKFLTQGVTYLKPKDHDTTNPSKYRPITCLPTIYKLLTSIIANKLNSHISQQKIIPEEQKGCCKNSRGCKELLIIDSEIHNQVKHKNRNMFYSYIDYQKAFDSVPHSWLLHVLEIYKVDNNIVKFLQHAMTNWTTTLHLKTLDQKLTTNPIKIARGIFQGDSLSPLWFCLALNPLSRILNRTNYGYKIDKENNIKITHLLYMDDIKLYAANRNQLDQLLKLTAQFSNDIKMTLGTDKCRINSIIKGQHNETHCYDLEPDSGIIESMKLTDTYKYLGYQQNTAITHQEIKKLLTNKYKHRLNKILSTQLSARNKTKAINTYAIPILTYSFGIIKWSETELNALNTATRVACYKHNTHHIHSSVERFTLKRKLGGRGFIDICNLHYSQIQQLREYFYRKSHESSIHKAVVNIPSSGLPLQLNNRVYNPNHKIINDIQKLENWKKKALHGRYPHQLDQDHIDKNASLTWLAKSNLFGETEGFLLAIQDQIIKTRNYSKFILKETIDTDKCRLCHQITETIDHITGGCSVLANKEYVHRHDNAAKHIHQQLALKFKLLDTYTPYYKYKPKNILENHMAKLYWNRDIITDRTILSNRPDITCTIKSTKTTLLIDISVPNTHNLKQKHTEKIQKYIPLADEIKQMWHQEIVTIIPIIISSTGVIPKTLNASLEILELHKNTYVALQKSIILDTCAIVRRFLSSTSLALQNTQDTK

SEQ ID NO: 1179 - protein, 926 aa, Pyrrhopyge papius
MLIKYSGTDPSLRPTIPKLQITRNTIKSVNTINKIIEEHLRTKTTITLEEIHEVIYCAARSVILIHTKYVDKLDSNMEDPNRHTNKVKKPQWERRLENKITTLRKEIGQITQLLKGNLTQKKQRKLNPNKRSNDEISEQLDIYKQKLQALSKRLRRYKISNQRKSHNMLFSTNQKLFYQNLNEEHIQITSPPDKEDVQNYWKNLWSKPAQHNTHTSWTKIEEQETIDIDPMPNILINKDDVSEAIRKTANWKAPGPDKIQNYWIKYFSATHQYITNTFNHILSNPQETPSFLTEGITYLKPKDKDTSNPANYRPITCLPTIYKLLTSIISRKLDIHITKNHIISEEQKGCRKGTKGCKEQLIIDTEIHNQVKQTHRNLFYSYIDYQKAFDSIPHSWLIHILKIYKVDNKVIQFLQHTIKNWTTKLNLRSNKTSFFTQAIKISRGIFQGDSLSPLWFCLALNPLSKILNKTGFGYVVDRESNIKITHLLYMDDIKLYAPNRSELDHLLRLTESFSTDIKMSFGTNKCKINSIVKGKYKQTDPFDLSRQAEKILSMEPKETYKYLGYQQSTAISHTDIKNTLKTKYRQRLNKIFSTQLSARNKTKAVNTYAIPILTYSFGVIKWSDTELEALNTLTRTSANKYNIHHIHSAVQRFTLSRKLGGRGFIDIKNLHYTQIDNLRTYFLMKANENTLIKAITNLPQAGTPLQLNNSQFNPKLKTLKDDEKIISWKQKSLHGKYPHQLEQEHVDRKTSCSWLTKGNIYAETEGFLIAIQDQIIKTRNYSKYILKEIIETDKCRLCNQTTETIDHITGGCSMLARKEYTHRHDNVAKHIHQQLALKHKLLDSYTPYYQYKPKNVMENNSVKLYWNRDIITDRTILSNRPDITLILKSSKTTYLIDIAVPNTNNIKQKHTEKVQKYIPLADEIKQ

SEQ ID NO: 1180 - protein, 1331 aa, Lysandra coridon
MRLRNRNIPQAGTGAKCNGESRPGPSGPGSPSYSGGDNVSPHSAQSGTAAENIVSTTSNTLSYPTSPTSSVSLFPSPRSSPRSYMFDKSSSSSRSTSHSPMSDVVAQEASATYPMPISDTISSTSTSQNIEIHPVDHHTLQSHLINTPVTSVLQDMLPPTTLSGKRRQRMKWTDQINRELLRCYYTVTSCETNLTAFRPLLHQKFIEHFPELRHISEQRLADQIRVIHRNNRIAPHERELIKQYVANLTQTSDILSVQSSSQSTDIICLSPANPYTESTQSNTNATAPHHPPAQTSYQLNTLDSYDIVEDTTTQEINISNTPPTDSNLIDNEKIENVFKEMVIKYSGSDPSLRPIIPKLQISRSVIKTITVLNNAIGKYLEEKVTTDIEEIQSAIYCAAITATTLHVKLRKTNTNKPTNKTIDYNNPKWQIRIEHRIKQLRKEIGQLTQYLKGNLNTRNQQKVNPNNYPIDQFADKLDNLKQKLQANSKRLRRLKISNERRRHNMLFTNNQKIFYQNLSVENIKITEPPDLEKVKSYWENLWSNPALHEEQSPWIDAETEEWQNIDNMPDIIIHREDVTHAIKKSLNWKTPGPDKIHNYWIKYFTSTHSYIANSFNLFIQDPQSIPPFLTQGITYLKPKDNDTTNPTKYRPITCLPTMYKLLTSIIAQKLNTHITQNNIIPEEQKGCAKGSMGCKEQVIIDSEIHNQAKQNHKNLHYSYIDYQKAFDSVPHSWLLHVLKIYKVNSKLIHFLQYIMTTWSTRLNLRTVHGDLNSSSIKIKRGIFQGDSLSPLWFCLALNPLTKILNKSGYGYTINKTNNTKITHLLYMDDIKLYASDRQQLEHLIRLTEKFSIDIKMTFGIDKCKINCIIRGKHTQTEPLNLEQQNGIIDSMQTKETYKYLGFSQSIAINHIDIKNTLKSKYKQRLNKIIATQLSARNKVKAINTYAIPILTYSFGIIKWSDTELDALNTTTRTLSYKHNIHHIHSAVERFTLKRKLGGRGVIDIKNLHYNQINNMRSYFLNKAQTSQLHDAIVRLPHKGTPLQLSNSQFNPTLKILKDSDKIQKWKSKALHGKYPHQLEQEHVDQSASHSWLCKGNLYSETEGFMIAIQDQIIKTRNYSKFILKESLDTDKCRLCHLSAETIDHITGGCSTLATKEYTHHHDNAAKHIHQLLAIKYKLIDSHTPYYKYKPRNVLENSTVKLYWDRDIVTDRTILSNRPDITLTIKPEKTTYLIDIAVPNTNNLKQKHNEKIQKYIPLADEIKQMWHQDVVKIIPIIISSTGVIPKTLAAALKALDLHKNTYIQIQKSIIIDTCSLVRRFLNPSSSFPTLQS

SEQ ID NO: 1181 - protein, 1300 aa, Blastobasis lacticolella
MRRSIRIRNKNSAQCSTAAENGSAGNSSPISSTRSLFSTPSSSPKSFQNPPSSRSTTASPMSYDVTQEAPANYPESINDIINAARNNANVESNYGAETDTYNIDTNTPARSVLQEMLPATTLAGRSRQRMKWTDLINRELLRCYYTVTQCETNLTAYRPLLHKMFIETFPELHHLSEQRLADQIRVIHRNHRISLAERERIKQLVSLSVTEEIADTVHDTSLIDTLSPPIDSEVTTGNYATHNVSVNVEQYATSTQQTVTIEDLDTYTQTTEPESLHINFNTIEDTFTEMLIKYSHTDATLRPTIPKLQITRKSIKTVNTVNDILHKHLENRETVDIDNIHEVIYCAAMTVTTLHAKPKNKVNSNIHTANSTESNNSNKDKKQQWEKRLENKITILRKEIGQLIQYLNGNLTQRKQRKINPNNQSKDEIVNQLDTYKQKLQAYSKRLRRYKLSNQRKSDNNLFRTNQKLFYRNLNTENIHISQPPNIKDVQNFWENIWSKPVEHNRNTPWSRIEEQDASNIEPMAEVLISKDDVTQAIMKTLNWKAPGPDKIQNYWIKYFTSTHEYIANAFNHLLHNPQDTPSFFTQGITYLKPKDDDTTNPAKYRPITCLPTIYKLLTSIISHKLNHHIAHNNIIPEEQKGCSKGSMGCKEQLVIDMEIHNQVKQKKRNLYYAYIDYQKAFDSVPHSWLIEVLKMYKTDNGLIQFLQYTMANWTTTLNIHTNNKTLNTEHIKISRGIFQGDSLSPIWFCLALNPLSKILNGTDYGYNIDRENTNKLTHLLYMDDIKLYAANRQQLDHLLKLTEDFSRDIKMTFGTDKCRINSIIKGQHKDTEPYDLEQQLGKIDNMEPRETYKYLGYLQSTSINHTEIKSGLKTKYKQRLTKILKTKLSARNKTKAVNTYAIPVLTYSFGIIKWSDTELEALNTLTRTTCNKHNMHHIHSAVQRFTLKRKLGGRGFIDIKNLHYTQIDNLRTYFQTKANQSTLHKAIVNITTSGTPLQLNNSQFDPKQKILQDNQKIENWKKKAIHGKYPHHLDQDHVNRTASCTWLTKGNLFSETEGFLIAIQDQIIKTRNYSKYILKEAITTDKCRLCHQTTETIDHITGGCRILANKEYTHRHDNVAKHIHQQLALKHNLLDTYTPYYKYKPKKVLENNTTKLYWDRDIITDCTVLSNRPDITLTIKSIKTTYLIDVSVPNTHNLKQKHTEKIQKYIQLADEIKQMWHQETVRIIPIIISSTGVVPTSLSAALKTLQLPDTTYIPLQKSIVIDTCSIVRRFLNPTSLSYAITAENNDVPSTLTLLS

SEQ ID NO: 1182 - protein, 1357 aa, Apodemia zela
MRLRNRVIPQAGTCEGESRPKSSGLGCPTYSGGDNVSLNPAQPMVVADNSQISQPSSHTSSPISSSQSLFDTPNSSLYLHQLQDSYSSTSSSTSRLSCDVAQEMLVYPHAPTTDNINPTRSIYINSSNRVDNETHPSTLNTNSPVRSVLQDIMPATTLAGKSRQRMKWTHDINKELLRCYYVVTNCEKDLTAYRHLLHRKFIETFPELQHISEQRLADQIRVIHRNNRISQPERERIKQLVSQIMSNPDNNHTERNDATEIQSDTSTVSISQQQSLIEDSPQNSTHIGTQQSNIIIQPTSSSIRENRDTQILDSQTPTRTLDKVSVGTIENTFKEMLIKYEGTDPTLRTPIPKLQTTFNTIKTVNIVNDIVGKHLKAMNTNTLEELHEVIYSAALTVTTIHSKRISNVNSNSYTSKNSTHKQNISPWEKRLTNKVVVLRKEIGQLTQHLKGNLSYKKQLKLNIYNKNGDEIINQLDNCKQKLQAYTKRIRRYKKSNQRKSDNNLFNTNQKLFYQRLNTDQIKITQPPDIDAIQTYWKNIWSKPVKHNTHSTWTEIEEQEMSNIGLMDKIEIDEEDIALSIRKTLNWKAPGPDKIQNYWLKYLTATHKYIARTLNDIILNPQKMPTFLTQGITYLKPKDHDTTNPSKYRPITCLPTLYKLLTSIIANKLNIHIAQYNIIPEEQKGCCKGSKGSKELLVIDTEIHNQVKQKHRNLYYSYIDYQKAFDSVPHSWLIHILKIYKVDDNILQFLQYAMTKWTTKLTLKTQDETLCTHPIKIARGIFQGDSLSPLWFCLSINPLSRILNRTDLGYKIDRDNNIKLNHLLYMDDIKLYAGNRNQLDQLLRLTEQFSTDIRMTLGTDKCKINCINNGKYEQTEAFNLELQGGLIESMEPKDTYKYLGYYQSTCINHSEIKNLLKSKYKYRLQKILNTQLSARNKTKAVNTYAIPILTYSFGIVKWSDTELNALNTVTRVASYRHNIHHIHSSVERFALKRKLGGRGFLDIRDLHYSQIDNLRSYFFTKANNSSIHNAIVNISHTGTPLQLNNSSFDPQLKRMTDTQKLENWRKKALHGKFPHQLDQDHIDSNASCTWLTKGNIFGETEGFLIAIQDQVIKTRNYSKYILKENIETDKCRLCHQNTETIDHITGGCSVLAYKEYTHRHDNVAKHIHQQLALKYRLVNQYTPYYKYKPKQVLESDTIKLYWNRDIITDRTILSNRPDITLTIKALKTTYLIDISVPNTHNLKQKHTEKIQKYIPLADEIRQMWHQQTVTIVPIIISSTGVIPKTLNKSLKLLDLHENIYVQLQKSIVIDTCAIVRRFLNPTTLSLQNTQNRVNANPTSHPHFTSRNTHTEIHNTNNQ

SEQ ID NO: 1183 - protein, 1354 aa, Emesis brimo
MRLRNRVIPQAGTCDGESRPESSDLGCPTYSGEGNVSLNSAQSRTVAGNDHTISYSSSNPVSFQSSFNTSTSSPNFHQHHDTCSSPTSSTSYLLCDVAQEILSCPLVPTTNNINSTSLTFMNSSNSVENEIHQSTLDTNSPVRNVLQEIMPATTLAGKSRQRMKWTNNINKDLLRCYYIVTNCEKDLTSYRHSLHEKFIESYPELQHISEQRLADQIRVIHKNNRISQPERERIKFLVTQMMSSSNNLHLERNNITDIQTVTSMVPIGEEQHLIDTLLTDGTPQDSIHTGTQETDTTTPLSSSVNTSTLDSQILRNCDKISNETIVNTFKEMLIKYTGTDPILRPPIPKIQITFNTIKTVNVINDIVGKHLQAMNTVTLEELHEVIYCAAKTVTTIHTYKVANSDIYKNKTHKQNKSPWEKRLDSRVEKLRKDIGQITQHLNGKLSYKKQLKLNIYNKTRDDIINILDNYKQKLQAYSKRLRRYKKSNQRKSDNNLFNNNQKLFYQRLNSNKITITHPPDIDAIQTYWKNIWSKPVKHNTHTPWTEIEEQEMSNIGFMARVVIDEEDIALSIKKTLNWKAPGPDQVQNYWLKYLTTTHKYIANTLNNIILNPHKIPAFLTQGITYLKPKDYDTTNPSKYRPITCLPTLYKLLTSIIANKLNAHISQHNIIPEEQKGCCKGSKGCKELLVIDTEIHNQVKQKQRNLYYSYIDYQKAFDSVPHSWLIHILKIYKIDKNIVKFLECAMTKWTTKLTLKTPDKTLCTQTIKIARGIFQGDSLSPLWFCLAINPLSRILNRTDYGYKIDRDNNIKLNHLLYMDDIKLYAGTRNQLDQLLRLTEQFSTDVKMTLGTDKCKINSINNGQYKHAEIFNLELHGGQIDSMEPKDTYKYLGYYQSTCINHSDIKKILKSQYKQRLQKILSSQLSARNKTKAINTYAIPVLTYSFGIIKWSDTELNALNTATRVASYRHNIHHIHSSVERFTLKRKLGGRGFIDILDLNYSQIDNLRTYFLTKANNSAIHNAIINISLSGTPLQFNNNSFDPKLKRMSDTQKLENWKKKALHGKFPHQLDQNHIDRNASCDWLTKGNIFGETEGFLIAIQDQIIKTRNYSKYILKENIDTDKCRLCHKNTETIDHITGSCNILAYKEYTHRHDNVAKHIHQQLALKYKLLNLYTPYYKYKPKQVLESDSVKLYWNRDIITDRTILSNRPDITLTLKALKTTYLIDISIPNTHNLQQKYTEKIQKYIPLADEIRNMWHQQTVTIVPIIISSTGVIPKTLKKSLRLLDLPDNTYIPLQKSIVIDTCAIVRRFLNPTSLSLQNTQNTNHNNSTLLNIRGYPNITLHNTCTNTQSIDNH

SEQ ID NO: 1184 - protein, 1358 aa, Apodemia duryi
MRLRNRVIPQAGTCTGESRPKSSDLGCPTYSGGDNVSLNSAQPKAVAGNSQISQPPSHSSSPTSSSQTLFVTPNSSPDFRELQDSFSSPSSSTSNLTRDVAREMLVYPHVPTAVNINSTPSILINSSNCVDSETHPSTLDTNSPVRSVLQDIMPATTLTGKYRQRMKWTHHINKELLRCYYVVTNCEKDLTTYRHLLRRKFIETFPELQHLSEQRLADQIRVIHRNNRISQPERERIKHLVSHTLSSPNNNHTAWNNITETQPVACTSLESRQQSSVGLSLIEGSPHDQTHIDTQQSNITTRPSLSSSSSEHDIQTLDSQILTRSVSKFSLGTIENTFNEMLIKYAGTDPILRPPIPKLQTNCNTIKTVNIVNDIIDKHLKAINTHTLEELQEVIYTAALTVTTLHSANAGSNSCTFKNNTHRQKMSPWEKRLVNKVAVLRKEIGQLTQHLNGNLSYKKQLKLNIYDKNRDEIINLIDNCKQKLQAYSKRLRRYKKSNQRKADNNLFNKNQKLFYQRLNTDKINITQPPDIDTIQTYWENIWSKPVNHNTHSPWTEIEEQEMSNIGLMDKIVINEEDIALSIRKTLNWKAPGPDKIQNYWLKYLTTTHKYIAKTLNDIILNPHKMPTFFTQGITYLKPKDHDTTNPSKYRPITCLPTFYKLLTSIIANKLNIHIIQHNIIPEEQKGCCKGSRGSKELLVIDTEIHNQVKQKHRNLYYSYIDYQKAFDSVPHSWLIHILKIYKIDDNIIRFLQYAMTKWTTTLTLKTPDKTLSTNPIQIARGIFQGDSLSPLWFCLSINPLSRILNRTDYGYKIDRENNIKLNHLLYMDDIKLYAGTRNQLDQLLKLTEQFSTDIKMTLGTDKCKINCINNGQYKQTDTFNLELHGGLIESMEPKDTYKYLGYYQSTSINHSDIKNLLKRKYKDRLQKIFNTQLSARNKTKAVNTYAIPILTYSFGIVKWSDTELNALNTATRVASYRHNIHHIHSSVERFTLKRRLGGRGFLDIRSLHYSQIDNLRSYFYTKANNSSIHKAIVNISNPGTSLQLNNSSFDPKLKITTDAQKIEDWKRKALHGKFPHQLDQDHIDRNASCNWLTKGNIFGETEGFLIAIQDQVIKTRNYSKYILKENIESDKCRLCHKNPETIDHITGSCSVLAYKEYTHRHDNVAKHIHQQLALKYRLVHQYTPYYKYKPKQVMESETIKLYWNRDIITDRTILSNRPDITLTLKALKTTYLIDISIPNTHNLQQKHTEKIQKYIPLADEIRDMWHQQIVRIVPIIISSTGVIPKTLNKSIKLLDLHKNIYIPLQKSIVLDTCAIVRRFLNPTTLSLQNTQNRIDTNENSTSHPHFTSQNTHRYTNYT

SEQ ID NO: 1185 - protein, 1357 aa, Ernsta delagoae
MRLRNRQVPQAGTRKGESRPGSSGPGCPTYSGEGNASHMTTQPQTVVVEKPHTISGVTSPISSTQSLFHSPSSSLHSYEFDHSPSRSSNVTPSSSDVAGEAYAISPLPIPDITTHARALQNMTDNRVHQLTHISSPHITTPARSVLQEMLPATTLAGKSRQRMKWTDQINRELLRCYYIVTHLETNLTAWRPLLQQMFADSFPELSHLSEQRLADQVRVIHKNNRISVSEREKIKLLVSSLLSPSNNHNQATDTNNIARHNNIDAHQVGDNLEIQENTHFCSSTRPSRSLSMHSNINQHITQAHNTPTKPNQPFISTEHCETQIPIELDSLIETVDYEKIHNTFREMIVKYSGTDPTLRPIIPKLQITRNAIKTINTTNELIDKYLQTKESINIEEIHEVIYCAAQTIITIHSENANKFENITENNNKPKGKKKKWEERLEKKISALRKEVGQLTQYLKGNLTQKKQQKLNTNSKSTEEVIEYLDKCKQQLQAYCKRLRRYKISNQRKSHNKLFNTNQKRFYQTLNEEHINITEPPPLENVERYWKNLWSKPVHHNSHASWMKIEEQETSEIDPMPEIIITKEDISTAVRKTLNWKAPGPDKIQNYWIKYLTSTHEHISNAFNHIIHNPHDTPSFLTQGITYLKPKDNDTTNPEKYRPITCLPTIYKLLTSIISHKLDTHITRNQIIQEEQKGCRKGSKGCKEQLIVDTEIHTQVKHKHTNLFYSYIDYQKAFDSVPHSWLIQILKIYKVDNKLIQFLECMTKHWSTNLHLRTNKTTLLTQKIKISRGIFQGDSLSPLWFCLALNPLSRILNNSGHGYIVDRNTNIKITHLLYMDDIKLYASNKQQLDHLLRLTENFSTDIKMDFGINKCKINSIIKGQHKKTESFELHLQGGKIDSMEPRETYKYLGYQQSTSINHTEIKNSLKTKYKHRLHKILKTQLSARNLVKAINTYAVPILTYSFGVIKWSDTELDALNTLTRTASYKHNIHHIHSAVQRFTLKRKLGGRGFIDIKNLHYTQVENLRTYFTAKSKESTLFKAILNLQQAGTPLQLNNTEFNPNLKIHTDEQKIDTWKKKALHGRYPHQLSQDHIDQNASCTWLTKGNIFGETEGFMIAIQDQIIKTRNYSKYILKEPIETDKCRLCHQTTETIDHITGGCSVLAYKDYTHRHDNVAKHIHQTLALKYKLLESYTPYYQYQPKKVLENSTVKLYWDRDIITDRTILSNRPDITLTLKNIKTTYLIDIAVPNTHNLKQKHTEKIQKYIPLADEIKQMWHQETVKIIPIIISSTGMVPKSLKSALKLLDLQENSYIPLQKSIILDTCSIVRRFLNPTTLTFQLDHTHNSTTNTIQNTHVTTTNI

SEQ ID NO: 1186 - protein, 1326 aa, Oechydrus chersis
MRLRNRQLPQAGTLPGESRPEPTGSGCPSYSGGGTVSLNTAQPSAVAEVISTLNPNTCNTTQISSPSSSISLFQSPNSSPQSYLCQSTSTSTTSSSMSEDVAQEAQAIVSAPIPGITNSTRTSEYNSSSRVDHSHTHLSHSITNTPARSVLQDMLPATTLAGKSRQRMKWTYEINKELLRCYYIVTGCETNLTAYRPLLYQKFIETFPELSHISEQRLADQIRVIHKNNRIPANERQHIKQKVTSENSVVNNLSDQNNSHDVESGHLNNISTITQQHHIHTTPHTETQHTNTFTYTLQHTEIREHAETQDSEIMNSINPTEYNVIENTFIEMVTKYSGTDPTLRDSIPKLQINRNTIKTVNYVNLIIEKYLQNKETFSLEEIHETIYCAAITVIMTHSKPSKKPTPIDISKKNIDQRKPYWEQRIENKIAALRKEIGQLTQYLNGNLSQKKQHKINPNNSNKDEIVNRLDNNKQKLLAYSKRLRRFKTSNKRKKDNNLFNKNQKLFYRNLNTEHIKITHLPDIADVQKYWERLWSKPIQHNSNASWTHIEEQETHNIEIMPEMVIDTDDVTKAIKRTLNWKAPGPDKIQNYWLKYFTSTHEHIAKALTHLIYNPEDMPSFLTQGITYLKPKDKNTTDPSKYRPITCLPTIYKLLTSIIAYKLDSHITRNGIIAEEQKGCCKGSRGCKEQLIIDTEVHNQVKQKHRNLFYSYIDYQKAFDSVPHSWLIHVLKIYKVDNRLIQFLQQTMKKWITKLTIHTNTTSLSTQTIKIARGIFQGDALSPLWFCLALNPLSRILNKSGFGYSLDVNNDIKLTHLLYMDDIKLYASNRQHLNHLLNVTEKFSTDIKMTFGIDKCKVNCIIRGQHKETHSYNLEIQGGIIDSMEAKESYKYLGYQQCTNINHTEIKNTLKSKYKHRLNKVLNTQLSARNKTKAINTYAIPILTYSFGVIKWSDTELEALNTLTRTTCNKHNIHHIHSAVQRFTLKRKLGGRGFIDIKNLHYTQVNNLRSYFKTKANYSTLHKAIVQISNSATPLKLNDSQYNPISKISKDEEKLENWKKKALHGKYPHQLEQSHVDRDSSCTWLTKGNIFGETEGFMVAIQDQTIRTRNYSKFILKEAIPTDKCRLCHQTSETIDHITGGCSILATKEYTHRHDNVAKHIHQQLALKYKLLEEYTPYYKYKPKKVLENSTVKLYWDRDIITDRTILSNRPDITLTLKTSKTTYLIDISVPNTHNLKQKCTEKIQKYIPLVDEIRQMWHQEFVRVVPIIISSTGVVPKTLKSALQLLDLHEKTYIPLQKSIIIDTCSIVRRFLNPSTVTLQTNADIT

SEQ ID NO: 1187 - protein, 1265 aa, Grais stigmaticus
MLCCTGSSRNFSCSIHDIINPTCILDNNNINNHVDINITTQTHTNTPERSVLQEMLPATTLAGKSRQRMKWTDQINRELLRCYYIVTNCETNLTAYRPLLRQKFVESFPELSHLTEQRLADQIRVIHKNNRIQASDRQMIKQSVSQLISNQAHSFEATDNNYPGSSEEIITPNSTYSTNAQGHETNTQHTPCTQHTSSSIQHTSTSIQQALTFTQTNSIHRQTTLMTAQERTLDINHHTIDTELRNITEEQIDYPKIENTFTEMLIKFIGTDPTLRPIIPKIISTRNTIKTVNTVNTIIGKYLQKKGELTIEDIHVAIYCAAQTVTKMHARNTNQNTVTNTNNTIKGEKKPTWQRRLETKITELRKEIGQLTQYLNGNLTHKKQSKINPKNKSKDEIIDQLDNDKQKLQAYSKRLRRYKISNKRKSDNIMFNTNQKLFYRKCNNESNTIITQSPDISTVQNFWENIWSKPVLHNSHASWTKIEEQEISDIHRMPEVNIKRDDVTTAIKKTLNWKAPGPDKIQNYWIKYLTTTHEYIANSLNQLIQNPNMLPTFFTQGITYLKPKDDDTTNPAKYRPITCLPTIYKLLTSIISHKLNSHITHNKIIAEEQKGCCKGSMGCKEQLVIDTEIHNHAKQQHRNLYYGYIDYQKAFDSVPHSWLIHVLQIYKIDNSLITFLQHTMKNWTTILNIRTNNTTLNSKPVKIARGIFQGDSLSPLWFCLAINPLSRILNKTNYGYNIDRENSIKLTHLLYMDDIKLYASSRQELEYLLRLTEEFSKDIKMTFGTDKCKVNSIVKGQHRETDTYALLTQEGTIENMNHRDTYKYLGYHQNTSINHTDIKNTLKIKYKQRLNKILNTQLSARNKTKAINTYAVPILTYSFGIIKWSVTELEALNTTTRTSCNKHNIHHIHSAVQRFTLKRKLGGRGFIDIKNLHYSQIDNLRSYFLMRANNSTVHKAIVNLPLSGTPLQLNNKQFNPKQKILKDEQKIINWKSKALHGKFPHQLEQDHVDQTASNTWLTKGNIFGETEGFLIAIQDQVIKTRNYSRYILKESIVDDKCRLCHQTTETIDHITGGCNILANKEYTHRHDNVAKHIHQQLALKYDLLETYTPYYKYKPKNVLENSTTKLYWNRDIITDRTILSNRPDITLTIKPTKTTYLIDIAVPNTHNLKQKHSEKIQKYIPLADEIKQMWHQQTVRIVPIIISSTGVVPRNLKDALKSLQLPETTYIPLQKSIVLDTCSIVRRFLNPTSLPLNTEGNIHINTTQN

SEQ ID NO: 1188 - protein, 1333 aa, Eburuncus unifasciata
MQLRSRKIPQAGTRKGESRPGPSSPGSPTYSGGGDASHSATQPRAVVVNKSPTTHTSTISNPSTPVSFTHSLFETSSSSIHSYERRSSLQSTPLSSDVSRNGITDSSVPITDIINHTRVTNTNTDFRVNHDTHVASLNINTPARSVLQDMLPATTLAGKSRQRMKWTNEINKELLRCYYLVTNNETDLTAWRPLLHKKFAEIFSELQHLPEQRLADQIRVIHRNNRISAPEREDLKKEVSLVLLATNGRSEIIPENAVMHQSPTSTQHNNYHTPTLSQTIYVDNFSPSILHQTNTTVLENQHVIIPEQIATTNSVINCQKDLIIKNKIEDTFMEMTLKYTDTDPSLRPIIPKPKITRKLIKIIHLTDQVVNEYLRTKDTITLGVIHEIIYCAAQTITTINTENLIKLNHTKSNDNTTRKQNKPQWENRLDNKIMVLRKELGLLTQYLKGKLTRKKQLTLNPNNKSNDAIQEDLDIKTQKLQAYSKRLRRYKLSNLRKAQNSLFDTNQKQFYQTLNNERIQIALPPSKDDLQNYWKNIWSTPTHHKTHSPWEEVETEEMANIEPMQDINIVKNDVEQAIRKTLNWKSPGPDKIHNYWIKYLPSTHEHIANIFNNLIKNPNETPSFLTNGITYLKPKDNDTTNPANYRPITCLPTIYKLLTSIIADKLNTHISLNQIIPEEQKGCRKGSKGSKEQLIIDTEIHYQVKQKHRNLFYAYIDYQKAFDSIPHSWLTHVLRIYKVNNKLVQFLNYTMNNWSTKLNLYTNTTNICTDSIKIKRGIFQGDALSPLWFCLAINPLSRILNKTDFGYVIDREKNIKITHLLYMDDIKLYAANRQQINHLIKLTEQFSSDIKMAFGTNKCKINNIYRGKHKETDSFHLSLQEGIIDSMKPNETYKYLGYKQSTSISNADIKNTLKSQYKHRLHKILNTQLSAKNKIKAINTYAIPILTYSFGVIKWSDTELEALNTTTRTISSKHNIHHIHSAIQRFTLKRKNGGRGVIDIKNLHYAQIDNLRTYFLLKSNSNNLIKAIVSLPQAGTPLQLNNIQFNPKQKILTDDEKINIWKSKALHGKYPYQLGLDHIDKNASFSWLTKGNIFGETEGFMIAIQDQIIKTRNYSKYILKQPIDTDKCRLCNQSIETIDHITGGCNILANKEYTHRHDNVAKHIHQQLALKHNLTQSYTPYFQYKPKAVMENSTAKLYWNRDIITDRTILSNRPDITLTLKHTKTTYLIDISVPNTHNLKQKHTEKIRKYMSLADEVKQMWHQELVKIVPIIISATGIIPKTLKPALQLLQLKENTYIPLQKSIIIDTCSIVRRFLNPTSLALQQDEHDNTTI

SEQ ID NO: 1189 - protein, 1365 aa, Ypsolopha scabrella
MRLRSRNILPPAGTSNGESRPEPTSSGSPTYSGEGNVSLHPAQSSTVAGQENNTPSPDMLSYASSPISSTHSLFQSPSSSPYDFQLTSTSRSTTISPMSCDVVQEALAICPAPITGIMNPTRTSETNSHSNRVDTNTERHTTDTNTPARSVLRDMLPATTLAGKSRQRMRWTNQINHELLRCYYMVTNCEENLTAYRPLLHQKFTETFPELSHLTEQRLADQIRVIYRNNRIPASERESIKQVVLQTITTLDNPNTNNFETQVNTNNNDVIYNQFQNSHTLEQTDNTQQTIASTPQPIIMTLSDNEITTESASVAFQETYEHTQSQGPEIDITSEESINYQKIEDTFTEILIKYTGTDPTQRPIISKIQTTGKVIKTIKTVNEIINKHLQNKEDVTIVEIHEIIYCAALTVTTYTNSTNKGKKKEHNKTNTNINQANKKKTPQWQKRLENKIAILRKEIGRLTQYLNGNLTQKKQQKLNSNNKSRDEIVNELDNYKQKLQAYSKRPRRYKISNQRKSDNNLFNTNQKLFYRNLNSDQIEITEPPNIDEVKHYWENLWSNPLQHNSHSSWAKIEEQEVDNIDPMPEISINIDDVTYAIKNTLNWKAPGPDKIQNYWLKYLTSTHKYIASTLNHLLYNPQDIPPFLTQGITYLKPKDNDTANPAKYRPITCLPTIYKLLTSIISHKINSHLTSNKIIPEEQKGCSKGSRGCKEQLVIDTEIHNQVKKKHRNLYYSYIDYQKAFDSEPNSWLLHVLKMYKIDNRLIQLLEYAMTNWKTKLNIRTNNITLSTPSIKIARGIFQGDSLSPLWFCLALNPLSRILNKTGYGYNIDTGNDIKLTHLLYMDDIKLFAANRQQINHLIRLTEEFSRDIKMTFGTDKCKINSMIKGQHKETDPYILEQQTGTIDSMEPKETYKYLGYQQSTSIDHTEIKNALKTKYKQRLSKILKTQLSARNKTKAINTYAIPILTYSFGIVKWSDTELEALNTTTRTTCNKHNIHHIHSAIQRFTLKRKLGGRGFIDIKNLHYTQIINLRSYFHTKANESAIHKAIVNLPQPGTPLQLNNSQFEPKHKITTDEQKLENWKKKALHGRFPHQLDQEHIDRTASCTWLTKNNIFGETEGFLIAIQDQIIKTRNYSKYILKETIETDKCRLCNLASETIDHITGGCSTLANKEYTHRHDNVAKHIHQQLALKYKLLQSYTPYYQYKPKKVIENSSAKLYWDRDIITDRTILSNRPDITLTLKSTKTTYLIDISVPNTHNLKQKHTEKIQKYIPLADEMKQMWKQETVKIVPIIISSTGIVPKTLKKALELLDLPIKTFIPMQKSIVIDTCSIVRRFLNPTSLPLLTNHTTPHINTTHSMPPNTQVMQ

SEQ ID NO: 1190 - protein, 1227 aa, Lycaena phlaeas
MQTTRISENYTLINTVDTNTPSSNSQIDTTARSVLREMLPATTLAGKSRQRMKWTNQINQELLRCYYIVTHCESNLTAYRPMLRQRFIQIFPELSNITEQRLADQIRTIHKNNRISASEREKIKQSVLHATNITQELIQPIINNDTHQINTNFSINNSREYTPDSHSLLENSQQILSITQTHDSITTRNIHTIPIESNDQNNTSEETINVDKIENAFNEMIIKYSGTDPTLRPTIPKLQITRATIKTVNIINDIVGKYLNNKITVTIEEIHEIIYCAAMAVISIHRKQEQICSNNASSTHRITANREKKPHWEKRLIDKISALRKQIGLLTQYLNGNLNRKKQQKLNPSNKSKDEMTDQLDICKQKLQANSKRLRRYKLSNKRKSDNKMFNNNQKLFYKNLNIENINITQAPNLSDLQKYWENIWSNATDHNHNTSWMLTEEQEVSDIEIMPEITIEKEDVTLTLKNTLNWKAPGPDKIQNYWLKYFTTTHQYLAQALNNLINHTHNIPEFLTQGITYLKPKHKDTTNPANYRPITCLPTIYKLLTSIISHKIQSHIVEYNIIPEEQKGCSKGSRGSKEQLIIDTEIHSQVKQKHRNLHYAYIDYQKAYDSVPHSWLLHILKIYKIDNRLIKFLQSIMAKWTTKLALKTNNATLSTPSIKITRGIFQGDSLSPLWFCLALNPLSRILNKTGYGYVIDRENGIKLTHLLYMDDIKLYAANRQELDHLIKITETFSDDIRMKFGIDKCKINSIIKGQHKNTTPHILQLQEGTIDSLEHKDTYKYLGYLQSTSINHTDIKTTLKSKYKHRLNKILNTQLSARNKTKAVNTYAIPILTYSFGVIKWSDTELEALNTLTRISCYKHKIHHIHTAVQRFTLKRKFGGRGFIDIRNLHYSQIHNLRSYFLSKANNSNIHKAIVKISNSGTPLQLNNDQFDPQQKILKDEQKIENWKKKALHGKYPFVLQQEHVDKNASCTWLMKGNIFGETEGFLIAIQDQVIKTRNYARHILKEQIGTDKCRLCHQSTETIDHITGGCSVLANKEYTHRHDNVAKHIHQQLALKHKLLDTYTPYYKYKPKNVLENNTTKLYWNRDIITDRTILSNRPDITLTLKHTKITYLVDIAVPNTHNLKQKHTEKIQKYIPLADEIKQMWHQDTVTIIPIIISSTGVVPKTLNTALKTLQLPATTYIPLQKSIVLDTCSIVRRFLDPTMLSFNENRDITNVSTQQHTEH

SEQ ID NO: 1191 - protein, 1327 aa, Cyaniris semiargus
MRLRNRNIPQAGTGAECNGESRPGPLGPGSPSYSGGDTVPHTSVQSYTVTDNIVPRTSTIQSYPSSPTSSISLFSSPHSSPKSYMFDTNSSSSRSHTLSPLSEDAARVAPANYPVSTSDMTPSTSTLQNNVPHTVDHNIPQSHLSNTPARSVLQDMLPPTTLAGKRRQRMKWTDLINKELLRCYYIVTSCETNLTSFRPLLHKKFIESFPELRHISEQRLADQIRVIHRNNRIPADVREQIKQSVSETVEEFNCQNTLQGTTSQTSLECNMQTKSQPLVDYSSSSHAATLISHPPLTLPTPSENIENVVTLDSDDTIPSIDHNPTDNQKIENIFKELLIKYAGTDPSLRPIIPKLQVTKSIIKTVNVLNNIISKHLEEKNKPDIDEIQCTIYCAALTTTTLHTTTKLNNSSEPNKTLKATDNIAKWQVRIENRIKKLRKQIGQLTQYLNGNLNAKKRQKINPKNYTTNQLVDQLDKLKQKLQAHSKRLRRLKISNDRRRHNTLFLNNQKLFYQNLNSDNIKVTQVPNIEEVKTYWESIWSKPAEHNDQASWIDNETQEYQNISIMPEIIINKEDVTNAIKKTLNWKAPGPDKIHNYWIKYFSATHHYIANIFNYIIQDPQTIPAFLTQGITHLKPKDNDTTNPTKYRPITCLPTLYKLLTSIITQKLNTHIIQHKIIPEEQKGCAKGSMGCKEQVIIDTEIHNQAKQKHRNLYYSYIDYQKAFDSVPHSWLIHVLKIYKVDIKLINFLQYIMSTWSTRLTLRTNKANLCTSPIKIKRGIFQGDSLSPLWFCIALNPLSKILSKSCHGYTLDKLNNIKVTHLLYMDDLKLYASDRKQLELLLKITEKFSTDIKMKFGIEKCKINCINKGLHTQTEPLNLEFQEGMIDSMQAIDTYKYLGYIQSITINHKEIKNTLKSKYKQRLNKILATQLSGRNKMKAINTYAIPILTYSFGIIKWTDIELETLNTTTRMLCYKRNIHHIHSAVERFTLKRKLGGRGIIDIKNLHYSQIENLRTYFINKAQSSQLHKAIVSLPHKGTPLQLNNNLFNPNHKIVKDANKIQKWKSKALHGKYPHHLEQEHVDQIASCSWLTRGNIYSETEGFLIAIQDQVIKTRNYSKYIIKESISTDKCRLCHLTTETIDHITGGCSALANKEYTHRHDNAAKQIHQLLAIKYKLIDSHTPYYKYKPQNVLENSNVRLYWDRDIVTDRTILSNRPDITLTIKSEKTTYLIDIAVPNTNNLKQKHNEKIQKYIPLADEIKQMWHQEVVKIIPIIISSTGVIPKTLATSLKTLDLHKNTYIQMQKSIIIDTCSLVRRFLNPSSSFSTPQ

SEQ ID NO: 1192 - protein, 1357 aa, Pyrgus malvae
MRLRNRQIPQVGTREGESRPGPSGSGSPAYSGGGNALHMTAQARTDAANTNNQNHTSSHISSDPPSPISSTESLFQSPSSSPHSFQFQSTSRSTTISPLSCDVAQEALAISPVPTLGNNDPTRPSENNINNRVNHYTSSSLNHNTPARSALQEMLPATTLAGKCRQRMKWTEQINTELLRCYYIVTCKETNFTAWRPLLHERFIQKFPDLSHLSEQRLSDQIRVIHRNNRIPASKRELIKQSISVTTTPHCSNVHQPTNNDISTENGCNSNIDTITDIVVQNNSITAQSVTSLQTHNHPTQTHPIPINTEHVQIQDFETTNTTPESINYTKVENTFKEMLIKYTYTDPTLRPIIPKLKITRHVIKTVSTINQIVDKHLSTKNTLSLEEIHVVIYCAAQTVATLYTSRLNNFENHTKDNNANRQIKSRKPKWEKRIETKIETLRREIGQLTQYLNGNLSLKKQYKLNPHSRSRDDITTQLDTDKQAYSKRLRRYKKSNERKYHNKLFNNNQKLFYQKLSTDQIQITQPPDKNDVHNYWTKLWSNPVQHNTHLSWSEIEEEEHANVNPMSELKIDVEDVIQAVKKTLNWKAPGPDKIQNYWLKYISATHKYIANTFNHLLHNPQDTPLFLTQGITYLKPKDNDTTNPAKYRPITCLPTIYKLLTSIISHKLNTHITTNQIIPEEQKGCSKGSRGCKEQLVIDTEVHYQVKKKHRNLAYCYIDYRKAFDSVPHSWLIHILKIYKVDSILINFLQHTLKNWTTKLHLRTENTTLSTPIIKILRGIFQGDSLSPLWFCLAINPLSKILNKSGYGYIIDREHNVKLTHLLYMDDIKLYASNRTQLNHLLKLTEKFSADIKMSFGTEKCKINSIVKGKYDEAQPFDLHIQRGTIDRMEPMETYKYLGYQQSTSVNHTDIKNTLKVKYKQRLHKILNTQLSARNIVKAVNTYAVPILTYSFGIIKWSDTELEALNTTTRTVSYKHNIHHIHSALQRFTLKRKLGGRGFIDIKNLHYIQIKNLREYFLTKADTSPLHNAIVNLSQSGTPLQLNNHAFDPKIKILTQDQKIEGWKNKALHGRYPHQLDQDHIDRNASCTWLTRGNIFSETEGFLIAIQDQIIKTRNYAKYILKESVLTDKCRLCHQSTETIDHITGGCSALASKEYTHRHDNVAKHIHQQLALKYKLLESYTPYYQYKPKHVIENNAAKLYWDRDIITDRTILSNRPDITLTLKSSKTTYLTDIAVPNTHNLRQKHTEKIQKYIPLADEIKQMWHQDTVRIIPIIISSTGLIPKTLLTALKILDLKENTYIPIQKSIIIDTCSLVRRFLNPTSLIINDEHNTNTNTTSHNTTHMHTTADTQEPGYLA

SEQ ID NO: 1193 - protein, 1400 aa, Symmachia rubina
MRLRNRVIPQAGTCEGESRPESSGSGSPAYSGGGTVSLSPAQSKTVAVNNNLPSPHISSPLSSTQSLFPSPISSPNSYKFQHSSSSRSNTTSPVSVDVAQEALASSPAPITGTISPTRRTLTNTFNCVDNITHSLALDTNTPARSALQDMLPVTTLAGKSRQRMKWTNYINQELLRCYYIVTHCETDLTAYRSLLHSKFIEVFPELSHLTEQRLADQIRVIHRNNRIPVPERERIKQSVSQLIINPNYYVRITSNTDNQSMTNTSTTNNQQSVIHLPEAQDSSHSYIQQSSITQTAQMSQTLENNEHIQTLDTFVQAGSQDPVDYKKIETVFTEMLIKYKGTDPTLRPSIPRLQTAQHTIKTVNTLNDIIDKHLQIKDTHTLEEIHEVIYCAALTTTTLHNRQVTKVNNNIIHEKSQHNTRTKNKAQWQKRLENKIANLRKEIGQLTQYLNGKLSQKKRQRLNPDNKNRDEIIDKLDHNKQKLQAYSKRLQRYKKSNQRKLDNKLFSANQKLFFQKLKTENIKITQPPKADAIESYWKNLWSKPVEHNIHSAWAEIEEQEMSTISTMKEIEIDKEDVTQSIKKTLNWKAPGPDKIQNYWLKYLTSTHKYIATILNNLILNPHKMPPFFTQGITYLKPKDTDTTNPSKYRPITCLPTMYKLLTSIITHKLNQHISQHKIIPEEQKGCCKGSRGCKELLVIDTEIHNTVKQKHKNLHYAYIDYQKAFDSVPHSWLLQILKIYKIDNNIIQFLQHAMTKWSTKLNLKTNEKTITTSPIKISRGIFQGDSLSPLWFCLALNPLSRTLNRTDYGYTIDKDNNVKLTHLLYMDDIKLYSDNRHQLNQLLRLTEQFSDDIKMTFGTNKCKINSIVRGQHKETEPFNLDSNGGLIESMEHKETYKYLGYHQAIAISHSEIKKSLKNAYKHRLHRILRTQLSARNKIKAINTYAIPILTYSFGIIKWTDTELHALNTVTRMASYKHNIHHIHSSVERFTLQRKLGGRGVIDIKDLHYAQIDNLRNYFRTKYNDSTLHKAIVNSSYTGTPLQLSNEQFDPKLKMTNEAQKIENWKKKALHGKYPYQLEQDHVDKKASCTWLTKGNIFGETEGFLIAIQDQIIKTRNYSKYILKETIATDKCRLCHQNTETIDHITGGCNILANKEYTHRHDNVAKHVHQQLALKYKLLELYTPYYKYKPKNVLENNTAKLYWNRDIITDRTILSNRPDITLTIKHQKTTYLIDISIPNTHNLKQKHNEKIQKYIPLADEIKQMWHQETVKIIPVIISSTGVVPKYLKIALKSLDLHENTYIPLQKSVVIDTCGIVRRFLNSTTLALGNTQNTTDTTQAISTHIPMSNTPYINHTNTQNSQPHTSNYDIHTFNTDTQIAIHNSNPCINPSNTTHMTQPITH

SEQ ID NO: 1194 - protein, 1285 aa, Tiana niger
MRLRNRQLPQAGTREGESRPEPSGSGSPTYSGEGNASHKTTQPCTVVVENPPSHITYSTSPMSSTHSTSLQSPSSPPLSRSTTITPLSCDVAQEAHAVSPVPTTDITNPMRALQNNTVNRINHNTHTLSPNINTPVRSVLQEMLPATTLAGKSRQRMKWTDQINRELLRCYYLVTNIETNLTAWRPMLQQKFAESIPELSHLSEQRLADQIRVIHRNNRIPVSEREKIKSSVIVPLPVPNSSNQIDIDNTINQTTINAMSITNNHQSQSDTHSLNHILHSDHNQHIIQQNNTTTYTHQSFNNVEHIETRISKTMNMPLESIDYKKIENTFTEMLIKYSGTDPTLRPTIPKLQITRNAIKSINATNEIIGKHLRAIDIITIEEIHEVIYCAAQTITTIQKKTANKLENTTENTYKARKNKPQWEKRLENKIMILRKEIGQLTQYLKGNLTQKKQCKLNPNNRRKEEIIEQLDVYKQKLQAYSKRLRRYKISNQRKSDNKLFYTNQKLFFQKLNDEHIHITEPPNKDDMEMYWKNIWSKPVQHNAYSPWTGIEGEEISKIDPMPEITINKDDVSQAIRKTLNWKAPGPDKIQNYWIKYLSSTHEHIAKTFNNLIHNPQETPSFLTQGVTYLKPKDTDTTNPAKYRPITCLPTIYKLLTSIITHKLNTHITHNQIIPEEQKGCRKGSKGCKEQLIIDTEIHNQVKRKHTNLFYSYIDYQKAFDSVPHSWLIHILKIYKVDDKLIQFLQYTMKNWSTKLNLYTNKTSLCTQSIKISRGIFQGDSLSPLWFCLALNPLSTILNKTGYGYVVDTDSNTKITHLLYMDDIKLYAANRQQLDSLLSLTENFSTDIKMSFGIDKCKISSIIKGQYKQTDAFNLNIQGGKIDSMEPKETYKYLGYQQSTSINHTDVRNTLKIKYKHRLYKILKTQLSARNKVKAINTYAIPILTYSFGIIKWSDTELEALNRVTRTVSNKHNIHHIHSAVQRFTLKRTLGGRGFIDIKNLHYTQIDNLRTYFRRKSNENALFKAILKLPYSGTPLHLNNSEFNPKHKILTDVQKLDNWKKKELHGRYPHQLEQDHIDRNASCSWLTKGNIYGETEGFLVAIQDQIIKTRNYSKYILKETIETDKCRLCHQTTETIDHITGGCRFLASKEYTHRHDNVAKHIHQSLALKYNLLESYTPYYQYKPKNVMENSSAKLYWNRDIITDRTILSNRPDITLTLKSSKTTYLIDIAVPNTHNLKQKHVEKVQKYIPLADEIKVMWHQDLVQTIPIIISSTGIIPKTLFTGLK

SEQ ID NO: 1195 - protein, 1021 aa, Zopyrion sandace
MLLKYTDTDPTLRPTIPKLRITRNIIKTVNNTNDIIGNYLDTTDTQTLTQIHEVLYCAAQTVTSLHTTHNSKLDNNSNRTTKIKKPQWEKRIEDKIQILRREIGQLTQYINGNLSQKKCQKINPYNKDKDEVIEQLDDCKQRLQAYSKRLRRFKKSNDRKSHNNLFTTNQKLFYQKLNSEHIEIFQPPDKDEIFNYWRNLWTNPVQHNSHQAWAELEQQETEKIDPMPEIVIHKEDVSLAIKRTLNWKAPGPEKLQNYWIKYFTKTHEHIANAFNHLIQNPQQTPSFLTTGITYLKPKDTDTTDPAKYRPITCLPTIYKLLTSIVSHKLNIHIINNHIISEEQKGCSKGSRGCKEQLIIDTEIHNQVKEKRRSLFYAYIDYQKAYDSVPHSWLVEILKIYKVDSKLTQFLQHTMNNWTTNLNLRTTNTSICTRPIKILRGIFQGDSLSPLWFCLALNPLSKILNNTGYGYVVDKENNVNLSHLLYMDDIKLYANTRKQLDNLLHATEKFSTDIKMSFGTDKCKINSVIKGQYNKTHPFELNTQGGQIDRMELQDTYKYLGYQQNTSINHTDIKNTLKNKYKQRLHKIFNTQLSARNIVKAVNTYAVPILTYSFGVIKWSDTELEALNTTTRTISNKHNIHHIHSAVQRFTLKRKLGGRGFIDIKNLHYAQIDNLRSYFLLKSKDSALHKAITNFSHAGTPLQLNNKQFDPKHKILKDDQKIECWKKKALHGKYPHQVEQNHIDHNASNSWLTKGNIFAETEGFLIAIQDYIIKTRNYSKYILKEAIETDKCRLCHQITETIDHITGGCSILAKKDYTHRHDNVAKHIHQQLALKHKLLDTYTPYYQYKPKNVLENSTTKLYWDRDIRTDRTILSNRPDITLTLKSTMTTYLIDIAVPNTNNLKQKHTEKVQKYIPLADEIKQMWHQQAVRIVPIIISSTGVIPKTLKTALQLLNLPEATYIPLQKSIILDTCSIVRRFLNPTSLMLQDIQHIQNLPPLTSATHSSNNTTSNNTNTHIISNT

SEQ ID NO: 1196 - protein, 1251 aa, Hesperopsis alpheus
MRLRNRRIPQAGTREGESRPGSSGPGCPTYSGEGNASHKTTQPQTVVVEKPQNTSGTISPISSTHSLFQSPISSSQSYDHHHSPSRSSNTLLSCDVAEEALAISPLPITDITNPTRVLQNKTSNRVNPNTHHPSSLINTPARSVLQEMLPATTLAGKSRQRMKWTDEINRELLRCYYLVTQLETNLTSWRPLLQQKFTEQYPELSHLSEQRLADQIRVIHRNNRIPLSEREKIKKLVSTLLSQSSNPCEIIDDASDVTNQSNINVTLTTNLTSQPNIHSPHQTLDLNHDENTSQQRITISFQPLNTEHSEQTPVEFNQPIGSNDFEKIEHTFKEMLIKYSGIDPTLRPKISKLNITRNVIKTVNVANEIIRTHLESRETTTLEQIHEVIYCAAQTITLLHSKYNNRLDKDTEHSNNIKQRRQKWENRLESKISLLRKEIGQLTQYLKGNLTPKKQRKINPNNKSKEEIIEQLDTSKQKLQAQCKRMRRYKTSYERKSQNNLFNSNQKLFYQKLNKDHIQILEAPDKDEIEKYWKNIWSKPIQHNTHSTWTEIEEQEMLNIEQMSEITIDKDDVALAIRKTLNWKAPGPDKIQNYWLKYLTSTHKYIANTLNYLIHNPHETPSFITQGITYLKPKDTNTTNPAQYRPITCLPTIYKLLTSIISHKLNIHITKNQIISEEQKGCRKGSQGCKEQLIIDTEIHSQVKRIHSNLYYAYIDYQKAFDSIPHSWLIHILRIYKVDSTLIQFLQYTMNNWTTKLILQTNETLLYTQPIKILRGIFQGDTLSPLWFCLALNPLSKILNKTGYGYVIDKDNDIKITHLLYMDDIKLYAANKQQLNHLLKLTENFSTDIKMTFGINKCKINSIVKGKHNPIEPFELNTQGVKIDSMDLKETYKYLGYQQATSINHTDIKTTLKTKYKERLHKVLNTQLSARNKVKAVNTYAIPILTYSFGVIKWSDTELDAINTLTRTASYKHNIHHIHSAVQRFTLKRKLGGRGFIDIKNLHYTQIDSLRTYFKTKSNGNVLLTAISKLQQSGTPLQLNNPQYDPKQKIHKDEEKIDSWKKKALHGKYPHQLDQDHVDSNASCSWLTKGNIFGETEGFMLAIQDQIIKTRNYTKYILKETIETDKCRLCHQTTETIDHITGGCSVLANKEYTYRHDNIAKHIHQALALKYNLLESYTPYYQYKPKNVIENKTAKLYWDRGIVTDRTILSNRPDITLLLKATKTTYLIDIAIPNTHNLKQKHAEKVQKYIK

SEQ ID NO: 1197 - protein, 1276 aa, Ridens mephitis
MRLRNRQLPQAGTREGESRPGPSGSGRPTYSGGGNVSHKTAQSSAVAVDKSHTHSHPSSPISSTHSLFPSPNSSPNSYHFQPSSSRSSTITPLSCDVAQEAHANSPMPTTDFTISTRAIENNRLHRVNHNTHSTSHTINTPARSVLQDMLPATTLAGRSRQRMKWTDLINKELLRCYYLVTQNEANLTAWRPQLHRLFVETVPDLSHLSEQRLADQIRVIHKNNRIPAPEREQIKHSVSLLLTTTNSTNDHASTNNIDHQSTTSTTDNHQLITNSHSQILNSQYTTTITPEANTTQINQPFEISEHIQTQDSEMTDDALNSFDYKNTENIFTEMLIKYSGTDPTLRPVIPKPEITRNFIKTLNTINEIIDQYLQTKDSITIEHIHEIIYCAAQTVSTIHSKYVKNVENNTNINNIYTTRNQRKPQWEKRIENNIITLRKEIGQLTQYLNGNLTLKKQQKLNPNNKNRDELIEHLDKDKQKLQAYTKRLRRYKKSNERKSHNKLFNTNQKLFYQKLNTEQIQITQPPDINDVHNYWKNVWSIPVQHNTHTSWTKIEEQEMENIKPMPDTIINKHDVSQTIRKTLNWKAPGPDKIQNYWFKYLTATHEHIANAFNHLLRNPQETPYFLTQGITYLKPKDNDTTNPEKYRPITCLPTIYKLFTSIISHKLNEHITQNHIIPEEQKGCSKGSRGCKEQLVIDTEIHTHVKQKHRNLYYSYIDYQKAFDSVPHSWLINILRIYKVDSRLIQFLQHTMRNWTTKLSLRTQHMSLCTEKIKISRGIFQGDSLSPLWFCLALNPLSRILNRTDSGYIVDRDTNTKLTHLLYMDDIKLYAASRPQLDHLLKLTENFSADIKMSFGTNKCKVNSIIKGQHKETDSFKLGSQRGIIESMEHRETYKYLGYHQSTTINHTDIKNTLKTKYKQRLQKIFKTQLSARNKVKAVNTYAIPILTYSFGIVKWSDTELEALNTATRTISNKHNIHHIHSAVQRFTLKRRVGGRGFIDIKNLHYTQIDNLRTYFLLKSEESALHKAIVHLPQSGTALQLNNSQFDPKLKILKDDNKIENWKNKALHGRYPHQLEQDHIDHNASCTWLTKGNIFGETEGFLVAIQDQIIKTRNYSKFILKQAIDTDKCRLCHQTTETIDHITGGCSILANKEYTHRHDNVAKHIHQQLALKHKLLESYTPYYQYKPKNVLENNTAKLYWDRDIITDRTVLSNRPDITLTLKSSKTTFLVDIAVPNTHNLKQKHTEKIQKYIPLADEIKQMWHQESVKIIPIIISS

SEQ ID NO: 1198 - protein, 1363 aa, Pyrrhopyge hadassa
MRLRNRQIPQAGTREGESRPGPSGSGCPTYSGGGNVSRLTIQSRTAVVDDSRPHITSSLSHPSSPISTPMSSTRSLFQTPNSSLDLQSVSSSSINTPSSCCVVQEAHAVTRTPTTDVINPTRVLQNSTDNRVNQNSHSLSPHNNTPTRSVLREIFPTTTLAGKTRQRMKWTELINKELLRCYYIVTNIETNLTAWRSMLHRKFSECSPELNYLTEQRLADQIRVIHKNNRIPALEREAIKKSITTLLSSSISTNQINLLNNSIQPTTSNNTLTSHESNISPSSETFNTQLTQTITQKHDTMTEINHLDDDNTELAEHQNLEAANKDSIDYKKIENTFNEMLIKYSGTDPLLRPTIPKLQITRNIIKSVNTINKIIDEHLRSKTTITLEEIHEVIYCAARTAILIHTKYVDKLDSNMDNPNRHTNKVKKPQWERRLENKITTLRKEIGQITQLLKGNLTQKKQRRLNPNKRSNDEISEQLDIYKQKLQALSKRLRRYKISNQRKSHNMLFNTNQKLFYQNLNEEHIQITSPPDKDDVQNYWKNLWSKPAQHNTHTSWTKIEEQETIDIDPMPTILINKDDVSEAIRKTANWKAPGPDKIQNYWLKYFSATHQYITNTFNRILSNPQETPSFLTEGITYLKPKDKDTSNPANYRPITCLPTIYKLLTSIISRKLDIHITKNHIISEEQKGCRKGTKGCKEQLIIDTEIHNQVKQTHRNLFYSYIDYQKAFDSIPHSWLIHILKIYKVDNKVIQFLQHTIKNWTTKLNLRTNKTSFSTQAIKISRGIFQGDSLSPLWFCLALNPLSKILNKTGFGYVVDRESNTKITHLLYMDDIKLYAPNRSELDHLLRLTESFSTDIKMSFGTNKCKINSIVKGKYKQTDPFDLSRQAEKILSMESKETYKYLGYQQSTAISHTDIKNTLKTKYRQRLNKIFSTQLSARNKTKAVNTYAIPILTYSFGVIKWSDTELEALNTLTRTSANKYNIHHIHSAVQRFTLSRKLGGRGFIDIKNLHYTQIDNLRTYFLMKANENTLIKAITNLPQAGTPLLLNNSQFNPKLKILNDEEKIISWKQKSLHGKYPHQLEQEHVDRKTSCSWLTKGNIYAETEGFLIAIQDQIIKTRNYSKYILKEIIETDKCRLCNQTTETIDHITGGCSMLARKEYTHRHDNVAKHIHQQLALKHKLLDSYTPYYQYKPKNVMENNSVKLYWNRDIITDRTILSNRPDITLILKSSKTTYLIDIAVPNTNNIKQKHTEKVQKYIPLADEIKQMWHQEIVKIIPVIISSTGVIPKTFKNTLQLLGLHENTYIPLQKSIIIDTCSIVRRFLNATTLSLQQDVQHTNYNATIQNSIHIVTNNTLINTHNTTHT

SEQ ID NO: 1199 - protein, 1367 aa, Pyrrhopyge telassa
MRLRNRQIPQAGTREGESRPGPSGSGCPTYSGGGNVSRMTTQPRTAVVDDSRSHITSSLTHPSSPISTPISSTSSLCQTPNSSLDLYEQSVSSSSTNTSSSCCVVQEAHAVIRAPTTDVINPTRVLQNSTDNRVNQNSHSLSPHNNTPTRSVLREIFPTTTLAGKTRQRMKWTELINKELLRCYYIVTNIETNLTAWRSMLHRKFSESFPELNYLTEQRLADQIRVIHKNNRIPALERDAIKKSITTLLSTAISTNQINLPNNSIQPTTINNTLTLTSHESNVSQSSETLNTQLTQTIIQKHDTTTEINHLDDDNTEHAERQNLEATNKDSIDYKKIEYTFNEMLIKYSGTDPSLRPTIPKLQITRNIIKSVNTINKIIDEHLRTKTTITLEEIHEVIYCAARTVILIHTKYVDKLDSNMDNPNRHTNKVKKPQWERRLENKITTLRKEIGQTTQLLKGNLTQKKQRKLNPNKRSNDEISEQLDIYKQKLQALSKRLRRYKISNQRKSHNMLFNTNQKLFYQNLNEEHIQITSPPDKDDVQNYWKNLWSKPAQHNTHTSWTKIEEQETIDIDPMPNILINKDDVSEAIRKTANWKAPGPDKIQNYWIKYFSATHQYITNTFNHILSNPQETPSFLTEGITYLKPKDKDTSNPANYRPITCLPTIYKLLTSIISRKLDIHITKNHIISEEQKGCRKGTKGCKEQLIIDTEIHNQVKQTHRNLFYSYIDYQKAFDSIPHSWLIHILKIYKVDNKVIQFLQHTIKNWTTKLNLRSNKTSFSTQAIKISRGIFQGDSLSPLWFCLALNPLSKILNKTGFGYVVDRESNIKITHLLYMDDIKLYAPNRSELDHLLRLTESFSTDIKMSFGTNKCKINSIVKGKYKQTDPFDLSRQAEKILSMEPKETYKYLGYQQSTAISHTDIKNTLKTKYRQRLNKIFSTQLSARNKTKAVNTYAIPILTYSFGVIKWSDTELEALNTLTRTSANKYNIHHIHSAVQRFTLSRKLGGRGFIDIKNLHYTQIDNLRTYFLMKANENTLIKAITNLPQAGTPLQLNNSQFNPKLKTLKDDEKIISWKQKSLHGKYPHQLEQEHVDRKTSCSWLTKGNIYAETEGFLIAIQDQIIKTRNYSKYILKEIIETDKCRLCNQTTETIDHITGGCSMLARKEYTHRHDNVAKHIHQQLALKHKLLDSYTPYYQYKPKNVMENNSVKLYWNRDIITDRTILSNRPDITLILKSSKTTYLIDIAVPNTNNIKQKHTEKVQKYIPLADEIKQMWHQEIVKIIPVIISSTGVIPKTFKNTLQLLGLHENTYIPLQKSIIIDTCSIVRRFLNATTLSLQQDVQHTNYNATIQNSIHIVTNNTLINTHNTTHT

SEQ ID NO: 1200 - protein, 1321 aa, Celaenorrhinus opalinus
MRLRNKKTLPQAGTRNGESRPEHESSGCPTYSGGGTVSLGPAQSKTVADQKADKQNSPNSSHYRHQSASSTPSHYSEYIPSSSRSTTLSPMSCDVVQEANAISPEPITDVTNSARILEEIPIFNRVNTLSTQHSRSNNDTPDRSVLREMLPATTLAGKSRIRMKWTDEINRELLRCYYMVTNCEVNLTAFRQPLHEKFTETFPELIHLTEQRLADQIRVIHKNNRIPASEREKIKLSIKQTNSTTDTQDTLHNITNNTHNLHISEQTPNILTTSYVNPSTGTTQSTDEIPHHSAAIEPQEISYTNNINEETVQGPIMYDKIKNTFQEMLLKYSGTDPTLRPAIPRKQITQKFIKTVNTVNDIVKNHLQDKEVATIEEIQEIIYCAAITVTQINTQPKENKCRNNNNNNNDKYSERNPKIPQWQFRLVKKITELRKIIGKLTQYVNGNLCLKKQRKLNPNFKCRDEIIDELDNNKQKLQAYSKRLQRYKISNKRKLDNTLFNTNQKVFYRNLNTQHIEITKLPDAVEVQRYWENIWSKPRPYNTQFSRAATEQLDVQNINPMPNIILNTIDITQAIKSTLNWKAPGPDKIQNYWLKYLTSTHQYISVAFNHILKNPQDIPQFLTQGITYLKPKDVDTSNPSKYRPITCLPTLYKLLTSIISNKLNLHLTQNKIIHEEQKGCCRGSMGCKEQLIIDTEIHNQVKQKHKNLHYSYIDYQKAFDSVPHTWLLQILKIYKIDNMLIQFLEHAMTKWNTKLHIRSNNNTLITPSIKVARGIFQGDSLSPLWFCLALNPLSKILNKTGYGYCIDKETDTKITHLLYMDDIKLYAANRSQIDHLIKLTEEYSKDIGMIFGIDKCKINSIIKGQHQQTHPYKLESQPGIIDSMDPKETYKYLGYQQSTGINHTEIKTTLKNSYRQRLKKILNTKLSARNTTKAINTFAVPILTYSFGIVKWTDTELEALNTVTRTACNKHNYHHIHSAVQRFTLKRKLGGRGFIDIKNLHHTQVDNLRSYFYTKATVSSLHKAIISLPQSGTSLQLNNKSFNPKTKITTEEQKLETWKKKALHGKFPHQLDQEHIDRNASCTWLDKGNIFSETEGFLIAIQDQIINTRNYSKHILKQTIETDKCRLCHQATETIEHITGGCSALALKEYTHRHDNVAKHIHQQLALKYKLLDTYTPYFKYKPKNVLENTTAKLYWNRDIITDRTILSNRPDLTLTLKTTRTTYLIDVAVPNTHNLKQKHTEKIQKYIPLADEIKQMWHQDTVKIIPLIISATGVIPKTLKPALKHLDLPYQNYIPIQKSIVLNTCSIVRRFLNPTSLLQI

SEQ ID NO: 1201 - protein, 1351 aa, Baeotis zonata
MRLRNRELPQAGTQTGESRSGPPGSGCPTYSGGGTVSLRSAQSRTVAASDVNSSPLHYTNSTSPTSSTHSLFQSPNSSPHSYQFEQSSSSTPTSIMSNDVAQAASANYLAPNIDIANSTRILPNNNALTCVDHNTQSLHSDNNTPARSVVQDMLPATTLAGKSRQRMKWTKAINIELLRCYYTVTMCETDMTAWRSLLHRTFIEQFPELSHISEQRLSDQIRVIHRNNRLTETERHSIKETLSITTINNSTSHINTTEELNTHTHLDNNQSIIAHSSQVIPLTQPTQIYQENTDTLTTIRQLGTIEHIQTQTNETTNSPADKKQIEDIFTATLMKYSGTDPTCRPNIPKLQITRNVIKSVNIINEIVETHLQQKDTVALEDIHTVIYCAAITVATLNGKKITDQTLHISNNKTHNPKKPQWERRIENKITALRKEIGQLTQYLKGNLTLKKQQKINPNHKTRQEIIEQLDTNKQKLQAQAKRLNRYKKSNQRKSDNILFNNNQKLFYQKLNTETTAVIHPPDIIELQRFWENIWSKPIQHNTHSSWTEIERQEMENIEPMPEMKIDTDDVTQAIKRTLNWKAPGPDKIQNYWIKYLTSTHTYLATTLNDLIHNPQNVPTFLTQGVTYLKPKDSDTINPAKYRPITCLPTIYKLLTSIITHKINLHITTNNIIPEEQKGCSKGSKGCKEQLIIDAEIHNHVRQKHRNLYYSYIDYQKAFDSVPHSWLLHILKIYKIDHGLIKFLGHTMTQWTTKLNLKTNTTTLSTPPIKIARGIFQGDSLSPLWFCLALNPLSRILNKSTCGYTIDTENKIKLTHLLYMDDIKLYACNKQELDHLLRLTEKFSTDIKMSFGTNKCKINSIIKGQHNNTDSFELELQEGTINSMGHKETYKYLGYQQSTSINHTEIKNLLKSKYKERLKKILNTQLSARNIVKAVNTYAVPILTYSFGIIKWSDTELNALNTTTRTTCNKHNIHHIHSATQRFTLKRKLGGRGFIDIKNLHYTQIDNLRSYFIRKANDSTVHKAISNLPYSGTPLKLNNTQFDPKAKIIKEQLKVENWKSKALHGKYPHQLEQDHVDRNASTTWLTKGNIFSETEGFIIAIQDQIIKTRNYSKYILKETIETDKCRLCHRYTESIDHITGGCNSLASKEYTHRHDNVAKYIHQQLALKHNLTDTHIPYYKYKPENVIENNLVKLYWDRDIITDRTILSNRPDITLTVKPTKTTYLIDIAIPNTNNLQQKHTEKIQKYIPLADEIKQMWHQETIKIVPIIISSTGIIPKTLHTSLKMLDLHPNTYIPLQKSVILDTCSIVRRFLNPTSLTFTHTYNTQELSHDIPTDTHLTQDTQNQHITLTH

SEQ ID NO: 1202 - protein, 1369 aa, Apodemia ares
MRLRNRNIPQAGTLEGESRPEPLGSGSPSYSGGGNVSFITAQPRTVADNHSFSHSNSHQSSSASSQHASSQSLDSTESSYRFLQLSPPRSNIISPLSCDVAQEASAHSPVPTTDITNSTRTIPITSSNCVDINTHSPTFDINTPVRSALQDMMPATTLAGKSRQRMKWTQNINKELLRCYYIVTQCERDLTAYRPLLHAKFVEYFPELNHLSEQRLADQIRVIHKNNRISTPERERIKSSVSQIIDQTHNIHHPNRTDIQTASNNPTSQHTSTDLFTNTGSLHHLTSTGTQQSIIVTPTCQTAVNSEHTTQTPQTQELTEIRIDPMYYEKIKNTFTESLIKYTGTDPSLRPPLPKLQITRHTIKTVNTVNEIVNNHLQTKDMVYSLEELHEIIYSAALTVTIIHSRKNTKSENHTHTKNNVMNKPKVAQWEKRIANKIVGLRKEIGQLTQHLNGNLSKKKQRQLSLSSKSRDEIVEHLDMNKQKLLAYAKRLRRYKKSNERKSHNNLFNNNQKLFYQKLNTEHIKITENPDIETIQTYWKNIWSKPIQHETHTPWVEIEDQETRNIDPMDQIIIDEEDVTRSIKKTLNWKAPGPDKIQNYWLKYLTTSHKYIASTLNDLIRNPQKIPKFFTQGVTYLKPKDHETTNPSKYRPITCLPTIYKLLTSIITHKLNIHISQHKIIPEEQKGCSKNSRGCKELLVIDSEIHSQVKHKHRNLYYSYIDYQKAFDSVPHSWLLHVLKMYKVDNNIIKFLQHAMKKWTTTLNLKTCDKILSTRPIKIARGIFQGDSLSPLWFCLALNPLSRILNRTDYGYKIDRDNNIKITHLLYMDDIKLYAASRNQLDQLLRLTEQFSNDIKMTLGTDKCKVNSIIKGQHNQTHPYDLELNRGLIESMEPTDTYKYLGYQQSTAIPHSDIKNSLRSKYKQRLNKILNTQLSARNKTRAINTYAIPTLTYSFGIIKWSDTELNALNTATRVACYKHNTHHIHSSVERFTLKRKLGGRGFIDISSLHHSQIENLRQYFYTKSHESSLHKAIVNISNSGLPLQLNNRLFDPKHKIVSEIQKLENWKKKALHGRYPHQLDQDHIDKNASSSWLTKGNLFGETEGFLVAIQDQIIKTRNYTKFILKQTIETDKCRLCHQTTETIDHITGGCSVLANKEYTHRHDNVAKHIHQQLALKFKLLDSYTPYYKYKPKNVLENNIAKLYWNRDIITDRTVLSNRPDITCTLKSTKTTYLIDISIPNTHNLKQKHAEKIQKYISLADEIKQMWHQETVTIIPVIISSTGVIPKTLHTSLKILELHKNTYVTLQKSTILDTCAIVRRFLNSTSLALQNVQDTNTNTIHLTITHTPIRDTQHTSTPLQAPITSHTNTS

SEQ ID NO: 1203 - protein, 1247 aa, Dalla cyprius
MSCDVAQEALANSPEPITDITHLTRAAQNNTSNRVDHNPHSLSPNINTPARSVLQDMLPATTLAGKSRQRMKWTDQINRELLRCYYLVTHNETNLTTWRPLLHQRFIESIPELSHISEQRLADQIRVIHRNNRIPAPEREGIKHSVSLLLSNPNNSNQHIDTSNTELQSNTAPATYNNQSNIESLSHQLYSHHTLTITQQINTTTTQVYENIEHIQTQDSETIDRSQDPNNIQNTFTEMLIKYTGTDPTLRPTIPKLQISRKIIKTVYTINEIIDKHILNKETITLEEIHDIIYCAAQTITIIHNKHAAVRNNTNNTNSGITVNQKKPKWERRIENQITKLRKEIGQLTQYINGNLTQKNQKKVNPNNRNIDEIIEQLDKNKQKVQAYSKRLRRYKVSNDRKSHNKLFDTNQKLFYQKLNTDHIQITQPPNIEEVQNYWKSLWSKPVHHNAHMSWTELEEQETANIDTMPEIKIDKCDVTQAIKKTLNWKAPGPDKIQNYWIKYLTATHEPIANAFNHLIRNPQETPSFLTEGITYLKPKDNDTTNPAKYRPITCLPTIYKLLTSIISHKLNTHITLNQIIPEEQKGCSKGSRGCKEQLVMDTEIHNQVKQKHRNLFFSYIDYQKAFDSVPHSWLIHILKLYKVDNRLIQFLQQAMKTWTTKLHIRTNDSTFCTQPIKILRGIFQGDSLSPLWFCLALNPLSKILNKTGYGYVVDRDNNIKLTHLLYMDDIKLYAANREQLDHLLKLTEKFSADIKMSFGTNKCKINSIIKGQHKETGAFDLNIQGGKIDSMEAMETYKYLGYQQSSSIKHTDIKTTLKAKYKQRLNKILKTQLSARNKIKAVNTYAVPILTYSFGVIKWSDTELEALNTATRTTFNKHNIHHIHSAVQRFTLKRKLGGRGVIDIKNLHYTQIDNLRTYFLTKANVSALHKAIVNISQSGTPLQLNNNLFDPKRKIVKDDTKIEHWKKKALHGKYPYQMEQDHVDRNASCTWLTKGNIFGETEGFLIAIQDKIIKTRNYSKYILKEAIETDKCRLCHQTTETIEHITGGCKILANKEYTHRHDNVAKHVHQQLALKYKLLKSYTPYYQYKPKNVMENSTAKLYWDRDIITDRTILSNRPDITLTLKSSKTTYLIDISVPNTHNLQQKHTEKIQKYMTLADEIKQMWHQESVRIVPIIISSTGVVPKTLKSALKLLDLYENTYIPMQKSIIIDTCSIVRRFLNPTTLSLQDEQHTNPHVTIQNNNSIS

SEQ ID NO: 1204 - protein, 1380 aa, Toxidia parvulus
MRLRSRNTLPQAGTSNGESRPEQPTSGSPTYSGGGTVSPEPAQSNAVADQPTNTQSHNTQTYPSSPSSSHECYYLPTSTTTSPTSSDVVQEALADYPGPITDIRNPTCLSVINSSFSHVDTYTQNHTTNNNTPARSVLQDMLPATTLAGKSRQRMKWTYQVNRELLRCYYIVTNCEENLTSYRPLLHKKFIETLPELSHISEQRLADQIRVIHRNNRITASERKTIKQSVAQTFTNPDSLHNPSNIDTFDIQTCTNNNQSLVNHIQILHEPVQTDNTQNTPPHALLSSTTTDIRNENLPQSPLIGSQEIFEHTQMQDTAITSQELVNYKKIEHTFNEMLIKYTGTDPTLRPPIPKTQTTRKFIKTVNTINEIIKTHLQNQEIVTIEKVQEVIYCAATTATIVMSEYKMKKTASKVNSNNEISARRQNTPQWQRRLENNITMLRKIIGKLTQYLKGNLSQKKQHKLNPNNKSRDEIVIELDTNKQKLQAYSKRLQRYKISNKRKSDNILFNTNQKLFYRNLNTEQLEITKPPNIAEVQHYWENLWSKPVCHNPQSSWAVVEEQEVQNIEPMPDVNINKFDVTQALKTTINWKAPGPDKIQNYWLKYLTSTHEYIADTFNHLLLNPQDIPPFLTQGITHLKPKDDDTTNPEKYRPITCLPTIYKLLTSIISHKLNSHLTLNKIIQEEQKGCCKGSMGCKEQLIIDTEIHNQVKQKHKNLYYSYIDYQKAFDSVPHSWLLHVLKIYKANNTLIQFLQYTMSKWNTKLHIRTNNKTLNTPTIKISRGIFQGDSLSPLWFCLALNPLSRILNSTGFGYDIEKENNVKLTHLLYMDDIKLYATNRQQIEHLIKLTEEFSTDIKMKFGTDKCKINSIIKGQHKETEPYTLELQTGTIDSMDPKETYKYLGYQQSTSINHKEIKTTLETKYKQRLKRILSTQLSARNKTKAVNTYAIPILTYSFGIVKWSDTELEALNTTTRTLCNKHNHHHIHSAVQRFTLKRQLGGRGFIDIKNLHYKQIDNLRSYFYIRANECPLHKAIINLSHSGTSLQLNNRQFDPKHKIIKDEQKIEHWKKKTLHGRYPHQLDQEHIDRNASCTWLSTGNIFGETEGFLIAIQDQVIKTRNYSRYILKETIETDKCRLCHQTTETIEHITGGCSILANKEYTHRHDNVAKHIHQQLALKYKLVETYTPYYKYKPKKVIESSTAKLYWDRDIVTDRTILSNRPDITLTLKSTKTTYLIDIAVPNTHNLKQKHNEKIQKYIPLADEIKQMWHQENVKIVPVIISSTGVVPKTLKTALKLLELPENTYVPLQKSIVIDTCSIVRRFLNPTSLSVPSNHNTDHTNERPQSISAHLTTHNGQTNNTRSGSLKTLLSDSNAPDIHSAH

SEQ ID NO: 1205 - protein, 1376 aa, Urbanus velinus
MRLRNRQIPQAGTREGESRPGPSGSGCPTYSGGGNVSHKTAQSRTVVVEKSPSHITTQTSSPTSSTESLFQSPSSSPHSFQFHHSSSRSTTITPLSCDVAQEAHANCPVPTTDITNPTRVLENNIHNRVNQNTYSLSSITNTPARSVLQDMLPATTLAGKSRQRMKWTDQINRELLRCYYVVTKNETNLTAWRPQLHQQFATSFPELSHLSEQRLADQIRVIHRNNRITVSEREHIKEAVSLILNTSNRCNVETITNILETTPHTTINIEATTPSPSQTLNSHYTITPSHSQLQHSHTHSQEINTTTRTRHIPENIEHNPRQDPETTNGLLDPIDYNKIKNTFSEMQIKYTGTDPTLRPTIPKLQITRNVIKTISTMNEIVGIHLSTRNSVTLEEIHEVIYCAAQATVNLHTKHIENNNNRPNAIHIQKKPQWETRIEKKITTLRKEIGQLTQYLNGNLTQKKQKKLNPNNKNRNEIEETLDNNKQKLQAYSKRLRRYKISNQRKSHNKLFTNNQKLFYQKLDTEQIKITQNPTKNDIYNYWNNIWSKPVLHNTHPSWNEIENQEIDKIEPMSQIFIDKDDVSHAIKNTLNWKAPGPEKIQNYWIKYLPATHKYIANAFNHLINNPQDTPSFLTHGITYLKPKNNDTTNPANYRPITCLPTIYKLLTSIISYKLNTHITQNHIIPEEQKGCSKGSKGCKEQLIIDTEIHNQVKHKHRNLYYAYIDYQKAFDSIPHSWLIQILKTYKVDNRLIEFLQDTMKNWTTKLSLRTNNTTITTHPIKILRGIFQGDSLSPLWFCLAINPLSRILNKTDYGYTIDKESNIRVTHLLYMDDIKLYAASREQIDHLLKLTENFSTDIKMTFGTNKCKINSIIKGKQKETHPFELQTQEGTIDSMEPKDTYKYLGYQQSTSLNHTHIKHTLKTKYKQRLQKILNTQLSARNKVKAVNTYAIPILTYSFGIIKWSDTELEALNTITRTASYKHNIHHIHSAIQRFTLKRKLGGRGFLDIKNLHYTQVDNLRTYFLTKAQESNLHKAIVHLSQSGTPLQLHNSEFDPKLKILKDEQKIENWKKKALHGKYPHQLEQDHIDYTASCSWLTKGNIFGETEGFLVAIQDQIIKTRNYSKYILKETINTDKCRLCHQTTETIDHITGGCSVLANKEYTHRHDNVAKHIHQQLALKHNLLQSYTPYYQYKPKNVLENKKVKLYWDRDIITDRTILSNRPDITLTFKSSKTTFLIDIAVPNTHNLKQKHTEKVQKYIPLADEIKQMWHQESVRIIPIIISSTGVIPKTLKTALKLLDLHENTYIPMQKSIVLDTCSIVRRFLNPTSLTLQPHQDTQTNTVTQNSSTNTRNTQTHTAPNIHTNIHTNTHESGYLA

SEQ ID NO: 1206 - protein, 1336 aa, Eburuncus unifasciata
MTNGALVNTKYAMRLRNRTIPQAGTHMGESRPGPSNPGSPTYSGEGIVSHMTAQSKTVVVNKPSSHITSNSTSPTSSTHSLFQSPNSSSQSYDSLSRSATNTPLSCDASQEGNAYSLVPITDNTNACVLQNITDNRANQNNHSSPPNIHTPARSVLQDMLPATTLAGKCRQRMKWTDQINRELLRCYYTVTQNETDLTAWRPLLRQTFSESFPELNHLSEQRLADQIRVIHKNNRIPPPDREQIKQSVQILQVATNSTQDTVNSNNTMHKTILNNNSNRTNTESRNQSHTSQLMFNNLQDTNTANTIQSFSDMEHTETQYHKAIKRHSSPIDREKVQNTFIEMQILYLGTDPIMRPIIPKPQINHNIIKTINTINEIIEEQLKEKESVTLQEIHDIIYSAAQTITKIHTNYLDKSEQLQNHTKSYQHTNNKSQWEKRLENKICILRKEIGQLTQYLKGNLTDKKQKKLNPNNKSKDYLQEQLDSNVQKLQAYSKRLRRYKLSNQRKVDNKLFRNNQKQFYQKLNNEQIQVTQPPDKDDIQNYWKNLWSKPVEHNTHTSWNEIKEQERINIEPMHEIIIDKSDVSEAIRKTLNWKAPGPDKIHNYWIKYLSSTHKHIATALNHILQNPQETPAFLTHGVTYLKPKDNDTANPANYRPITCLPTIYKLLTSIITHKLNIHITQNKIIPEEQKGCRKGSKGCKEQLIIDTEIHTHVKQKHRNLFYAYIDYQKAFDSIPHSWLIHILKIYKINHTLIHFLEHTMKNWSTKLNLHTNKTSICTQPIRIARGIFQGDSLSPLWFCLAINPLSKILAKTGYGYVVDREKDIKITHLLYMDDIKLYATNRPQLEHLLRLTENFSRDIKMTFGTNKCKINSIIRGQYNKTESFKLNIQGGIIDNMEPKETYKYLGYLQSTAISHSEIKNTLKVKYKYRLHKVLHTQLSAINKIKAINTYAIPVLTYSFGVIKWSDTELEALNTTTRTMCSKYNIHHIHSAVQRFTLKRKLGGRGVTDIKNLHYSQIDDLRTYFLTKANENDLFNAIVTLSQAGTPLQLNNTQFEPKLKIQTDAQKLDTWKMKALHGKFPHQLEQDHIDRNASYSWLTKGNIFGETEGFMVAIQDRIIKTRNYSKYILKETIETDNCRLCHKNAETIDHVTGGCSILANKEYTHRHDNVAKHIHQQLAIKYNLLESYTPYYEYKPKNVLENSSAKLYWDRDIITDRTILSNRPDITLILKSTKTTFLIDISVPNTHNLKQKHCDKIQKYIRLADEVKEMWHQEKVRIIPIIISSTGVIPKTLKSALKLLDLHENTYIPIQKSIIIDTCSIVRRFLNPTSLTLISAD

SEQ ID NO: 1207 - protein, 1337 aa, Spialia mafa
MEKSIKKVYSLRPLPGGRRGTSGVGAGCDSMRTVDGLELNRRAPAGNVPEVTTAEVVSSPSSPISSNHSLFQSPSSSPHSYENPSTSRSTSSSPMSLNVARRPLANSVVPIDGTNKSTQGSVRDTNVMCVDNNHIPSILHTKNVLQDMLPATTLAGKNRQRMKWTDEINRELLRCYYQVTKCETELTTYRPLLHNAFTEIFPELQHITQQRLSDQIRVIHKNNRISLSERLRIKQEVALLVESGNVDTHNNTTSNTNNTQIQDNRIIDNRTTLDNNLFTTNICTQTENPPVQIEITEDTDILLLKQNLPTPDTLQNHLNTDVSYEKIEEIFHENLSKFKNIDPTLRKTIPKLQISRAAIKTVNSMNSILQTYLQNKETLPIEELHLIIYCAAITITSLHVKTNETKNKNNINKNKSKIPAWKIRIIKLIETLRKNIARMTQYIKGNLSIKKQQKINPNNLDTDQLIQELDQNKQKLAAYTKRLKRYDESNRRKSENNLFNNNQKIFYRQLNSEHITVTQAPDEKHLQQFWENIWSTSENHNSDAEFIELEKKDTEDIEIMPPVVINVEDLKCSIKKIHNWKAPGPDKIQNYWLKYLTSTHTHLADAYNTLIQNPHNMPTFMTQGITYLKPKDSDTTNPAKYRPITCLPTMYKLLTSIITHKLNTHISLNNIIPEEQKGCCKGSMGCKEQLVIDSEIHNQAKQKHRNLFYSYIDYQKAFDSVPHSWLIHILKIYKIDNKLINFLEYIITSWTTTLNIHTENNILKSNIIKICRGIFQGDSLSPLWFCLALNPLSRILNRTNYGYTLDKQNNIKITHLLYMDDIKLYATNRKQLNHLLTLTEQFSKDIKMTFGLDKCKINCIIKGKYKATESHILTVQEGTINNMLATETYKYLGYEQSTTINHTEIKTKLQTIYKSRLNKVLKTKLSARNKTKAINTYAIPILTYSFGIINWSETELNALNTLTRTTCNKYNIHHSHSAVERFTIKRKNGGRGFIDIKNLHYSQIHNLRLYFQNKANTSSLHKAIVNLNTTGTPLKLNDIEYNPDQKIQTEEEKIENWKKKTLHGKYPQQLQQPHIDKDASTTWLTKGNIFGETEGFLVAIQDQVIKTRNYSKYIIKERIETDKCRLCHQTTESIDHITGGCSALANKEYTYRHDNVAKHIHQQLAIKHKLLSTYTPYYQYKPKNVLDNIDAKLYWNRDIITDRTILSNRPDITLTLKSTKTTYLIDISVPNTNNLKQKFTEKIQKYLPLADEIKQMWHQDSVRVIPIIISSTGIVPKTLITALQSLQLSKNTYIPLQKSVVLDTCSIVRRFMNPSTLPFHSSSEATTFVDQNPNTTH

SEQ ID NO: 1208 - protein, 1408 aa, Hypophylla argenissa
MRLRNRIIPQAGTCEGESRPEPSSSGCPTYSGGGNVSLQPAQSGTVAVNYNNNNTSPHNNTHLTSPISSTQSLFSSPNTSPNSYRFHNSSSSSNTTSSLSSDVVQEALASSPVPTLDNTNPARIILNNRNNRVDHNTHPLTLNNNTTARSALQDLLPVTTLAGKSRQRMKWTDNINKELLRCYYIVTHCETDLTAYRSLLHTKFMETFPELRHLSEQRLADQIRVIHKNNRIPATEREHIKQLVSQLTTNTNESNHQLDNSNLELLCTRNAPINNTQQTFTHTLFRHTEQNNLPNISDIHTTQTNTMTQTPQTLTNDEHIQTLDSQILNDTNVDLPNYEKIEDAFIETLIKYKGTDPTLRPSIPKLRTSRHTIKTVNTVNDIIYKHLNIKDSFSLEEIHEIIYCAAITVTTLHAKPITKPNNNSISSSRNTINKQTKSYWEIRLENKIINLRKIIGQLTQYVKGNLTQNKQHKVNPDNRSMDEVVNQLDNSKQKLQAYCKRLRRYKISNQRKSDNNLFNSNQKLFYQKLTAENIIVTEPPDIAAIQTYWESLWSKPVQHNVLSTWTEIEEQEMNSITPMTDIVIDEDDVTQSLRRTLNWKAPGLDKIQNYWLKYFTATHKHIAITLNDLIGNPHKMPVFLTQGVTYLKPKDNDTANPMKYRPITCLPTIYKLLTSILAHKLNQHITRYKIIAEEQKGCCKGSRGSKEQLVIDNEIHNQVKHRHRNLYYSYIDYQKAFDSVPHSWLLHVLKIYKVDKNTINFLQHAMSKWTTKLNLKTKDTTLSSTPIKIARGIFQGDSLSPLWFCLALNPLSRILNGTDYGYKIDRLTDTKLTHLLYMDDIKIFAANRQQLDQLLRLTEKFSNDIKMTFGIDKCKVNCIVNGQHKETDPYNLEEHRGLIDNMEPRETYKYLGYYQSTSINQSDVKKTLKSKYKQRLHKILNTQLSARNKVKAINTYAIPILTYSFGIVKWTDTELHALNTATRMASYKHNIHHIHSSVQRFTLKRKLGGRGFIDIRDLHYTQIDNLRNYFLTKANESSVHNAIVNLPHPGTPLQLNNSLFIPKLKITKEAQQLENWKKKALHGKYPHQIEQDHIDKNASHTWLMKGNIFSETEGFLIAIQDQIIKTRNYAKYILKETINTDKCRLCNQTTETIDHITGGCSVLAKKEYTHRHDNVAKYIHQQLALKYNLLDAYTPYYKYKPKDVLENSATKLYWNRDIITDRTILSNRPDITLTLKSLKTTYLIDISIPNTQNLRQKHTEKVQKYIPLADEIKQMWHQETVKVIPIILSSTAVIPKTLKTSLKLLELHENTYIPLQKSVVLDTCGIVRRFLNSTTLSLTQNTQECIINTITQTPSIHFSTLTQSAANNHTHHTTHTLTSHTPLDIYNDTQNAIIPYITQTNTTQNISH

SEQ ID NO: 1209 - protein, 1311 aa, Euriphellus phraxanor
MRLRNRQIPQAGTREGESRPGPSGSGCPSYSGGGNVSHTVTQPRAVVARKSPTHTTSHPSSPMSSPSSSSSTHSLYQSPSSSSSRSCSITPLSCDVSQEAHADSLVPTTDITNPTRVPQNKLFNRVNHNTHSLSITSTPARSVLQDMLPATTLAGKSRQRMKWTDQINRELLRCYYKVTKNESDLTAWRPLLHRTFSEIFPELSHLPEQRLADQIRVIHKHNRIPVHEREQMKQSVSLLISTSSLNDHTVTSNLEHETITNTILSTDNHHSTTDLPSQILNTQYTLTISQQPNTAKDIHLPLGNTEHIQTQDTIITSRPLDSINYEKVENIFKEMLIKFTGSDPTLRPIIPKLQITRNIIKSVNTINDIISQYLRAKNTITIEKIHEVIYCAAQTISKIHSKYFEQIENNNNNNKNKVYKQKKPQWERRIENKILALRKEIGQLTQYLKGNLTQKKQKKINPNNKNKDEIIEKLDNNRQKLQAYSKRLRRYKKSNERKSHNKLFNSNQKLFYQKLSEGQIQITQPPDKNKIKNYWENIWSKPVQHNTHTSWTQIEQQEVESIDTMPEITIDKSDVSEAIKKTINWKAPGPDKIQNYWIKHFTATHEYIAQTLNRLLCNPQETPPFLTQGITYLKPKDNDTTNPGKYRPITCLPTMYKLLTSIISQKLNAHITRNQIIPEEQKGCSKGSRGCKEQLVIDTEIHTQVKQKHRNLYYSYIDYQKAFDSVPHSWLIQILKIYKVDNKLIKFLQHTMLNWTTKLSLHTNNTSLTTPNIKILRGIFQGDSLSPIWFCLALNPLSRILNKTDFGYVVDRENNIKITHLLYMDDIKLYAANRQQIEHLLTLTENFSTDIKMSFGIDKCKLNSILKGQYKETHPFELQTQEGTIDSMKPKETYKYLGYLQSTSVNHTDIKNTLKIKYKQRLHKILNTQLSARNKTKAVNTYAIPILTYSFGVIKWSDTELEALNTATRAASYKHNIHHIHSAVQRFTLNRRLGGRGFIDIKNLHYTQIDNLRTYFLTKANESAIHKAIVHLSQSGTPLQLNNPQFDPKHKILKDEQKLENWKKKALHGKYPHQLQQDHIDYNASCSWLTKGNIFGETEGFLVAIQDQIIKTRNYSKYILKEAIDSDKCRLCHQTPETVDHITGGCSVLANKEYTHRHDNVAKHIHQQLALKYKLIESYTPYYQYKPKNVLENNIAKLYWDRDIITDRTILSNRPDITLTLKPSNTTFLIDISVPNTHNLKQKHTEKIQKYIPLADEIKQMWHQETVRIVPIIISSTGVIPKTLKTALKLLDLHENTYIPIQKSIVIDTCS

SEQ ID NO: 1210 - protein, 1236 aa, Telegonus cellus
MLPATTLAGKSRQRMKWTDQINRELLRCYYLVTQNETNLTAWRPQLHQQFAASFPELSHLSEQRLADQIRVIHRNNRITVSEREHIKESVSLQLTTSNYRLPTVTNIIETPLNTTLITNNFELTTPSPSQTLDSQLTLTPNHSHSQHSHTHSQRINTTARTYQLLENTEYHQTQDQETTNEPLDSIDYNKIKITFSEMLIKYTGTDPTLRPTIPKLQITRNAIKTINTMNEIVDVHMSTKNSVTLEEIHEVIYCAAQTTVTLHAKHAKKSINHNNNNSPNALIIQKKPQWETRIEKKITTLRKEIGQLTQYLNGNLTQKKQRKLNPNNGSRNEIEETLDNNKQKLQAYSKRLRRYKISNQRKWHNKLFTTNQKLFYQKLDTEQIKITQNPSKDDIHSYWKNIWSKPVLHNTHPSWNEIEDQEIENIEPMSEIFIDKDDVSQAIKKTLNWKAPGPDKIQNYWIKYLPATHGYIANTFNHLMKNPQDTPSFLTHGITYLKPKDNETINPAKYRPITCLPTIYKLLTSIISYKLNIHITQNHIIPEEQKGCSKGSRGCKEQLIIDTEIHNQVKNKHRDLYYAYIDYQKAFDSIPHSWLIRILKIYKVDIRLIEFLQDTMKKWTTKLSLRTNNTTISTHPIKILRGIFQGDSLSPLWFCLAINPLSRILNKTGYGYTIDKESNIRVTHLLYMDDIKLYASSREQMDHLLKLTENFSTDIKMTFGTNKCKINSIIKGKQKETHPFELEMQGRTIDSMEPKETYKYLGYQQSTSINHTHIKYTLKTKYKGRLHKILNTQLSARNKVKAVNTYAIPILTYSFGIIKWSDTELEALNTITRTASNKHNIHHIHSAIQRFTLKRKFGGRGFLDIKNLHYTQIDNLRTYFLTKAQESNLHKAIVHLSQSGTPLQLHNSEFDPKLKILKDEQKIENWKKKALHGKYPNQLDQDHIDYIASCSWLTKGNIFGETEGFLVAIQDQIIKTRNYSKYILKERIDTDKCRLCHQITETVDHITGGCSVLANKEYTHRHDNVAKHIHQQLALKHNLLQSYTPYYQYKPKNVLENKTTKLYWDRDIITDRTILSNRPDITLTLKSTKTTFLIDIAVPNSHNLKQKHTEKIQKYIPLADEIKQMWHQESVRIIPIIISSTGLVPKTLKTALKLLDLHENTYIPMQKSIVIDTCSIVRRFLNPTTLTLQLYQDTHTNTVTQNSSTHAHNTQTHNAPNTVIIAHSNLTNSRESGHLA

SEQ ID NO: 1211 - protein, 1365 aa, Ypsolopha scabrella
MRLRSRNILPQAGTSNGESRPEPTSSGSPTYSGEGNVSLHPAQSSTVAGQENNTPSPDMLSYASSPISSTHSLFQSPSSSPYDFQLTSTSRSTTISSMSCDVVQEALAICPAPITGIMNPTRTSETNSHSNRVDTNTERHTTDTNTPARSVLQDMLPATTLAGKSRQRMRWTNQINHELLRCYYMVTNCEENLTAYRPLLHQKFTETFPELSHLTEQRLADQIRVIYRNNRIPASERESIKQAVLQTITTLDNPNTNNFDSQVNTNNNDVMYNQFQNSHTLEQRDNTQQTIASTPQPIIMTLSDNEITTKSASVAFQETYEHTQSQGPEIDITSEESINYQKIEDTFTEILIKYTGTDPTQRPIISKIQTTRKVIKTIKTSNEIINKHLQNKEDVTIVEIHEIIYCAALTVTTYTNSTNKEKKKEHNKTNTNINQANKKKTPQWQKRLENKIAILRKEIGRLTQYLNGNLTQKKQQKLNPNNKSRDEIVNELDNYKQKLQAYSKRLRRYKISNQRKSDNNLFNTNQKLFYRNLNSDQIEITEPPNIDEVKHYWENLWSNPLQHNSHSSWAKIEEQEVDNIDPMPEISINIDDVTYAIKNTLNWKAPGPDKIQNYWLKYLTSTHKYIASTLNHLLHNPQDIPPFLTQGITYLKPKDNDTTNPAKYRPITCLPTIYKLLTSIISHKINSHLTSNKIIPEEQKGCSKGSRGCKEQLVIDTEIHNQVKKKHRNLYYSYIDYQKAFDSVPHSWLLHVLKMYKIDNRLIQLLEYAMTNWKTKLNIRTNNTTLSTPSIKIARGIFQGDSLSPLWFCLALNPLSRILNKTGYGYNIDTGNDIKLTHLLYMDDIKLFAANRQQINHLIRLTEEFSRDIKMTFGTDKCKINSMIKGQHKETDPYILEQQTGTIDSMEPKETYKYLGYQQSTSIDHTEIKNALKTKYKQRLNKILKTQLSARNKTKAINTYAIPILTYSFGIVKWSDTELEALNTTTRTTCNKHNIHHIHSAIQRFTLKRKLGGRGFIDIKNLHYTQIINLRSYFHTKANESAIHKAIVNLPQPGTPLQLNNSQFEPKHKITTDEQKLENWKKKALHGRFPHQLDQEHIDKTASCTWLTKNNIFGETEGFLIAIQDQIIKTRNYSKYILKETIETDKCRLCNLASETIDHITGGCSTLANKEYTHRHDNVAKHIHQQLALKYKLLQSYTPYYQYKPKKVIENSSAKLYWDRDIITDRTILSNRPDITLTLKSTKTTYLIDISVPNTHNLKQKHTEKIQKYIPLADEMKQMWKQETVKIVPIIISSTGIVPKTLKKALELLDLPIKTFIPMQKSIVIDTCSIVRRFLNPTSLPLLTNHTTPHINTTHSMPPNTQEMQ

SEQ ID NO: 1212 - protein, 1359 aa, Erynnis tages
MRLRSGYKLPQAGTGANRTGESGPEPSSSGSPTYSGGDIVSQTSAQSQAVAVNNSPSSHTLTHSSSPISSTHSLFQSPSSSPQSYELTHSMSHSSSYSSISCDAAQEATAPSPEPTTDITNPTRDSQSTINIRVDHTIPSSAPQINTPARSVLQDMLPATTLAGKNRQRMKWTDQINRELLRCYYLVTHNETNLTAWRPSLHQMFTETYSELSHLSEQRLADQIRVIHKNNRVSVSERENLKRTVSLLLDTTNTSNHYIQTNNLHNQSPINNTHTIQDNITQTITNTNSHTLNTSPMLVSTQQINKTQTHVDINHIDTQTSEITNAQQEPISNDVIENTLTEMLIKYKDTDPLLRPTIPKLQISRRAIITVQNTNKIVGEHLKNIETVTLEDIQDIIYCAAQTITKLHNKYSKQTNIKRSNININNTILKQNKPQWEKRIENKITTLRKEIGQLTQLIKGNLSHKKQKKLNPNNKNFDELTEQLDTSKQKLQAYSKRLRRYKISNQRKSDNKLFNTNQKLFYQKLQTEQIHITQPPKPDDIQKYWKNVWSNPVQHNIHTSWNEIVEEETTTIDPMTEIEINKHDVTQAVRKTLNWKAPGPDKIQNYWIKYLTATHDYLANIFNHLIQNPQDTPSFLTRGVTYLKPKDHDTTNPAKYRPITCLPTIYKLLTSIISHKLSIHITQNNIITEEQKGCSKGSRGCKEQLVIDSAVHNQIKQKHRNLFYSYIDYQKAFDSVSHSWLIHILKLYKVNNRLIEFLQHTMGNWTTTLSLRAHNTTLSTHPIKILRGIFQGDSLSPLWFCLALNPLSKILNKSGHGFVIDRDKNIKLTHLLYMDDIKLYAANRHELDHLLQLTEQFSADIKMTFGTDKCKINSIVKGKHNETEVFGLCQQEGTIDNMIAKEAYKYLGYAQSTSINHTDIKTTLKSKYKRRLHIILNTQLSARNKVKAINGYAIPILTYSFGIIKWTDTELEGLNIATRSACNKHNIHHIHSALQRFTLKRKLGGRGFIDIKNLHYTQIHNLRTYFIAKANDSALHNAIINLPESGTPLQLNNRQYDPTLKILSDDKKIENWKNKALHGKYPHQIQQDHIDKSASCTWLTKGNLFGETEGFLVAIQDQVIKTRNYTKYILKQTIDTDKCRLCHQNTETIDHITGGCNVLANKEYTHRHDNVAKHIHQQLALKHKLLNTYTPYYQYKPKKVIENSIAKLYWDIDIRTDRTVLSNRPDITLTLKQSKTTYLIDVAVPNTHNLKQKHTEKIQKYISLADEIKQMWHQETVRIIPIIISSTGVIPKSLKSALKLLDLHENTYIPLQKSIIIDTCSIVRRFLNPTSLTLQDENHTNHHSLTHNSSTPHPHTQNT

SEQ ID NO: 1213 - protein, 1366 aa, Epargyreus clarus
MRLRNRQIPQAGTREGESRPGPSGSGCPTYSGGGNVSHKTAQSNTVAVDNPHSQSHPSSPVSSTHSLFPSPSSSPYSYQFHPSSSRSSTITPLSCDVAQEAHAISPVPATDNINAARDIQNDQISRVTPHTNSPSHTIHTPARSVLQDMLPATTLAGRSRQRMKWTDEINKELLRCYYIVTQNESNLTAWRSQLHRTFAESIPELSHLSEQRLADQIRVIHKNNRIPATEREQIKHSVSLLISSTSNRLTDHSTARHTDHQSNINTSPLTINHQPTTDSHSHTLNLQHTITITHHATTTSQAYQSCESIEHMQTQDSEPTNRSLELVDFEKIENIFREMLIKYTGTDPTLRPTISKPQTTRNFIKTLNSINEIIHKYLQNRELITIEQIHEVIYCAAQTVTTIHTKHVKILEYITNNNNRKQKKPQWEKRIENKIATLRKEIGQLTQYLNGNLSLKKQQKLNPSNRSRDEIVEQLDSNKQKLQAYTKRLRRYKKSNERKSHNKLFNTNQKLFYQKLNAEKIEITQPPEKIDIENYWKNIWSIPIQHNTHTSWAEIEEQEMENIDPMPEITIDKDDVLVAIKKTLNWKAPGPDKIHNYWIKYLPATHEHIANALNHILCKPEDTPFFLTQGITYLKPKEGDTTNPAKYRPITCLPTMYKLLTSIIAHKLNSHITRNHIIPEEQKGCCKGSRGCKEQLVIDTEIHNQVKQKHRNLYYSYIDYQKAFDSVPHSWLIYILKIYKVDNRLIQFLLHTMKHWTTKLTLHTNNISICTQTIKILRGIFQGDSLSPLWFCLALNPLSRILNKTSSGYVIDRKNNVKLTHLLYMDDIKLYAANRQQLDHLLMLTENFSTDIKMTLGTDKCKINSIIKGQHHETNPFQLESQGGTIDSMEFRETYKYLGYQQSTSINHADIKHTLKTKYKHRLHKIFNTQLSARNKIKAVNTFAIPVLTYSFGVVKWSDTELEALNTATRTISNKHNIHHIHSAVQRFTLKRRLGGRGFIDIKNLHYTQIHNLRTYFLLKANESAVHKAIVDLPQPGTPLQLNNRQFDPTHKILKDDQKIENWKKKALHGKYPHQLDQDHIDYAASCTWLTKGNIFGETEGFLIAIQDQIVKTRNYSKYILKEAIDSDKCRLCHQTTETIDHITGGCSVLANKEYTHRHDNVAKHIHQQLALKHKLLQSYTPYYQYKPKNVLENSAAKLYWDRDIITDRTILSNRPDITLTLKSSKTTFLIDISVPNTHNLKPKHTEKMQKYIPLADEIKQMWHQDTVRIVPIIISSTGVIPKTLKTALKVLNLHENTYIPMQKSIVIDTCSIVRRFLNPTTLTLQTHQDTHPNTTQTSTTHNTHTHNPPNTPIITHPNHSNTIHE

SEQ ID NO: 1214 - protein, 1418 aa, Epargyreus clarus
MPREGRTLDSTLLHNPSDQRSNSIQKYAMRLRNRQIPQAGTREGESRPGPSGSGCPTYSGGGNVSHKTAQSRTVAVDSQSHFTSHSSSPISSTHSLFQSPSSSPRSYEFQHSSSTSTTTSPLSCDVAQEAHAISPVPTTDIINPTRVPRNDVQNRVNHNTHSLSPITNTPARSVLQDMLPATTLAGKSRQRMKWTGQINRELLRCYYVVTHNETNLTAWRPQLHQKFAESFPELSHLSEQRLADQIRVIHRNNRLTFLEREHIKQSVSLLLSAANRLNDCTTINNIQTPSNTSPTINNLELTTHSPSRALNPQHTHTLNHSHSQHPYTHSPPTNTPTHTSQAPENSEHGQTQEPQRTVEPLDSIDFDTIENTFAEMLIKYTGTDPTLRPPIPKLQTTRYTIRTMTTVNEIVDTHLNTKNSVTLEEIHTVIYCAALTAATLHTKHFNKSVNNNNNYNSHTIIKQKKPQWEARIEKKIISLRKEIGQLTQYLNGNLTQKKEKKLNPNNRSRNEIIEQLDNNKQKLQAYSKRLRRYKISNQRKSHNKLFNTNQKLFYQKLDTENIQVTQNPNKDGIHKYWKNIWSKPVLHNTHLSWTEIEDEEIDNIEPMAQIIIDKDDVCQAIKKTLNWKAPGPDKIQNYWIKYLPATHKYIANTFNYLMNNPQETPTFLTQGITYLKPKDNDTTNPSKYRPITCLPTIYKLLTSIISFKLNTHITQNHIIPEEQKGCSKGSRGCKEQLIIDTEIHNQVKHKHRNLYYAYIDYQKAFDSIPHSWLIQVLRIYKVDIRLIEFLRNTMNNWTTKLTLRTNNTSISTQPLKILRGIFQGDSLSPLWFCLAINPLSRILNKTGYGYVIDRESNIRLTHLLYMDDIKLYASSRQQIDHLLKLTENFSTDIKMTFGTNKCKINSIIKGQQKETDPFELQTQGGRIDSMEPKETYKYLGYQQSTSINHTHIKNTLKTNYKQRLHKILNTQLSAKNKVKAINTYAIPILTYSFGIIKWSDTELEALNTITRKASNTHNIHHIHSAIQRFTLKRKLGGRGFTDIKNLHYTQIDNLRTYFLTKAKESDLHKAIVHLNISGTPLQLNNSEFDPKHKILKDEQKIENWKKKALHGKYPHQLEQDHIDYNASCTWLTKGNIFGETEGFLVAIQDQIIKTRNYSKYILKEAIDTDRCRLCHQTTETIDHITGGCSVLANKEYTHRHDNVAKHIHQQLALKHKLLESYTPYYQYKPKNVLENNTTKLYWDRDIITDRTILSNRPDITLTLKSTKTTFLIDIAVPNTHNLKQKHTEKIQKYIPLADEIKQMWHQETVRIIPIVISSTGVIPKTLKTALKLLDLHENTYIPMQKSIVIDTCSIVRRFLNPSTLTLQTHQDTFPNTATQNTSTRTTTHNTQTNIHNTLNTLITTHSNHTNTHESGYLA

SEQ ID NO: 1215 - protein, 1363 aa, Eantis tosta
MRLRSRQIPQAGTRKGESRPGPSGSGCPSYSGGGNVSHMTAQSQTAAANTSPTHIASDPPSPTLSTYSLFESPISSPHSYEFEHSTSSSSTMTLTADDVAREASANSPVPTTDVTNPTRVTLINTDNRVTHNSNILSSNTNTPTRSVLQEMLPATTLAGKSRQRMKWTDQINRELLRCYYIVTHNETNLTAWRPLLHHKFIENTPELSHMSEQRLADQIRVIHRNNRIPAKERDDIKKSVSLLLEAQKNTNETGDTNLTTYLSTTNTTTTINNHQIDTHLLSETPNTQNILHTIQCSNTINTLPPPITTEHIETQNPDPTRHTLDPIDYEKIENTFTEMLIKYTDTDPTLRPTIPKLHITRHVIKTVNTTNEIIDKYLQNINTITLSIIHDIIYCAAQTITTLHSKPSDSHEKNKDAYTRNVNKQSIPQWEKRLENKIIYLRKEIGQLTQHLKGNLTQKKQEKLNLNNRSRDELTEQLDNKKQKLQAHSKRLRRYKISNQRKSQNKLFNNNQKLFYNKLNTEKNHVTHPPEKDDLQRYWKNLWSNSVHHNTHSTLTEIEEQDMAKLQPMAEIIIDNEDVYLALRKTLNWKAPGPDKIQNYWLKYLPATHKHLANAFNHVINNPQDTPHFITQGVTYLKPKDNDTTNPANYRPITCLPTIYKLLTSIISHKLNIHVTKNQIIPEEQKGCRKGSKGCKEQLVIDTEIHYQVKQKHRNLFYAYIDYQKAYDSVPHSWLIHILKIYKVDNKLIHFLQHTMKNWNTKLNLHTNKTSICTNPIKISRGIFQGDSLSPLWFCLAINPLSKILNNTGMGYVIDRNNNIKITHLLYMDDIKLYAATRQQLDELLKLTENFSTDIKMTLGTSKCKINSIVKGQYNETNSFDLNIQKGKIDSMEPKETYKYLGYQQSTYISHTDIKNTLKTKYKQRLHKVLNTQLSARNKVKAVNTYAIPVLTYSFGIIKWSDTELEALNTATRIASSKHNIHHIHSAVQRFTLKRKLGGRGFIDIKSLHYTQIDNLRTYFLQNANQNPLFKAIVSLPQAGTPLQLNNTPFDPTLKIYNNEQKIDAWKKKALHGKYPHHLQQDYIDQTASCSWLTKGNIFGETEGFMVAIQDQIIKTRNYSKFILKEKIETDKCRLCHKTTETIDHITGGCSVLANKEYTYRHDNVAKHIHQQLALKHKLIHSYTPYYQYKPKKVIENKTAKLYWDRDIITDRTILSNRPDITLTLKSSKTTYLIDIAVPNTHNLKQKHAEKIQKYLPLADEMKQMWHQASVKIIPIVISSTGVIPKSLKSALKLLDLHEYNHIPIQKSVIIDTCSIVRRFLNPTTLALQENPQYIDTNTTIHNTYTHTETNNTHKDDQNTTNP

SEQ ID NO: 1216 - protein, 1354 aa, Parnara guttata
MTNGALVNKYAMRLRSSNKLPQAGTSANCNGESRSDASGSLTYSGGGTVSHMEAQSMTVAPFTSSPTPTNSHTSSPTSSSYSLFQSPSSSPHSYQLQNASPTSSSSNMSCNVAQEASASSPVPITGITSAMRTSQIYSPDRIVTHTQLTPHTNTPARSVLQEMLPATTLAGKSRQRMKWTDEINTELLRCYYIVTLGETNLTAYRSLLHHEFIKSYPELSHLSEQRLADQIRVIHRNNRITLHERERLKQAVLATNINIPQDIQNQSNINTTNAHPSIDNTQPDSQSLINALNNTQSTNTTVCINQLTVINEHIESQNMEQTPTPIYTVDYNNIKHTFIEMIIKYSGTDATLRPSIPKVKTTRNIIKTLNTINDIIDTHLSKKENITITYLHDVIYCAALTVTIINTQQESKTVKNVNENTNTKRDAKDRKPRWETRIERKITLLRKEIGQHTQYLNGNLTNKKQQKINPNNKTRDEIVDLLDNKKQKLQAYSKRLRRYKISNKRKTDNNLFINNQKLFYQKLNTDNIKITHSPNTSDIQSYWENIWSKPAYHSNHPSWIAIEQQEVEYIEPMHEITINKDDVTYTIKKTQNWKAPGPDKIQNYWIKYITSTHKYIADTLNRLINNPQDMPTFLTQGITYLKPKDNDTTNPAKYRPITCLPTIYKLLTSIITHKLNTHITQNKIIPEEQKGCSKGSRGCKEQLIIDTEIHNQVKQKHRNLYYAYIDYQKAFDSVPHSWLLHTLEIYKIHPTLIAFLRHAMANWTTRLHLRTDKSTLCTPLIKIARGIFQGDSLSPLWFCLAINPLSRILNATKSGYVINRENNIKITHLLYMDDLKLYAANRQELDRLLSLTEKFSTDIKMTLGTNKCKINSICKGKHNITEPFNLEIHEGIIDKMEPKETYKYLGYQQSTFISHTDIKNTLKTKYKQRLNKILSSQLSARNKVKAVNTYAIPILTYSFGIIKWSDTELEALNTTTRTACNKHNIHHIHSAVQRFTLKRKHGGRGFIDIKNLHYSQIDNLRKYFIMKSQDSTLHRAIVNMDKPGTPLQLNNTEFNANHKILSDDNKIENWKKKALHGKYPHQLEQEHIDRTASSTWLTKGNIFSETEGFLIAIQDQVIKTRNYAKYILKEQIVTDKCRLCHQSIETIDHITGGCGVLANKEYTHRHDNVAKHIHQQLALKHKLLDTYTPYYKYKPKHVLENNSAKLYWDRDIITDRTILSNRPDITLTLKTSNTTYLIDIAVPNTHNLKQKHTEKIQKYIPLADEIKQMWHQKTVRIVPIIISSTGVIPKTLKAALKLLDLHENTYIPLQKSIIIDTCSIVRRFLNQTTLTLNNNESFITNLSHRELREHIHNT

SEQ ID NO: 1217 - protein, 769 aa, Hesperopsis alpheus
MPELIIEKEDVSTTIKKTLNWKAPGPEKIQNYWIKYLSSTHEHISKAFNHLIHKPHETPFFLTQGITYLKPKDSDTTNPAKYRPITCLPTIYKLLTAIITHKLNAHISRNNIIKEEQKGCRKGSKGCKEQLIIDSEVHSQVKLKHTNLFYSYIDYQKAFDSIPHSWLVEILKIYKVDNKLVHFLQHTMKNWTTKLHLNTNKTSLITQAIKISRGIFQGDSLSPLWFCLALNPLSRILNNTEDGYILDRENNIKITHLLYMDDIKLYAANRQQIEHLLKLTENFSTDIKMSFGINKCKINSIIKGQYKQTDAFDLNSQSGKIDSMEPKETYKYLGYQQSTSINHTDIKNILKTKYKHRLNKILNTHLSARNKVKAINTYAIPILTYSFGVIKWSDTELEALNTLTRTTSYKYNIHHIHSAVQRFTLKRKLGGRGIIDIKNLHYNQINNLRTYFTQKSKDNDLFKAIIKTHKGGTPLQLNNNDFNPALKIQTDEQKIDSWKKKALHGKYPHQLEQEHIDRNASCSWLTNGNIFGETEGFLIAIQDQIIKTRNYSKYILKETIEMDKCRLCHQATETIDHITGGCSILANKEYTYRHDNVAKHIHQTLALKYKLLESYTPYYQYKPKKVLENSTAKLYWDRDIITDRTILSNRPDVTLTLKSSKTTYLIDIAVPNTHNLKQKHTEKVQKYLPLADEIKQMWHQEYVKIIPIIISSTGVVPKSLKMALKLLDLHENTYIPLQKSIIIDTCSIVRRFLNPTTLALQQEKQHTNT

SEQ ID NO: 1218 - protein, 1383 aa, Astraptes enotrus
MRLRNRQLPQAGTREGESRPGPSGSGCPTYSGGGNVSHKTTQSHTVVVEKSPPHNASHSSSPISSTHSLFQSPSSSPQSYEFQHSPSRSTTSTLLSCDVAQEAHANFPVPTTDITNPTRVSNNDVHYRVSHNTHSLSPITNTPARSVLQDMLPATTLAGKSRQRMKWTDQINRELLRCYYIVTHNETHLTAWRPQLHQKFAESFPELSHLSEQRLADQIRVIHRNNRLTAAEREHIKQSVLLLLSTSSRSNDCTITNNIDSLLNTPHSTNNVKPIAHSPNQALYPQHTHTLYQSHSQQPHTDSQRINLTTQTHHSPENNEDCQTQDLQTTYKPLDPINHCKIENTFTEMLIKYTGTDPTLRPIIPKLHITRNTIRTINTINEMVDIHLRSKNLVTLEEIHEAIYCAAQTTVTVHNKHVNKLESNNNNNPNTITKQNKPQWETRIDKKITMLRKEIGQLTQYLNGNLTQKKQNKLNPNNKSRNEIIEQLDNCKQKLQAYSKRMRRYKISNLRKSHNKLFTTNQKLFYQKLDTEQIQITQSPNKDDIHNYWRNIWSKPVQHNTHSSWTEIEDQELENIKPMSELVIDRDDVSQAIKKTLNWKAPGPDKIQNYWIKYLPATHEYIANTFNHLINNPQDTPAFLTQGITYLKPKDTDTTNPSKYRPITCLPTIYKLLTSIISFKLNTHITQNHIIPEEQKGCSKGSRGCKEQLIIDTEIHHQVKHKHRNLYYAYIDYQKAFDSIPHSWLIQVLKTYKVDVRLIEFLQDTMKNWATKLSLRTNNTSFCTQPIKILRGIFQGDSLSPLWFCLAINPLSRILNNTGYGHVIDRESNIRLTHLLYMDDIKLYAANRQQIDHLLKLTENFSTDIKMTFGTNKCKINSIIKGKQKETDPFELHTQGGKIDSMEPKETYKYLGYQQSTSISHTHIKNTLKTKYKQRLHKILNTQLSARNKVKAVNTYAVPILTYSFGIIKWSATELEALNTMTRTATNRHNIHHIHSAVQRFTLKRKFGGRGFIDIKNLHYTQIDNLRTYFLTKAKVSDLHKAIVHLAQSGTPLELNNSEFDPTHNILKDEQKIENWKKKALHGKYPHQLEQDHVDCNASCSWLTKGNIFGETEGFLVAIQDQIIKTRNYSKYILKEKIDTDKCRLCHQTTETIDHITGGCSVLANKDYTHRHDNVAKHIHQQLALKHNLLQSYTPYYQYKPKNVLENHTTKLYWDRDIITDRTILSNRPDITLTIKSTKTTFLIDVAVPNTHNLKQKHTEKIQKYIPLADEIKQMWHQESVRIIPIIISSTGVIPKTLKTALKILDLHENTYIPMQKSIVIDTCSIVRRFLNPTSLTLQTHEDTHPNTTTQNSSTHTVTHNTSSNTHNTSNTPIITHSNHTNT

SEQ ID NO: 1219 - protein, 783 aa, Ypsolopha scabrella
MPEISINIDDVTYAIKNTLNWKSPGPDKIQNYWLKYLTSTHKYIVSTLNHLLHNPQDIPPFLTQGITYLKPKDNDTTNPAKYRPTTCLPTIYKLLTSIISHKINSHLTSNKIIPEEQKGCSKGSRRCKEQLVIDTEIHNQVKKKHRNLYYSYIDYQKAFDNVPHSWLLHVLKMYKIDNRLIQLLEYAMTNWKTKLNIRTNNTTLSTPSIKIARGIFQGDSLSPLWFCLALNPLSRILNKTGYGYNIDTGNDIKLTHLLYMDDIKLFAANRQQTNHLIRLTEEFSRDIKMTYGTDKCKINSMIKGQHKETDPYILEQQTGTIDSMEPKETYKYLGYQQSTSIDHTEIKNALKTKYKQRLSKILKTQLSARNKTKAINTYAIPILTYSFGIVKWSDTELEALNTTTRTTCNKHNIHHIHSAIQRFTLKRKLGGRGFIDIKNLHYTQIINSRSYFHTKANESAIHKAIVNLPQPGTPLQLNNGQFEPKHKITTDEQKLENWKKKALHGRFPHQLDQEHIDRTASCTWFTKNNIFGETEGFLIAIQDQIIKTRNYSKYILKETIETDKCRLCNLASETIDHITGGCSTLANKEYTHRNDNVAKHIHQQLALKYKLLQSYTPYYQYKPKKVIENSSAKLYWERDIITDRTILSNRPDITLTLKSTKTTYLIDISVPNTHNLKQKHTEKIQKYIPLADEMKQMWKQETVKIVPIIISSTGIVPKTLKKALELLDLPIKTFIPMQKSIVIDTCTIVRRFLNPTSLPLLTNHTTPHINTTHSMPPNTQVMQ

SEQ ID NO: 1220 - protein, 1266 aa, Thymelicus sylvestris
MSYDVAQEALANSLVPTNDITNSTRVLPNDSTNYVDHHNSQSPLLDTNTPVRSVLREMLPATTLAGKSRQRMKWTKEINIELLRCYYTVTLCETDMTAWRPLLHKMFIEQFPELSHITEQRLSDQIRVIHRNNRIPLTERESIKQTIPQTLPSTNNINYSIGEDTCNIHTHSSQNPTTLVTLTIQDTPNTQQTLTQTYECQSQSNPPLENNEHIHTQEKGPINTTVSSLFYEQIENVFNEMIIKYTGTDPTLRPRIPKLHTTRQMIKTVNTINGIVDNHLKNKDTITLEDVHDVIYCAAQTVVTFHTKQPKIIVDQISSTPNNKTNEHREPQWKKRIEKKITLLRKEIGQLTQYLNGNLTEKKQNKLNLNNRNRQEIVAELDTNKQKLQAQAKRLNRYKKSNKRKSDNILFQNNQKLFYQKLNAENITVTQQPDIAYIKTYWENIWSKPVQHNTHTTWTEIEEQEMENIEPMPEITISKEDVTHTIKKTLNWKAPGPDKIQNYWIKYLTSTHIYIANTLNNLIKNPHDLPTFLTQGVTYLKPKDNDTTNPAKYRPITCLPTIYKLLTSIITHKINTHISINKIIPEEQKGCSKGSMGCKEQLIIDAEIHNQVKHKNRNLFYSYIDYQKAFDSIPHSWLLYVLKIYKINNSVIHFLQHAMSKWTTKINLKTNTTTLSTSQIKIARGIFQGDSLSPLWFCLALNPLSRILNNTPYGYIINRENRTKITHLLYMDDIKLFASNRQELDHLLRLTEKFSTNVKMTFGTSKCKINSITKGQHSRTNSFELELQGGTIDSMEPRETYKYLGYQQSTSLNHTDIKNTLKNKYKQRLNKVLSTQLSARHMVKAVNSYAIPILTYSFGIIKWTDTELNALNTLTRTISNKHNIHHIHSASQRFTLNRKLGGRGFIDIKNLHYNQIDNLRTYFLQKATNSTLHKAIVNMPHPGTPLNLNNNHYDPKTKIQNVAQKIKNWKDKVLHGKYPYQLEQDHVDRNASTAWLTNGNIFSETEGFIIAIQDQVIKTRNYSKYILKETIETDRCRLCHKYTESLDHITGGCSVLANKEYTHRHDNVAKYIHQQLALKYKLTDTHTPYYKYKPMSVLENNTVKLYWDREIITDRTILSNRPDITLTLKSKKTTYLIDIAVPNTNNLKQKHIEKIQKYVPLADEIKQMWHQDTIQIIPLIISSTGIIPKTLHTALKTLDLHPKTFIPIQKSIVIDTCSIVRRFLNPTLLTLQNLPDSNTLTLTSSHTQAMSTDTHSAQNTHNHQTS

SEQ ID NO: 1221 - protein, 1353 aa, Pyrgus malvae
MRLRNRQIPQVGTREGESRPGPSGSGSPAYSGGGNALHMTAQSNTVVVPISTSHITSEPTSPISSTHSLFPSPSSSPYSYQMHQSSSRSSTISPLSCDVAQEAHAISLVPTTDNAHYTRAEQYNQSHRVNHNTHTSLSNINTPARSVLQEMLPATTLAGKSRQRMKWTDDINRELLRCYYIVTHNETNLTAWRPLLHQKFCEYFPELNHLSEQRLADQVRVIHRNNRIPTPEREQIKQSIVTFTSTTTFTNKHNVLNMEDQPTTHITNTTTITNQLNPGLSDSTRTFQHNINHYQPNDITITSNAEVILSEDCQINNTVELIDYKKIENTFNEMLIKYQGTDPTLRPTIPKLRICHRAIKIVNTTNEILGKHLDSKDTINLEEIHEVLYCAAQTVTILNIPRRNNLTSDTSCINKNTTHKQFKRKQKWQIRLENNIARLRKEIGQLTQYLNGNLSPKKQQKLNPSSRNRDEITEILDKHKQKLQAYSKRLRRYKISNQRKTDNKLFMENQKQFYQKLNSEQIQVVQPPSNEDIQNFWKNLWSNSVQHKTHLPWTQIEEEEIEDIDTMTEIKISKEDVSHAIKKTLNWKAPGPDNLQNYWIKYMSKTHEHLANTFNYLIHNPHETPSFLTQGITYLKPKDSDTTNPEKYRPITCLPTIYKLLTSIITEKLNTHITQNHIIPEEQKGCSKGSRGCKEQLIIDAEIHNQVRQKHHNLFFSYIDYQKAFDSVPHSWLIQVLKIYKVNNILIQFLEQIMKTWTTKIHLRTNYTTINTSPIKIKRGIFQGDSLSPLWFCLALNPLSKILIKSGYGYVIDKNSNTKLSHLLYMDDLKIYAANRQQIDHLLKLTENFSNDIKMTFGTSKCKISSIIRGQYQETHPYYLSSQGEPIDSMAPKETYKYLGYLQSTSINHTEIKNTLKTKYKQRLNKILNTKLSGKNIIKAINTYAIPILTYSFGIIKWSDTELEALNTTTRTTSYKHNIHHIHSATQRFTLKRKLGGRGCIDIKNLYFSQIENLRTYFLTTAKTSILHKAIVNLPKSGTPLQLNNSQYNPKHKIISDEQKLESWKMKALHGKYPHQLEQEHVDCNASFSWLTKSNIFSETEGFIVAIQDQIIKTRNYSKYILKEQIETDKCRLCHQTTETIDHVTGGCSILANKEYTHRHDNVAKHVHQQLALKHKLLKKPTPYYQYKPVNVLENSAAKLYWDRDVVTDRTILSNRPDITLTLKSSKTTFLIDIAVPNTHNLKQKYTEKIQKYIPLAEEIKQMWHQECVRIVPIIISSTGVVPKTLKKTLQSLDLHDNTYIPLQKSIILDTCSIVRRFLNPITLMLQDERHTNTTHRIQNSSHAHTNISNHNT

SEQ ID NO: 1222 - protein, 1356 aa, Symmachia rubina
MRLRNRAIPQAGTCKGESRPESIDSGSPTYSGGGNVSPNPAQSRTVAVNTSNSPTLPPSLSTQHLSSPISSTQSLFPSPYSSPKSYEYHDSPNSSSNTTSPLSLDVAQEALAHNLVPTIDSTNPTQTTLTSVPNRVDYNSHHHTPITNTPARSALQDMLPATTLAGKSRQRMKWTYNINKELLRCYYVVTKCETNLSAYRPQLHKKFIETFPELTHLSEQRLADQIRVIHKNNRISAAERDQIKQLVEQINTNDENCESNSSNTGDRSILDISHSNNCQTITNSHTEQSRPIHFTQQAIAATTVMPQTLESIEHVQTQDTEVITDTIANSLSYKKINDTFTEMLIKYRGTDPTLRPSIPKLQISRHTIKTLNTVNNILDRHLMNTEKYDIEEIHEVIYTAALTVTTLHAKQLRKKENNTARKNRTTFDTDKKPSWEKRLENKITGLRKEIGLITQYINGNLSQNKRRKLNPENRSMGEIIEQLDINKQKLQAYSKRLRRYKKSNQRKTDNNLFNNNQKLFYQKLNSDNIKIIQPPDINAVQSYWKNLWSKPVLHNTHTRWTQIEEQEMNITNPMAEITINEEDLKQAIRKTLNWKAPGPDKIQNYWIKYFTATHKHLANTLNYLLHNPQKTPAFFMQGITYLKPKDHDTTNPTKYRPITCLPTIYKLLTSIIAHKLNQHVTLHKIIPEEQKGCCKGSRGCKEQLIIDAEIHYQVKQKRRNLYYAYIDYQKAFDRVPHSWLLHVLRIYKVDKNIIQFLQHAMSQWTTRLNLKTDNAVLSTSPIRIARGIFQGDSLSPLWFCLALNPLSRILNGTDFGHVIDKNNNIKLTHLLYMDDIKLYAANRNQLDYLLRLTEEFSNDIKMSFGINKCKINSIDHGQYNKTGPFDLEQHRGLIDSMEPKETYKYLGYHQSTAINDSEIKKSLKIKYKQRLNKILSTQLSARNKTKAINTYAVPILTYSFGIIKWTDTELNALNTTTRVASYKHNIHHIHSSVERFTLNRKLGGRGFIDIRDLHYSQIENLRTYFLTKSNESALHNAIVNLPHSGTPLKLCNSLYDPQLKLTKDTQKLENWKKKALHGKYPHQLEQDHVDKNASFTWLTKGNIFSETEGFLIAIQDQIINTRNYSKYILKQTIETDKCRLCHQTTETVDHITGGCSALANKEYTYRHDNVAKHIHQQLVLKYKLSDQYTPYYQYKPKTVIENNTAKLYWNRDIITDRTILSNRPDITLTLKSTKTTYLIDISIPNTHNLKQKHTEKIQKYIPLADEIKQMWHQESVRIIPIIISSTGVIPKTLSTSLKLLDLHENTYIPIQKSVVIDTCAIVRRFLNSSTHILQNIQDRTNTTQISSTQIHHPILP

SEQ ID NO: 1223 - protein, 1237 aa, Panoquina ocola
MRLRNRVLPQAGTLTGESRPGPSGSGRPTYSGGGNVSLRSAQSSTVAATEHLSPSHHSTSSPISSTRSLFESPSSSPHSYELHHTSRSTTTSPMSCDVAQEALANSLVPITDITNTTRILQNNASNCVDHNTQSSLFNSNTPARSVLQEMLPTTTLAGKSRQRMKWTKEINLELLRCYYTVTLCETNMTAWRPLMYQKFIERFPELSHISEQRLSDQIRVIHRNNRIPETERESLKNTISHTLPSRSDTIEEQEILNTNTYISEQPSTTQYLPSTQNTLVTPTQINERLEISEHIQTHETELRNTLERSTNGGQIENIFKEMIIKYTGTDPTLRPTIPKLQITRQSIKTVSAVNELVHKHFQNKDIITLEEVHEILYCAAITVTTIHNRQRNKSLDQNTSVSNSKIGKQKEPQWKQRIENKITLLRKEIGQLTQYLNGNLNKKKEKKLNPHNKNRQEIVEQLDIYKQKLQAQAKRLNRYKKSNQRKSDNILFQNNQKIFFKKLNSDSISVSQHPEIEQIKQYWKNIWSKPVQHDTHKTWTEIEEQETKDIEPMPEIIIEKDDVRYAIKRTLNWKAPGPDKIQNYWIKYFTSTHIHIANTFNSLLKNPQNMPTFLTQGITYLKPKDNDTTNPANYRPITCLPTIYKLLTSIITHKINSHISTNKIIPEEQKGCSKGSMGCKEQLIIDAEIHNQVKQKNRNLYYSYIDYQKAFDSVPHSWLLHVLKIYKIDNSLIQFLKHAMTQWTTKLNLRTNTTTLSTSTIKISRGIFQGDSLSPLWFCLALNPLSRILNNTTYGHIIDRENNIKLTHLLYMDDIKLYASSKQELDHLIKLTEKFSTHIKMTFGTSKCKINSIVKGQHSKTDSFELILQEGTIDSMENKETYKYLGYQQSTSLNHTEIKNTLKIKYRQRLNKILSTQLSARNKVKAVNSYAIPILTYSFGIVKWSDTELNALNTVTRTTSNRYNIHHIHSAVQRFTLKRKLGGRGFIDIRNLHYTQVENLRTYFIHKSNDSTLHKAIVNMSHSGTPLQLNNKVYDPKTKIIKEEQKVENWKSKALHGKYPHQLEQEHVDRSASTAWLTNGNIFSETEGFAIAIQDQIIKTRNYSKYILKEAIDTDKCRLCHRYTESIDHITGGCSALANKDYTHRHDNVAKYIHQQLALKYKLVDTYTPYYKYKPKNVIENNNVKLYWDRDIITDKTILSNRPDITLTLKSTKTTYLIDIAVPNTNNLKQKHTEKIQ

SEQ ID NO: 1224 - protein, 1349 aa, Cecropterus casica
MRLRNRQIPQAGTREGESRPGPSSSGCPTYSGGGNVSHKTAQSSTVAVDKPLTPSHPSSPISSTHSLFPSPSSSPYSCQFQPSSSCSSTITSLSCDVAQEAYANSPVPTTDNTNLTRVTQNNQSIRANHSTHSPSHTTNTPARSVLQDMLPATTLAGKSRQRMKWTDEINKELLRCYYLVTQMETNLTAWRPQLHRIFSENVPALSHLSEQRLADQIRVIHKNNRIPAPEREQIKQSVSFLISSFSNSLNSQAIARDDDDHSNIDTALSTNNQLITHSHNQTLNSQHMTHTTQTIIHHATTNAQACESSAHMQTQDCEPINRRLNSVDYKKIENVFTEMLIKYTGTDPTLRPNISKPQTTPNFIKTVNSINEITDKYLQTKDSITIEEIHEVIYCAAQTVIKIHTNSVKTFQNSTKSNNNNQRKPQWEKRIEKKIITLRKEIGQATQYLNGNLSRKKQKKLNPDNRSRDEIVEQLDKSKQKLQAYSKRLRRYKKSNERRSHNKLFNTNQKLFYQKLNSEQIHITQPPDKIDIQNYWKNIWSIPVQHNSHTSWTEIEKQEMENIDPMPEISINKDDVLTAIKKTLNWKAPGPDKIHNYWIKYLPATHEHIANALNHIICNPQNTPHFLTEGITYLKPKDNDTTNPAKYRPITCLPTIYKLLTSIIAHKLNSHITRNHIIPEEQKGCCKGSKGCKEQLVIDTEIHAQVKQKHRNLYYSYIDYQKAFDSIPHSWLIHILKIYKVDIRLIQFLQHTMKNWTTKLSLHTNNTSLSTQKIKILRGIFQGDSLSPLWFCLALNPLSRILNNTGYGYVIDKVTNIKLTHLLYMDDIKLYAANRKQLDHLLKLTENFSTDIKMTFGTNKCKINSIIKGQHKETDPFQLATIGGTIDSMEFRETYKYLGYLQSTSINHSEIKNTLKTKYKHRLHKIFNTELSSRNKIKAVNTYAIPILTYSFGIVKWSDTELEALNTATRTISHKHNIHHIHSAVERFTLKRKLGGRGFIDIKNLHYTQLDNLRSYFLFKSNESALHKTMVHLQQSGTPLQLNNNQFDPKLKILKDDQKIENWKKKALHGKYPHQLEQDHIDYNASCTWLTKGNIFGETEGFLVAIQDQIIKTRNYAKYILKEAIDSDKCRLCHQNTETIDHITGGCSVLANKEYTHRHDNVAKHIHQQLALKHKLLESYTPYYQYKPKNVLENNSAKLYWDRDIITDRTILSNRPDITLSLKSTKTTFLIDIAVPNTHNLKQKHTEKIQKYIPLADEIKQMWHQETVRIIPIIISSTGVIPKTLKTALKLLDLHENTYIPMQKSIVIDTCSIVRRFLNPTTLTLQTHKETHPGTPTRDSFPRVTIQNT

SEQ ID NO: 1225 - protein, 1359 aa, Mimia chiapaensis
MHLRNRKLPQAGTREGESRPGPSSSGCPTYSGGGNASHMATQFHSVVVDKSPTNISSHSSPISSTHSLFESPSSSPHSYEFQRSSSRSTTVSPMSSDVAQETHVNSPEPTPDINPARKAKKNNDNRVNHNTQSLPHNNNTPERSVLQEMLPATTLAGKSRQRMKWTEQINTELLRCYYVVTNNETNLTAWRPLLHQKFTESLPELNHLSEQRLADQIRVIYRNNRLTASKREEIKQSVSLFLSTTNNSNQVNTTNNTSHQSIVMTTPTNKQQSNSHSPSRTLNSPHIQPIAEQTYTITHAHPPFHNNEHTQAQSPETTSRTSHPIDYEKVENTFFEMLIKYSGTDPTLRPTIPKLKTTHNVIKTVNTTNEIIRKHLEGKDIITLEEIHEVIYCAAQTITTLHPKYLKHLENKPKDTNSNTAKQNKPQWEKRLENKITVLRKEIGQLTQYLRGNLAQKKQQKLNPNNSSKDEITEQLDKNKQKLQAYSKRLRRYKISNQRKSHNILFYNNQKLFYQKLNAEHIEIIQAPDNVDIQNYWTNLWSKPVQHNTHSNWTEIEGQEMANIELMPEIMIDKVDVSQAMRKTLNWKAPGPDKIQNYWIKYLSATHEHIAKIFNHIVHNPKDTPSFLTQGITYLKPKDNDTTNPAKYRPITCLPTIYKLLTSIITHKLNTHITKNEIISEEQKGCRKGSKGCKEQLIIDTEIHYQIKHKHRNLFYSYIDYQKAFDSVPHSWLIHVLKIYKVDNILINFLQHTMKSWTTKINLRTSKTLVCTHPIKILRGIFQGDSLSPLWFCLALNPLSRILNKTCYGYVIDSESNTKITHLLYMDDIKLYASNRQQLDHLLRLTENFSTDIKMTFGINKCKINSIIKGRYKETDSFDLNEQEGKIDSMELKETYKYLGYQQSTSINHTDIKNTLKIKYKQRLHKILNTQLSARNKIKAINAYAIPILTYSFGVIKWSDTELEALNTATRTTCNKHNIHHIHSAVQRFTLKRKLGGRGFIDIKNLHHTLIDNLRTYFLIKSNESSLHKAIVNLPQAGTPLHLNNSQLDPKNKIFTDDQKLDSWKKKALHGKYPHQLEQDHVDRNASCSWLTKGNIFGETEGFMIAIQDQIIKTRNYSKFILKQTIETDKCRLCHQTTETIDHITGGCSTLANKEYTYRHDNVAKHIHQQLALKHKLIETYTPYYQYKPKSVIENSAAKLYWDRDIITDRTVLSNRPDITLTLKSTKTTYLIDVAVPNTHNLKQKHTEKIQKYLPLADEIKQMWRQETVRIIPIIISSTGVIPKTLKPALHLLDLHENTYIPIQKSIIIDTCSIVRRFLNPTSLTLQQDEHYIYPDITLNTHTHANTNNTQTISHTIHT

SEQ ID NO: 1226 - protein, 1335 aa, Niconiades incomptus
MRLRNRELPQAGTHTGESRPGPSGSGRPTYSGGGTVSLRSAQSSTVAATNISSPSHNSNSSPISSTHSLFHSPSSSPHSYELHQSSRSTTMSPMSCDVAQEAPANSFVPTVGITNPTQILSNNSLNSVDHNTHQSLHDTNTPARSVLQDMLPATTLAGKSRQRMKWTRDINIELLRCYYTVTLCESDMTAWRPLLHQKFLERFPELNHISEQRLSDQIRVIHRNNRITVTDRESIKHTISLTLPSTNTTEEQETLNSYTPHTILQTTQETSITHDTHTTQNTNTPNVQYTQSITQTTRALEANEHIQTQENEPIHISVRSIDYEQTNNIFTEMIIKYTGTDPTLRPTIPKLQITRQMIKTVNIVNEIVDKYFHNKDIITLVEVHEAIYCAAITVATIHTKQRTNIVGHTSHKSNSNAHTQKEPYWQRRIENKITTLRKEIGQLTQYLNGNLTQKKQQKVNPTNKTRQEIVELLDSYKQKLQAQAKRLNRYKKCNQRKSDNILFKNNQKLFYQKLNSENIIVTKQPDITEVQKYWENIWSKPVQHTTHTSWTEIEEREMENIEPMPKITITKDDVTNAIKRTLNWKTPGPDKIQNYWIKYLTSTHIHIANILNSLIHTPHEMPAFLTQGVTYLKPKDNDTTNPAKYRPITCLPTIYKLLTSIITQKINSHISTNKIIPEEQKGCCKGSMGCKEQLIIDAEIHNQVKVKNRNLYYSYIDYQKAFDSVPHSWLLHVLKIYKIDNSLIQFLQHTMTKWRTKLSLRTNSTTLNTSQIKIARGIFQGDSLSPLWFCLALNPLSRILNKTTYGYLIDRENKTKLTHLLYMDDIKLYASNRQELDNLLKLTEKFSTDIKMTFGTSKCKINSITKGQHSRTDSFELELQGGKIDSMELRETYKYLGYQQSTSINHTDIKTTLKAKYKHRLHKLFSTQLSARNIVKAINAYAIPILTYSFGIVKWSDTELNALNTLTRTISNKHNIHHIHSALQRFTLKRQAGGRGFIDIKNLHYTQIENLRSYFMRKAHDSSLHKAIVNLPHPGTPLQLNNNQFDPKTKILKEDQKIEDWKKKALHGKYPHQLQQDHVDKVASTSWLTKGNIFSETEGFIVAIQDQVIKTRNYSKFILKESIETDKCRLCYRYTESIDHITGGCSALANKEYTHRHDNVAKYIHQQLALKYKLTDTHTPYYKYKPKNVLENNNVKLYWDRDIITDRTILSNRPDITLTLKSTMTTYLIDIAVPNTNNLKEKHIEKIQKYIPLADELKQMWHQKTIKIVPIVISSTGVIPKTLHTSLKLLDLHPKTYIPLQKSIIIDTCSIVRRFLNPTSLTYNMPTDIQPSQNT

SEQ ID NO: 1227 - protein, 1398 aa, Urbanus velinus
MPREGRTLDSILLHYSSDQQSHSKSKYAMRLRNRQIPQAGTREGESRPGPSSPGCPTYSGGGNVSHRNAQSSTVAFDKSHSPFQPSSPISSTHSLFPSPTSSPYSYQCQPSSSRSSTTTPLSCDVAQEAHANSPAPTADSNNHTRVIQNNQSNRVIHNTCSPSHATNTPARSVLQDMLPATTLAGKSRQRMKWTDEINKELLRCYYIVTRNETNLTAWRPQLHRMFAENVPVLSHLSEQRLADQIRVIHKNNRIPAPQRDQIKQSVSLLLASSANSLNDHTITRHTDNQHNINTTLLTNNQLITDSHNQSPILQHTVTNTHHAYTEHPSHYQSCESSEHMQTQDSEPTNRLLNLVDTKKIQEVFREMLIKYTGTDPTLRPSITKPQTTRNFVKTLNSMNEIVDKYLKTKDLITIEEIHEVIYCAAQTVASLYTKHIKKLENSTSNNNNNIRKPHWERRIENKIITLRKEIGQLTQYLNGNLSQKKQHKLNPNNKSRDEIVEQLDNSKQKLQAYTKRLRRYKKSNERKSHNKLFNTNQKLFYQKFNSEQIQIIQPPNKTDVEEYWKNIWSVPVQHNAHNSWTEIEEQEMGNIDPMPEITIDKDDVTQAIKKTLNWKAPGPDKIQNYWLKYLPATHGYIANALNHILCNPQDTPSFLTQGITYLKPKDHDTINPAKYRPITCLPTIYKLLTSIIAHKLNSHITQNHIIPEEQKGCCKGSKGCKEQLVIDTEIHTQVKQKHRNLYYSYIDYQKAFDSVPHSWLIHVLEIYKVDNRLITFLLHTMKYWSTKLTLHTNNISLSTQKIKILRGIFQGDSLSPLWFCLALNPLSRILNKTGSGYEIDRENNIKVTHLLYMDDIKLYATNRQQLLHLLKLTEKFSTDIKMTFGINKCKINSIVKGQHHETDPHQLETQGGTIDSMEFRETYKYLGYQQSTSLNHADIKNTLKNKYKQRLHKIFNTQLSARNKVKAVNTYAIPILTYSFGIVKWSDTELEALNTATRTISNKHNFHHIHSAVQRFTLKRRLGGRGFIDIKNLHYTQVDNLRTYFLLKSNESALHKAIALLPQSGTPLQLSNRQFDPKLKILKDEQKIENWKKKALHGKYPHLLEQDHIDYNASCSWLTKGNIFGESEGFLVAIQDQIIKTRNYSKYILKEPIDTDRCRLCHQYTETIDHITGGCSVLANKEYTHRHDNVAKHIHQQLALKHKLLESYTPYYQYKPKNVLENNAVKLYWDRDIVTDRTILSNRPDITLTLKASKTTFLIDIAVPNSHNLKQKHTEKIQKYIALADEIKQMWHQEHVRIIPIVISSTGIVPKTLKTALKLLDLHENTYVPMQKSIVIDTCSIVRRFLNPTTLTLQTNQDTHSSPPTQNSTKNIHNTQTHTTHNAPNTFITVSHSNHTNT

SEQ ID NO: 1228 - protein, 1342 aa, Quadrus cerialis
MRLRNRVIPQAGTREGESRPGPSSSGCPSYSGVGNASHMTAQPHAAAVINKNNITPSYITSSSSSPISSTQSLFQSPPSSPHSYELLSTPSRSTTTTPLSWDVTQVANANSPASISDNTLHARVLENNMTNLRAHLHTPSLPPIIDTPARSVLQDMLPSTTLAGKSRQRMKWTDQINKDLLRCYYIVTHNETNLTAWRPLLHKKFVEMVPELSHLSEQRLADQIRVIHRNNRIQISEREAIKESLRSSMPNSQNIPNQNNTLNSTLNLNLLPNTQLVIHNHNSHNTSTTQESNSVSQTYQPFLNSEHNDTQTFNTINTTLDPPEYKALENTFAEMLIKYTGSDPSHRPTIPKLQTTRVGIKTVNAVNEVIDRYIQLRDNLTINEIHNIIYCAAQTVISHTINKLQTNINNNNGNTHKRNKPRWERRIENKITSLRKIIGQLTQYLAGKLTHKKQQKINPNNRSISQITEQLDLNKQKLQAYSKRLRRYKISNQRRTDNKLFNNNQRRFYQSLSSEQIQITQPPDIEDLQNYWKSLWSKPVQHNTHVTWTQIEERETENINPMQEIIIEKNDVSQAIRKTLNWKAPGPDKIQNYWIKYFSSTHEHIAMAFNHLMHNPQETPTFLTHGITYLKPKDDDTTNPAKYRPITCLPTIYKLLSSIISHKLQTHITLNQIIPEEQKGCRKGSKGCKEQLVIDTEIHNQVKQKHRNLFYAYIDYQKAFDSIPHSWLTYILKIYKVSNNLIHFLEHTMKHWTTKISLNTNNKPLCTHSIKINRGIFQGDSLSPLWFCLAINPLSKILNNTCDGYVVDRDTNIKITHLLYMDDIKLYATNRQQLDNLLKLTEKFSTDIRMSFGTSKCKINSIIRGQHKNTDQYDLFIQGGKIDSMGPNETYKYLGYQQSICINHTDIKNTLKAKYKQRLNQVLKTQLSARNKAKAINTYAIPILTYSFGIIKWSDTELEALNTTTRTISNKYNIHHIHSAVQRFTLKRKLGGRGIIDIKNLHYTQIDNLRTYFLIKANENTLFKAIVKLSQGRTPLQLNNSQYDPKQKVLKDEQKIINWKTKALHGKFPHQLDQDHIDHNSSLSWLTRGNIFGETEGFMIAIQDQIIKTRNYSKFILKESIESDKCRLCHQVTETIDHITGGCSILAQKEYTHRHDNVAKHIHQQLALKHKLLDTYTPYYQYKPKNVLDNSSAKLYWDRDIITDRTILSNRPDITLTLKSTKTTYLIDIAVPNTHNLNQKHSEKIQKYIPLADEIKQMWHQETVRIVPIIISSTGVVPKTLKNALHLLDIHENTYLPLQKSIIIDTCSIVRRFLNPTSLTLQQQNEQHTASNTITQNALTHH

SEQ ID NO: 1229 - protein, 1336 aa, Eburuncus unifasciata
MRLRSRQIPQAGTCKGESRPGPINPGCPTYSGGGDASHSTTQHFTVVVNTPLSNISPHPSSPISSTNSLFQSPNSSLSSEVDSITSQINTLRPLSCNVAQDANANLPVSIIDNTNLTREPRKNNKSRVNTNYHSLLSNIDTPARSVLQEMLPATTLAGKCRQRMKWTDQINKVLLRCYYIVTNNETNLTAWRTLLYQSFIEKFPALSHLSEQRLADQIRVIHKHNRIPISERQLIKQTIITNNQTPEVNVTSTIDNIQPNTHVHNNVNTLTYATPPSQLASTTAQPHQVRDSQHTQFITDQINPNTEFLEPTENFENNHDKTLANLAAQKKIKDTFTEMLIKYSGTEPSRRPPIPKIQTTRYVIKTITCVNVILHDHLNNKDIINLEEIHSVIYCAAKTIATLHCKYMKSGISDSETNTNRSNVKKPQWKLRLESKITILRKEIGQLTQYIRGNLSQKKQNKLNPSNKSRDEILEQLDKCKQKMQAQSKRLRRYNISNQRKSHNSLFNTNQKLFFQKLNTEQIKITNIPDKHDLEEYWQNLWSKPVQHNTHSPWCLSEEKETTNIEPMSELKISKEDVTQAIRKTLNWKAPGPDKIQNYWIKYLPSTHIHIAKTLNYLINNPHEVPSFLTQGITYLKPKDDDTTNPSKYRPITCLPTMYKLLTSIITCKVNTHITHNDIIPEEQKGCRKGSKGCKEQLIIDSEIHNEVKQRRKTLHYSYIDYQKAFDSVPHSWLIHVLKIYKIDHKLIKFLEHAMKNWSTNLHLQTSETSLCTKPIKILRGLFQGDSLSPLWFCLALNPLSKILNETSNGYVIDRSSNIKISHLLYMDDIKLFAASRQQLDNLLTLTENFSTDIKMSFGTTKCKINSITKGQYKKADSFDLNMQGGKIDSMEEHETYKYLGYQQNTAISHTDIKSSLKVKYKQRLQKILKTQLSARNKVQAINTFAIPILTYSFGIIKWSDTELEALNTATRVASNKYNIHHIHSAVQRFTIKRKLGGRGFLDIKNLHYTQIENLRSYFLSKTNKHPLFKAIANLTHSGSPLHLNNKQFDPKAKILSDDQKIDAWKKKALHGRYPHQILQDHIDAKLSCTWLTKGNIFAETEGFLIAIQDQIIKTRNYSKYILKEALETDKCRLCHQTTETIDHITGGCSILANKEYTHRHDNVAKHIHQQLALKYKLLKSYTPYYQYKPKNVLENSIAKLYWDRDIITDRTILSNRPDITLTLKSSKITYLIDVAVPNTHNLKQKHTEKIQKYLSLADEIKQMWHQDSVRIIPVIISSTGVIPKTLKSALQLLDLPENTFIPLQKSIILDTCSIVRRFLNPTSLTLVTDDTLNTA

SEQ ID NO: 1230 - protein, 1268 aa, Agara michaeli
MPMTNGALVKNNNAMRLRNRQIPQAGTREGESRPGPSGSGCPAYSGGGIVSHSTTQSSTVVADKSPSHTISRPSSPKSSIHNRSHSSSSLICPKITTPLSKDVAQEAHANSPVPINDITSTTRAPDNNKLNRVHHETHTLTPNTNTPARSVLQDIFPATTLAGKSRQRMKWSNQINTELLRCYYIVTRNESNVTAWRSQLHQMFAERVPELNHLSEQRLADQIRVIHKNNRIPASERENIKHSVSLLISTPNSTTDQNITSNTVNQSNTTITHTATNHHSNTNSLYEHNSPHILTTTEPIDITPQVSQSLENREHNPQIQKSQITNKSLEYIEYNNLESTFMEMLIKFAGTDPTLRPTIPKIHITPVFVKTVNTTNKIIDKYLSTKDQITLTEIHEVIYCAALTIVTLYTKPIDILHNNTHDNSKATRKQRKPNWEKRIESKIKKFRKEIGQLTQYLNGNLNKKKQQKLDKNHKNQDEIIEKLDSNKQKLQAYSKRLRRYRKSNERKLQNKLFYNNQKVFYQKLNAEQIEITQPPNNMDIQDYWKNLWSKPVQHNTHSSWAEIERQEMENIHPMPEITIDIEDVTQAVRNTLNWKAPGLDKIQNYWIKYLTSTHKYIANTFNHLLHNPQETPSFLTQGITYLKPKDDDTTNPAKYRPITCLPTIYKLLTSIISNKLNTHITQNKIIPEEQKGCCKGSKGCKEQLVIDIEIHNQAKLKHRNLFFSYIDYQKAFDSIPHSWLIHILKIYKVDYKLINFLQHSMKNWTTILNLRTKNISLSTCPIKILRGIFQGDSLSPLWFCLALNPLSRILNKTDCGYVIDRDKNIKLTHLLYMDDIKIYAANRQQLDHLLKLTDKFSTDIKMAFGINKCKINSIIKGQHKNTQPYELQTQGGTIESMEAKETYKYLGYHQSTTINHTDIKETLKHKYNQRLKKILGTHLSARNKIKAVNTYAVPVLTYSFGVIKWSDTELEALNRATRTASSRHNIHHIHSAVERFTLKRKLGGRGFIDLKNLHYTQIDNLRTYFLLKANDSTLHKAIVNIPQPGTPLLLNNSQFDPKLKITNDEQKINNWKKKALHGKYPHQLEQDHVDQSASCTWLTKGNIFGETEGFLVAIQDQTVKTRNYCKYILKETIQTDKCRLCHQVTETIDHITGGCCVLANKEYTHRHDNVAKHIHQQLALKHKLLKEYTPYYQYKPKSVLENNMAKLYWNRDIVTDRTVLSNRPDITLSLKPSKTTYLIDISVPNTHNIKQKHTEKIQKYLNLADEIK

SEQ ID NO: 1231 - protein, 1357 aa, Racta chiria
MRLRNRVLPQAGTRMGESRPGPSGSGCPTYSGGGAVSLRSAQSSTVAAIITTSPPHYSTSPISSTHSLFRSPSSSPHSYEKHQSSRSTTLSPMSCDVAQDALANSLVSTADITIATRRLPNNTLNCVDHNIHSSPHDINSPARSVLQDMLPATTLAGKSRQRMKWTKEINIELLRCYYNITLCETDMTAWRPLLHRKFIEQFPELIHISEQRLSDQIRVIHRNNRIPAIDREHLKRTISLTLPSITNTEQEHDSSITDVHNIQEESIQVTSSIEKTHHTLQPTQSHAHEHQTFTPIHINRPLQNSEHLNTQESEPRNSADVRQIDNEEIKNIFTEMIIKYTGIDPTLRPTIPRLQTTRQMIKTVNTVNKLVDIHFTQYKDTITLVEVNEVIYCAAITVATLHAKHYAVSSSKNIDGQTLTTKSKIGKQKEPQWKRRIENKVTSLRREIGQLTQYLNGNLTQKKQYKLNPTNKSRQEIIDQLDTNKQKLQAQAKRLNRYKKSNQRKSDNILFANNQKIFYQKLDSEKKNTVIQKPDITEIQKYWESIWSKSVQHNAHTSWTKIEEREMENIEHMPEIIIDKEDVTHAIRRTLNWKAPGPDKIQNYWIKYLTSTHIHIANALNHIIRNPQEMPEFLTQGVTYLKPKDSETTDPAKYRPITCLPTTYKLLTSIITHKIHSHITKNKIIPEEQKGCSKGSMGCKEQLIIDAEIHNQVKVKKRNLYYSYIDYQKAFDSVPHSWLLHVLKIYKIDNSLIHFLKHAMTKWRTKLNLRTNTTTLSTSHIKISRGIFQGDSLSPLWFCLALNPLSRTLNNTNCGYTIDRENKVKLTHLLYMDDIKLFGSNKQELDHLLRLTEKFSTDIKMAFGTNKCKVNSITKGQYNKTDSFELELQGGKIESMEPKETYKYLGYQQSTSISHTDIKDKLKTKYKQRLHKLFSTQLSARNIVRAVNAYAIPVLTYSFGVIKWSDTELNALNTLTRTISNKHNIHHIHSALQRFTLKRQLGGRGFIDIRNLHYTQIYNLRTYFIRKAQDSTLHKAIVNMPHPGTPLQLHNNLFDPQTKIVKEEQKIESWKNKPLHGKYPHQLEQDHVDKNASTTWLTKGNIFSETEGFLIAIQDQVIKTRNYSKFILKEAIETDKCRLCHKYTESIDHITGGCSVLANKDYTHRHDNVAKYIHQQLALKYKLTDIHTPYYKYKPKNVLENNKVKLYWDRDIITDRTILSNRPDITLTLKSTKTTYLIDIAVPNTNNLKQKHTEKIQKYIPLADEIKQMWHQEIIKIVPIIISSTGIIPKTLHSALKILDLHPKTYIPLQKAIVIDTCSIVRRFLNPTSLTYTSSMQTNIHPTQNHHSLSSHHTNLE

SEQ ID NO: 1232 - protein, 1374 aa, Autochton zarex
MRLRNRQIPQAGTREGESRPGPSGSGCPTYSGGGNVSHKTAQSSTVAVDKPITPSHPSSPVSSTHSLFPSPSSSPYSYQFQPSSSSRSSTISPLSCVAAQDAHANSPVPSTDVTIPTRVIENNQLNRVNHIIHTPSHTTNTPSRSVLQDMLPATTLAGKSRQRMKWTDEINKELLRCYYIVTQNETNLTAWRPQLHRIFADNVPVLSHLSEQRLADQIRVIHKNNRISAPVREQIKQSVSFLISSSSNTVNNSSIARDNDDIDTTHSANNQLIIDSHNQTNNPEHTITITHRAVINTQTHQSTENSEHMQTHDSELVNRRLDSVDHQKIENVFREMLIKYTGTDPTLRPHISKPQTTRNFIKTVNSVNEIIGKYLQTKDSITIEDINIVIYCAAQTVIKIHTNSVKTLENSTKSYNSNQRKPQWEKRIENKIITLRKEIGQLTQYLNGNLSQKKQKKLNPNNRSRDEIIEQLDNSKQKLQAYTKRLRRYKKSNERKSHNKLFNTNQKLFYQKLNTEQIHITQPPDKIDIQNYWKNIWSHPVQHNTHTSWTEIEEQEMEDIDPMSEITVNKDDVSVAIKKTLNWKAPGPDKIQNYWIKYLPAVHEHIANAFNHILCNPQDTPYFLTQGITYLKPKDDDTTNPAKYRPITCLPTIYKLLTSIIAHKLNTHITRNHIIPEEQKGCCKGSKGCKEQLVIDTEIHTQVKQKHRNLYYSYIDYQKAFDSIPHSWLIHILKIYKVDISLIKFLQHTMKNWNTKLTLHTNNISLSTQKIKILRGIFQGDSLSPLWFCLALNPLSRILNKTGYGYVIDKDTNIKLTHLLYMDDIKLYAANRKQLDHLLKLTENFSTDIKMTFGINKCKINSIIKGQHQKTDPFQLETLGGTIDSMEFRETYKYLGYQQSISINHTEIKNTLKTKYKQRLHKIFNTQLSARNKIKAVNTYAVPILTYSFGIVKWSDTELEALNTATRTISHKHNIHHIHSAVQRFTLKRRLGGRGFIDIKNLHYTQIDNLRSYFVLKSNESALHKTIVHLAQAGTPLQLNNKQFDPKLKIVTDDQKIENWKQKALHGKYPHQLAQDHIDYNASCTWLTKGNIFGETEGFLVAIQDQIIKTRNYAKYILKEAIDTDKCRLCHQNTETIDHITGGCGVLANKEYTHRHDNVAKHIHQQLALKHKLLESYTPYYQYKPKNVLENNTAKLYWDRDIITDRTILSNRPDITLTLKSSKTTFLIDIAVPNTHNLKQKHTEKIQKYIPLADEIKQMWHQETVKIIPVIISSTGVIPKTLKSALKLLDLHENTYIPMQKSIVIDTCSIVRRFLNPTSLTLQTHHVTHCGTSNQDSSPLDIIQNTQTHTHNTTNTLIIPHPNHTNTLESGHLA

SEQ ID NO: 1233 - protein, 1210 aa, Euriphellus phraxanor
MLPATTLAGRSRQRMKWTNEINKELLRCYYVVTHNETNLTAWRPLLHQRFSETVPELSHLSEQRLADQIRVIHKNNRIPVQEREEIKQSVSLQIGTIYETNDICDTNDIVLEPISSTTHITCSHELDRSNQILNHQYTLTTVQQPNTQTYLPFDSSEHNHTQDSETINRSSIPIEYKKIENTFEEMLLKYTGTDPTLRPTIPKLHVTTNIIRTINAVNEIIDINLKAKSAISLEEVHEVIYCAAQTVIKIHTKHTNKVENKTNGNSNSMFKQRKPQWERRIENKIGILRQEIGQLTQYLKGNLTQKKQQKLNPNKKSKDEITVQLDSSKQKLQAYSKRLRRYKISNQRKSHNKLFNTNQKLFYKKLNADQIQITQTPDKDSIEKYWKNVWSKPVQHNEHTSWTEIEKQEMENIDSMPEITIIKDDISQAIRKSLNWKAPGPDKIQNYWIKYLPATHVYLANIFNHLINNPQDTPPFLTQGITYLKPKDNDTTNVAKYRPITCLPTIYKLLTSIIAYKLNTHITKNKIISEEQKGCCKGSRGCKEQLVIDTEIHNQVKQKHRNLYYAYIDYQKAFDSIPHSWLIDILKIYKVDYRLINFLQNSMKNWTTKLSLHTNNASIFTNPIKIARGIFQGDSLSPLWFCLAINPLSRILNKTGYGYVIDSDSKTKLTHLLYMDDIKLYAADRQQIDNLLKLTEHFSTDIKMTFGTNKCKINSIIKGQQKKTDPFELEMQGTTIASMDAKEMYKYLGYKQNTAINHTHIKDTLRTKYKQRIHKILNTQLSARNKVKAINTYAIPIITYSFGIIKWSDTELEALNTITRTASNRHNIHHIHSAVQRFTLRRKLGGRGFTDIKNLHYIQINNLRTYFLTKANESTLHKAIVEIPQSGTPLQLNNNQFDPKNKILKDDHKIENWKKKALHGKYPHQLEQDHIDYNASCAWLTKGNIFGETEGFLVAIQDQVVKTRNYSKYILKESIRTDKCRLCHQTTETIDHITGACSILANKEYTHRHDNVAKHIHQQLALKHKLLTTYTPYYQYKPKQVIENSTAKLYWDRDIITDRTILSNRPDITLTLKDSKTTYLIDIAVPNTHNLKQKHTEKFQKYIPLADEIKQMWHQETVRIVPIIISSTGVIPKTLKTALKLLDLHENTYIPIQKSIVIDTCSIVRRFLNPTTLTLQNNQNTNTTTQNTSTHTTTNTLVTHPHAQHTHTHT

SEQ ID NO: 1234 - protein, 1303 aa, Ectomis labriaris
MRLRNRQIPQAGTREGESRPGPSSSGCPTYSGGGNVSHKIAQPNAVAIDKSHNSSHRSSPTTSSTHSLFPSPSSSPYSYQFHSSSSSPSRSNIITPRSCDVVQGARMTTPVPITDTINPTRVTENNPSYRVSHNTEQTTHITNTPVRSVLQDMLPATTLAGKIRQRMKWTDEINKELLRCYYIVTQNETNLTAWRPQLRQRFVASIPELNHLTEQRLADQIRVIHRNNRISTSEREQIKQSILALMSLSNTQIHHTTTDNVEVTSTVRITPPNNNLQQSPESLTLNQHVIINTTTPLCEPILNSEHIQAQYIETSKTLTEPIDCEAIENIFKEMLIKYSGIDPILKPTIPKIQITRNVIKTVNAINQIIALYLQTKDTITLEDIHEAIYCAAQTVTTLHCKKSKNFENDSPDNKSHVNSSRRIPQWERRIQNKITVLRKEIGQLTQYLNGNLTQKKQQKLNPNNINNKNELVEQLDKNKQKLQAYSKRLRRYKISNERKSHNKLFNTNQKLFYQKLNSEQIQVIQSPHEDAIQNYWESVWSHSVQHNRHAPWTKIEEQEMENINPMPQIIIDKDDVSQAIKKTLNWKAPGPDKIHNYWIKYFSATHQYIANTFNHLICNPQETPSFLTQGITYLKPKDNDTTNPAKYRPITCLPTIYKLLTSIISYKLNTHITQNHIIPEEQKGCCKGSRGCKEQLIIDTAIHNQVKDKHRNMYFSYIDYQKAFDSIPHSWLLHVLKIYKVDDRLVQFLEHTMKNWITKLSLRTVNTSICTKNIRILRGIFQGDSLSPLWFCLALNPLSRILNNTDFGYVINRDTNIKLTHLLYMDDIKLYASNRQQLENLLRLTENFSRDIKMTFGTDKCKINSIIKGQYKQTDPYKLQTQQGIIDKMEHQETYKYLGYKQSTSINHTDIKAELKTKYKQRLHKILNTQLSGRNKVKAVNMYAVPILSYSFGIIKWSDTELDALNMISRTSSNAHKIHHIHSAVQRFTLKRRLGGRGFIDIKNLHYTQIDNLRTYFLTKAKESSLHKAIVNLPQSYSPLQLNNSEFNPKLKIISDDRKIEDWKKKALHGKYPNQLHQKHIDSNASCTWLTKGNIFAETEGFLVAIQDQIIKTRNYSKYILKESIEDDKCRLCHQTTESIDHITGGCSALANKEYTYRHDNVAKHIHQQLALKYKLLDTYTPYYEYKPKNVLENNTTKLYWNREITTDRTILSNRPDITLTLKHCKSTFLIDIAVPNTHNLTQKHTEKIQKYIPLADEIKQMWHQESVKIVPIIISSTGVVPNSLKTAFKKPFHSSVCLMLHC

SEQ ID NO: 1235 - protein, 1349 aa, Autochton oryx
MRLRNRQIPQAGTREGESRPGPSSSGCPTYSGGGNVSHKTAQSHTVVVERSPSYITSHSLSPISSTQSLFQSPNSSPYSNQFSHSSSRSPSTTPLLCDVAQEAYAHSPVPTTDSINRTRVPQNNLRNRVNHNTHSLSPNTNTPARSVLQDMLPSTTLAGKCRKRMKWTDHINKELLRCYYTVTHNETNLTAWRPQLHQKFAEIFPELGHLSEQRLADQIRVIHRNNRITVSERQLIKQSVSLLLPTSHRTNDCIITSNIESPLNTPLAFTHSSSQTLNPQQAFSSDHPLSYTNSQQSNTTHTENSEHHHTQNSESINKQLGPISYNKIENTFVEMVVKYTGTDPTLRPMIPKLETTRNTITTVNTVNEIVGIHLSSKNSVTLEEIHEVIYCAAQTIATLHTKHIKKTENTKKNNSTNTIITQKKAQWEVRIEKKITTLRKEIGQLTQYLNGNLSQKKEHKLNPNNRNRNEIIEQLDNNKQKLQAYSKRLRRYKISNQRKSDNRLFTTNQKLFYQKLDTEQIKISQNPNKDDVYNYWKNIWSKPVLHNTYSPWTEIEDQEIENIAPMSTIFVHKDDVSQAIKKTLNWKAPGPDKIQNYWIKYLPATHVYIARTFNHIINNPQDRPGFLTQGVTYLKPKDNDTTNPAKYRPITCLPTIYKLLTSIISHKLNTHITQNHIIPEEQKGCSKGSRGCKEQLIIDTEIHNQVRQKHRNLYYAYIDYQKAFDSIPHSWLIQILKIYKIDVTLINFLQDTMKHWTTKVTIRTDNTTICTHPIKILRGIFQGDSLSPLWFCLAINPLSRILNKTGYGYVIDRETNIRLTHLLYMDDIKLFATNRQQIDHLLQLTENFSTDIKMSFGTNKCKINSIIKGQQKETDHFELQTQGGTIDSMEPKETYKYLGYHQGTSINHTHIKNTLKTKYKQRLHKILNTQLSGRNKVKAVNTFAIPILTYSFGIIKWSDTELESLNTITRTASHRHNIHHIHSAVQRFTLKRQLGGRGFIDIKNLHYTQIDNLRTYFITKAKESNLHKAITHLSQSGTPLQLNNSEFDPKLKIVNDAQKMENWKRKALHGKYPHQLEQDHIDGIASCSWLTKGNIFGETEGFLVAIQDQTIKTRNYSKYILKETIDTDKCRLCHQSTETIDHITGGCSALANKEYTHRHNNVAKHVHQHLALKHNLLESYTPYYQYKPKPVLENKIAKLYWDRDIITDRTILSNRPDITLTLKSSKTTFLIDISVPNSHNLKQKHTEKIQKYIPLADEIKQMWHQESVRIVPIIISSTGVIPKTLKTALKLLDLHENTYIPMQKSIVIDTCSIVRRFLNPTTLTLQTNQDTHNNSQQTNTYTTITHSTT

SEQ ID NO: 1236 - protein, 955 aa, Grais stigmaticus
MLIKYTGTDPTLRPTIPKLQTTRNIIKAVNTMNEIIDKHLQSKGTTTLEEIHEVIYCAAQTITAIYTSKTNNSKNKDNITSGYISIQKKPQWERRIENKITLLRKEIGQLTQYLKENLTQKKQQKINPDNKSRDEITDILDNKKQKLQAQSKRLRRYKISNQRKSQNQMFNTNQKLFYQKLSTEHIQITQPPTKDDIQNYWKNVWSKPVQHNTYSSWTETEEQEMADTHTMPQITIDTDDVSQAIRKTLNWKAPGPDKIQNYWIKYFSATHKYIASIFNHLIHNPQETPSFLTHGVTYLKPKDNDTTNPAKYRPITCLPTIYKLLTSIISHKLNSHITQNQIIPEEQKGCRKGSKGCKEQLVIDTEIHNQVKVKHRNLFYSYIDYQKAFDSVPHSWLIHILKIYKVDNILIEFLQHTMKNWSTKLNLRTCKTSLCTNSIKISRGIFQGDSLSPLWFCLALNPLSKILNKSGYGYVIDRDNNIKITHLLYMDDIKLYAATRQQLNHLLRLTENFSTDIKMTFGTNKCKINSIVKGQHKEIEPFDLNTQGGKIDSMEPKETYKYLGYHQSISINHTEIKNLLKTKYKQRLHTILNTQLSARNKIKAINTYAIPILTYSFGVIKWSDTELEALNTTTRTASHKHNIHHIHSAVQRFTLKRKLGGRGFIDIKNLHYTQIDNLRTYFLLKANENSLHKAIVNLSQAASPLQLNNSQYDPKLKIIKDEQKLNNWKNKALHGKYPHQLDQEHIDRNASCTWLTKGNIFGETEGFLIAIQDQIIKTRNYSKFILKESIETDKCRLCHQTTESIDHITGGCSILAIKDYTHRHNNVAKHIHQQLALKYKLITSYTPYYQYKPKNVIENSTAKLYWDRDIITDRTILSNRPDITLTLKSLKTTYLIDISVPNTNNLKQKHTEKIQKYIPLADEIKQMWHQENVKIIPIIISSTGVIPKTLKTALK

SEQ ID NO: 1237 - protein, 791 aa, Camptopleura auxo
MPVVLIDKDDISQSIRKTLNWKSPGPDKIQNYWIKYFTATHTHIAKIFNNLVQNPHETPSFLTHGITYLKPKDNDTTNPAKYRPITCLPTIYKLLTSIITHKLNTHITLNKIIPEEQKGCSKGSRGCKEQLVIDTEIHNQVKQKHRNLFYSYIDYKKAFDSIPHSWLIYILKIYKVDKTLINFLQHLMSSWNTKINLRTSDKVICTPSIKISRGIFQGDSLSPLWFCLALNPLSKILNKTNYGYIIDRENNIKLSHLLYMDDIKIYAASRRELDHLLKITENFSTDIRMALGTDKCKINSIIKGQHSETDGFVLNKQGGTIDGMDPTETYKYLGYYQSSSLNHTDIKNTLKIKYKQRLNKILGTQLSARNKSKAVNTYAIPILTYSFGIVKWSDTELEALNTTTRTVSNKHNIHHIHSSIHRFTLQRKLGGRGFIDIKNLHYKQVDNLRTYFLTKAQVSVLHQAIVNIPQSGTPLQLSNKYFNPKLKILTDEQKLEHWKKKALHGKFPNTLQQDHVDRDASCTWLTKGNIFGETEGFLIAIQDQIIKTRNYSKFILKEAINSDKCRLCNQAPENIDHITGGCNILANKEYTHRHDNVAKHIHQQLALKHNLINSYTPYYQYKPKNVIENNTAKLYWDRDIITDRTILSNRPDIILSLKPSKTTYLIDISVPNTHNLKQKHTEKIQKYINLADEIKQMWHQESVRIVPIIISSTGVVPKTLKSALKLLDLHENTYIPLQKSIVIDTCSIVRRFLNPTSLTLQNNSHPDSNALIHHSPLPALTITHNTSNAHP

SEQ ID NO: 1238 - protein, 1328 aa, Aricia agestis
MRLRNRNIPQAGTGAESKGESRPGPSGPGSPSYSGGDTVPHTSVQSNTVTDNIVPRKSTIQSYPSSPTSSISLFSSPSSSPKSYKFDTNSSSSRSHTLSPMSEDAARVASAIYPASTSDITLSTSTLQNNLPHLVDHNIPQSHLSNTPTRSVLQDMLPPTTLAGKCRQRMKWTDLINKELLRCYYIVTSCETNLTSFRPLLHQKFIESFPELSHISEQRLADQIRVIHRNNRIPAHVREQIKQSVSETFEESNSQNTLQDITSQTSLVCNIQTNSQRLIDDSSSSHTATLISHPPLTLPTPSDIIEHVVMLDSDDTIPSIDPNPTDNQKIEDIFKETLIKYAGTDPSLRPIIPKLQVTRNIIKTVNVLNKIISKHLEEKVTPDIDEIHSTIYCAALTTTTLHTTTKLINPSEQNKTLKTTDYIPKWQLRIENRIKNLRKEIGQLTQYLSGNLNAKKRQKINPKNYTTDQLVDQLDKLKQMLQAHSKRLRRLKISNDRRRHNTLFLNNQKVFYQNLNSENIKIIQPPNIEEVKTYWESIWSKPAQHNDQASWIASETQEYQNINIMPEIIINKEDVTYAIKKTLNWKAPGPDKIHNYWIKYFSATHHYIANIFNYFIQDPQTIPAFLTQGITYLKPKDNDTTNPTKYRPITCLPTLYKLLTSIITQKLNTHIIQNKIIPEEQKGCTKGSMGCKEQVIIDTEIHNQAKQKRRNLYYSYIDYQKAFDSVPHSWLIHVLKIYKVDIKLINFLQYLMSTWSTRLTLRTNEENLCISPIKIKRGIFQGDSLSPLWFCIALNPLSKILSKSCHGYTLDKLNNIKVTHLLYMDDLKLYASDRQQLEHLLKITEKFSTDIKMKFGIEKCKINCINKGHHTQTEPLNLEFQEGMIDSMQAIDTYKYLGYIQSITINHKEIKNTLKSKYKQRLNKILATQLSGRNKIKAINTYAIPILTYSFGIIKWTDTELETLNTTTRMLCYKRNIHHIHSAVERFTLKRKLGGRGIIDIKNLHYSQIDNLRTYFLNKAKTSQLHKAIANLPHKGTPLQLNNDLFNVKHKILKDADKIQKWKSKALHGKYPHHLEQDHVDQIASCSWLTRGNIYSETEGFLIAIQDQIIKTRNYSKYILKESIDTDKCRLCHLTTETIDHITGGCSALANKGYTHRHDNAAKHIHQLLAIKYKLIDSHTPYYKYKPQNVLENSNVRLYWDRDIVTDRTILSNRPDITLTIKPEKTTYLIDIAVPNTNNLKQKHNEKIQKYIPLADEIKQMWHQEAVKIIPIIISSTGVIPKTLAASLKTLDLHKNTYIQMQKSIIIDTCSLVRRFLNPSSSFLTPQS

SEQ ID NO: 1239 - protein, 1418 aa, Epargyreus clarus
MPREGRTLDSTLLHNPSDQRSNSIQKYAMRLRNRQIPQAGTREGESRPEPSGSGCPTYSEGGNVSHKTAQSRTVAVDSQSHITSHSSSPISSTHSLFQSPSSSPRSYEFQHSSSTSTTTTPLSCDVAQEAHAISPVPTTGIINPTRVPQNDVQNRVNHNTHSLSPITNTPARSVLQDMLPATTLAGKSRQRMKWTGQINRELLRCYYVVTHNETNLTAWRPQLHQKFAESFPELSHLSEQRLADQIRVIHRNNRLTFLEREHIKQSVSLLLSAANRLNDCTTINNIQTPSNTSPTINNLELTTHSPSQALNPQHTHTLNHSHSQHPYTHSPPTNTPRHTSQAPENSEHSQTQEPQRTVEPLDSIDFDTIENTFAEMLIKYTGTDPTLRPPIPKLQTTRYTIRTIATVNEIVDTHLNTKNSVTLEEIHTVIYCAALTAATLHTKHFNKSVNNNNNYNSHTIIKQKKPQWEARIGKKIISLRKEIGQLTQYLNGNLTQKKEKKLNPNNRSRSEIIEQLDNNKQKLQAYSKRLRRYKISNQRKSHNKLFNTNQKLFYQKLDTENIQVTQNPNKDDIHNYWKNIWSKPVLHNTHLSWTEIEDEEIDNIEPMAQIIIDKDDVCQAIKKTLNWKAPGPDKIQNYWIKYLPATHKYIANTFNYLMNNPQDTPTFLTQGITYLKPKDNDTTNPSKYRPITCLPTIYKLLTSIISFKLNTHITQNHIIPEEQKGCSKGSRGCKEQLIIDTEIHNQVKHKHRNLYYAYIDYQKAFDSIPHSWLIQVLRIYKVDIRLIEFLRNTMNNWTTKLSLRTNNTSISTQPLKILRGIFQGDSLSPLWFCLAINPLSRILNKTGYGYVIDRESNIRLTHLLYMDDIKLYASSRQQIDHLLKLTENFSTDIKMTFGTNKCKINSIIKGQQKETDPFELQTQGGRIDSMEPKETYKYLGYQQSTSINHTHIKNTLKTNYKQRLHKILNTQLSAKNKVKAINTYAIPILTYSFGIIKWSDTELEALNTITRKASNTHNIHHIHSAIQRFTLKRKLGGRGFTDIKNLHYTQIDNLRTYFLTKAKESDLHKAIVHLNISGTPLQLNNSEFDPKHKILKDEQKIENWKKKALHGKYPHQLEQDHIDCNASCTWLTKGNIFGETEGFLVAIQDQIIKTRNYSKYILKEAIDTDRCRLCHQTTETIDHITGGCSVLANKEYTHRHDNVAKHIHQQLALKHKLLESYTPYYQYKPKNVLENNTTKLYWDRDIITDRTILSNRPDITLTLKSTKTTFLIDIAVSNTHNLKQKHTEKIQKYIPLADEIKQMWHQETVRIIPIVISSTGVIPKTLKTALKLLDLHENTYIPMQKSIVIDTCSIVRRFLNPSTLTLQTHQDTFHNTATQNTSTRTTTHNTQTNIHNTLNTLITTHSNHTNTRESGYLA

SEQ ID NO: 1240 - protein, 1315 aa, Hypophylla argenissa
MRLRSRVIPQAGTCEGESRPEPHSSGCPTYSGGGNVSLPSAQSSIVAANNNSLTSPPHNDPHLSSPISSSQILFPSPTSSQNSFDLQHSSSSPSTNASPLSCDVAREALAYTLVPIADTTIPTREIITNSLNRVEPHTPPSILNIETPGRSVLQDMLPATTLSGKSRQRMKWTDNVNKELLRCYYIATNCETNLTAYRPLLHSKFVETFPELNHITEQRLADQIRVIYKNNRVTLSERERIKQLVSHMISSQDCHQTNNNHTTEIQYTTYALSNQQPVIELATELETSEYSLDTDIQQRNFPIAIESVEHNITQTLNTQNSTRSRDVINYEKIESTFNEMLIKYRGTDPIFRPALPKLKITQHTIRSVNTVNDLLYKYLQAKETYTLEEIHEIIYSAALTITTIHITQGIKSNNNTTHMYKDTISRQTQNSWKKRIENKIEGFRKEIGQLTQYLKGNLSQRKQHKINPHNKNTDEIADQLDEKKQKLQAYSKRLRRYKLSNQRKSDNNLFQANQKLFYQKLNSERIQITQPPDMDSFETYWKNLWSKQVQHNTHSSWVEVEEQEMGQIDPMPNITIDEEDIRKSIKKTLNWKAPGPDKIQNYWIKYLTATHKYIATTLNDLIHNPHKIPSFFTQGITYLKPKDHDTTNPSKYRPITCLPTIYKLLTSIITDKLNSHISLHNIISEEQKGCCKGSRGCKEQLVIDTEIHNQVKLKHRNLFYSYIDYQKAFDSVPHSWLIQILKIYKVDNQIIQFLEYAMTKWTTKLNLRTTDSSLCSHLIKITRGIFQGDSLSPLWFCLALNPLSRLLNRTDHGYKIDRERNIKITHLLYMDDIKLYAASRQQLDELLRLTEQFSKDIKMTFGTDKCKINSIVKGKHQLTDSFNLELHEGLIESMEPKDTYKYLGYYQGTTINHSDIRNLLKTKYKQRLIKILNTQLSARNKTKAINTYAVPILTYSFGVVKWTDTELNALNRLTRTLSYKHNIHHIHSSVERFTLKRTFGGRGFIDIRNLYYSQIHNLRTYFFTKSNESILHSAITNLSHSGTSLQLNNRLFDPTLKMTQDSQKINYWKQKALHGKYPHQLDQDHVDRNASCSWLTKGNIFGETEGFLVAIQDQIIKTRNYSKYILKEVIETDKCRLCHQYTETIDHITGGCSILAQKEYTHRHDNVAKHIHQQLALKYKLVDQYTPYYKYKPKNVMENNTTKLYWNRDIITDRTILSNRPDITLTLKPSKTTYLIDVSIPNTHNLKQKHTEKIQKYISLADEIKQMWHQETVRIVPVIISSTGIIPKTLSNALKLLDLHKNTYVPLQKSVVIDT

SEQ ID NO: 1241 - protein, 1403 aa, Mysoria xanthippe
MLHNPNGKRSNSTYKYAMRLRNRQIPQAGTLRGESRPEPSSSGSPTYSGEGNASHMTTQFGTVVVDDSTSHMTSSLSHPPALSHSSASSHPSSPSHPSSPSHPSSPSRPSSPSHPSLPSHPSSPSHPSSPSYTNTLSSRCVAQEAIAIPSVPTTDVINPTRVIQNNTDNRVIHNPHSPNSHNNNTPTRSVLREIFPATTLAGKRRQRMKWTEDINKELLRCYYIVTNKQTNHTAWRSLLHQKFSESLPELNYLTEQRLADQIRVIHKNNRIPAIEREYIKNSITPSNCNNQLNLTHPTTIQNPPTHESHHSSKEMSKTQNTEITILNTDTITDIHHSYNNTEYVESQNIEATNKDQIEYKKLENMFNEMLIKYSGTDPTLRPTIPKLQITRNVIKSVNTINEILHKHLQTKNTIILEDIHEVIYCAAQAITSIHTEHINKVDNNTDNPNRHGNKVKKPQWERRLENKITTLRKEIGQITQFLKGKLTQKKQRRINPSNRSNDEITEQLDTNKQKLQALSKRLRRYKISNKRKAHNILFNNNQKLFYQKLNEEHVETILPPNKDEVQKYWENLWSKPVHHNTHAPWTKIEEQETANVNHMPVILINKDDVSQAIRKTLNWKAPGPDKIQNYWIKYLSATHQYIANTFNHILNNPQETPYFLTQGVTYLKPKDKDTSNPAKYRPITCLPTIYKLLTSIISHKLDIHIHRNHIIPEEQKGCSKGTKGCKEQLIIDTEIHNQVKQTHRNLFYSYIDYQKAFDSIPHSWLIHILKIYKVDDKLIQFLEHTIKNWTTKLNLRTNTNSFSTQAIQISRGIFQGDSLSPLWFCLALNPLSRILNNSEYGYVVDRENNTKITHLLYMDDIKLYAANRQQLDHLLRLTENFSADIKMSFGTKKCKINSIVRGQYKQTDPFDLTIQREKIDSMEPKETYKYLGYQQSTSISHKDIKNTLKTKYKQRLHQIFNTHLSARNKTKAVNAYAIPVLTYSFGVIKWSDTELEALNTLTRTAANKYNIHHIHSAVQRFTLRRKLGGRGFLDIKNLHYTQIDNLRTYFLTKANENTLIRAITKLPQTGTPLQLNNTQFNPRLKIVKEEQKIINWKQKSLHGKYPYQLELEHVDRKASCSWLTKGNIFAETEGFLIAIQDQIIKTRNYSKYIIKEKIETDKCRLCHQTTETIDHITGGCSMLAQKEYTHRHDNVAKHIHQQLALKHKLLESYTPYYQYKPKNVLENSTAKLYWNRDIITDRTIHSNRPDITLTLKSSKTTFLIDTAVPNTNNIKQKHTEKVQKYIPLAEEIKQMWHQEIVKIIPIIISSTGVIPKNLKNALQHLDLHENIYIPLQKSVIIDTCSIVRRFLNPTTLSLQQEAQHNHPNSTIINHIQVSSKSSTHSSQQTDQTTHNTTHTTRNT

SEQ ID NO: 1242 - protein, 1352 aa, Helias cama
MRLRSRYIPQAGTSLPREGESGPEPSSSGCPTYSGGGNVAHMAAQLSAVAVDKSPPSHSPIHSSSPISSTQSLFPSPNSSSQSYKLHESSSSYSSSTSPMSCAVVQEASAILPGPTTDITNPTRASQNNRNTRVHHTAYSSSSNITTPARSVLQDMLPATTLAGKSRQRMKWSESINRELLRSYYIVTHNETDLTAWRPLLREHFIANFPELNHISEQRLADQIRVIHRNNRIPFIERENIKQLVSSQLPTTSNLHSHNNDTQSITASSIINPQINTNNVHQAINSQNTQTMVPTQVDLNWEHVHTQIPETINNSQYSLDYQHIENTFTEMLIKYTGSDPTLRPAIPKLQVSRKTIKTVTTVNEIIKKILQNKETITLVEIHDIIYCAAKTITLLHTKRQDKKESAVEEDGSKKINIHRKPLWETRIENNISTLRKEIGQLTQYLNGNLTLKKQQKINKKLSSRDNIIEQLDKSKQKLLAYSKRLRRYKISNQRKSHNKLFDANQKLFYQKLNTDCINITHPPHTDDIQNYWKNIWSRPVQHNTNTLWADIEQEETENVRSMPVVLIDKDDVSQAIRKTLNWKAPGPDKIQNYWIKYFTATHAHFANIFNNLIKNPHETPPFLTHGVTYLKPKDIDTTNPSKYRPITCLPTIYKLLTSIITQKLNTHITLNKIIPEEQKGCTKGSRGCKEQLVIDTEIHNQVKQKHRNLFYSYIDYQKAFDSIPHSWLIYILKVYKVDNVLIDFLEHLMNNWNTKINLRTSDKVICTQSIKILRGIFQGDSLSPLWFCLALNPLSKILNKTNYGYIIDRENNIKLTHLLYMDDIKIYAASRHELDHLLKITEKFSTDIKMALGTDKCKINSIIKGQYRETDGFALKIQGGTIDGMDPAETYKYLGYHQSSSLNHTEIKNTLKIKYKQRLNKIFSTQLSARNKTKAVNTYAIPILTYSFGIIKWSDTELEALNTTTRTVSNKHNIHHIHSSIHRFTLQRKHGGRGFIDIKNLHYTQVDNLRTYFLKKAQVSALHKVIVNIPQSGTPLQLNNKQFNPKLKILTDDQKLEHWKKKALHGKFPNILQQDHVDRDASCTWLTKGNIFGETEGFLIAIQDQIIKTRNYSKFILKEAIDSDKCRLCNQATENIDHITGGCNILANKEYTHRHDNVAKHIHQQLALKHNLINSYTPYYQYKPKNVIENNIAKLYWDRDVITDRTVLSNRPDIILTLKSSKTTYLIDVSVPNTHNLKQKHTEKIQKYINLADEIKQMWHQESVRIVPIIISSTGVVPKTLKSALKLLDLHENTYIPLQKSIVIDTCSIVRRFLNPTTLTLQNNSHPDPNPPTRHSYPPDFTYIHTSSNTHP

SEQ ID NO: 1243 - protein, 1373 aa, Mysoria catomelaena
MRLRNRQIPQAGTLGGESRPEPSSSGSPTYSGEGNASHMTTQFGTVVVNDSTSHITSSLSHPPATSHSSASSHPSPPSHPSSSSHPSSSSHPSSSSHPSSPSHPSSPSHTNTPSSHCVAQEALAIPRVPTTDVINPTRVIQNNTDNRVNHNSHSPNSPNNNTPTRSVLREIFPATTLAGKRRQRMKWTEEINKELLRCYYIVTKKETNLTAWRSLLHQKFSENLPELNYLTEQRLADQIRVIHKNNRIPAIEREYIKNSIILSTPISNSQLNSTSETTHPTTIHNPPIHESHHSSKEMSMTQNTQIIVQNTDTITDIHQSCNNTEYVESQNIKATNKDQIEYKKLENMFNEMLIKYSGTDPTLRPTIPKLQITRNVIKSVNTINEIIHKHLQTKNTIILEDIHEVIYCAAQAVTSIHTEHINKVDNNTDNPNRRGNKVKIPQWERRVENKITTLRKEIGQITQFLKGNLTQKKQRRINPSNRNNDDIIEQLDTNKQKLQALSKRLRRYKISNQRKAHNILFNNNQKLFYQKLNEEHVETALPPNKDEVQKYWENLWSKPVHHNTHAPWTKIVEQETANVSHMPVILINKDDVSQAIRKTLNWKAPGPDKIQNYWIKYLSATHQYIANSFNHILNNPKETPYFLTQGVTYLKPKDKDTSNPDKYRPITCLPTIYKLLTSIISHKLDIHIHRNHIIPEEQKGCSKGTKGCKEQLIIDTEIHNQVKQTHRNLFYSYIDYQKAFDSIPHSWLIHILKIYKVDDKLIQFLEHTIKNWTTKLNLRTNTISFSTQAIKISRGIFQGDSLSPLWFCLALNPLSRILNNSEYGYVVDRESNTKITHLLYMDDIKLYAANRQQLDHLLRLTENFSADIKMSFGTKKCKINSIVRGQYKQTDPFDLTIQREKIDSMEPKETYKYLGYQQSTSISHKDIKNTLKTKYKQRLHQVFNTHLSARNKTKAVNAYAIPVLTYSFGVIKWSDTELEALNTLTRTAANKYNIHHIHSAVQRFTLRRKLGGRGFLDIKNLHYTQIDNLRTYFLTKANENTLIRAITNLPQAGTPLQLNNTQFNPRLKIIKEEQKINNWKQKSLHGKYPYQLELEHVDRKASCSWLTKGNIFAETEGFLIAIQDQIIKTRNYSKYIIKEKIVTDKCRLCHQTTETIDHITGGCSMLAQKEYIHRHDNVAKHIHQQLALKHKLLESYTPYYQYKPKNVLENSTAKLYWNRDIITDRTIHSNRPDITLTLKSSKTTFLIDTAIPNTNNIKQKHTEKVQKYIPLAEEIKLMWHQEVVKIIPIIISSTGVIPKNLKSALQHLDLHENTYIPLQKSVIIDTCSIVRRFLNPTTLSLQQEAQHNHHNSTIINHIQVSSNSSTHSSQQTD

SEQ ID NO: 1244 - protein, 1391 aa, Metardaris cosinga
MLHNPNGKRSNSTYIYAMRLRNRQIPQAGTLRGESRPEPSSSGSPTYSGEGNASHMTTQFGTVVVDDSTSHMTSSLSHPPALSHSSASSHPSSPSHPSSPSHPSSPSHPTSPSHPSSPSYTNTPSSRCVAQEAIAILSVPTTDVINPTRVIQNNTDNRVIHNPHSPNSHNNNTPTRSVLREIFPATTLAGKRRQRMKWTEDINKELLRCYYIVTNKQTNHTAWRSLLHQKFSESLPELNYLTEQRLADQIRVIHKNNRIPAIEREYIKNSITPSNCNNQLNLTHPTTIQNPPTHESHHSSKEMSKTQNTEITILNTDTITDIHHSYNNTEYVESQNIEATNKDQIEYKKLENMFNEMLIKYSGTDPTLRPTIPKLQITRNVIKSVNTINEIIHKHLQTKNTIILEDIHEVIYCAAQAITSIHTEHINKVDNNTDNPNRHGNKVKKPQWERRLENKITTLRKEIGQITQFLKGNLTQKKQRRINPSNRSNDEITEQLDTNKQKLQALSKRLRRYKISNQRKAHNILFNNNQKLFYQKLNEEHVETILPPNKDEVQKYWENLWSKPVHHNTHAPWTKIEEQETANVNHMPVILINKDDVSQAIRKTLNWKAPGPDKIQNYWIKYLSATHQYIANTFNHILNNPQETPYFLTQGVTYLKPKDKDTSNPAKYRPITCLPTIYKLLTSIISHKLDIHIHRNHIIPEEQKGCSKGTKGCKEQLIIDTEIHNQVKQTHRNLFYSYIDYQKAFDSIPHSWLIHILKIYKVDDKLIQFLEHTIKNWTTKLNLRTNTISFSTQAIQISRGIFQGDSLSPLWFCLALNPLSRILNNSEYGYVVDRENNTKITHLLYMDDIKLYAANRQQLDHLLRLTENFSADIKMSFGTKKCKINSIVRGQYKQTDPFDLTIQREKIDSMEPKETYKYLGYQQSTSISHKDIKNTLKTKYKQRLHQIFNTHLSARNKTKAVNAYAIPVLTYSFGVIKWSDTELEALNTLTRTAANKYNIHHIHSAVQRFTLRRKLGGRGFLDIKNLHYTQIDNLRTYFLTKANENTLIRAITKLPQTGTPLQLNNTQFNPRLKIVKEEQKIINWKQKSLHGKYPYQLELEHVDRKASCSWLTKGNIFAETEGFLIAIQDQIIKTRNYSKYIIKEKIETDKCRLCHQTTETIDHITGGCSMLAQKEYTHRHDNVAKHIHQQLALKHKLLESYTPYYQYKPKNVLENSTAKLYWNRDIITDRTIHSNRPDITLTLKSSKTTFLIDTAVPNTNNIKQKHTEKVQKYIPLAEEIKQMWHQEVVKIIPIIISSTGVIPKNLKNALQRLDLHENIYIPLQKSVIIDTCSIVRRFLNPTTLSLQQEAQHNHPNSTIINHIQVSSKSSTHSSQQTDQTTHNTTHTTRNT

SEQ ID NO: 1245 - protein, 1032 aa, Camptopleura auxo
MLIKYTDIDPTLRPTIPKVQTSRKIIKTTATINKIIKNRLENKEPTIGEIHNIIYCAAQTTIVINNNSHYTDKENQNKSNTVGNKGKPQWEKRIENKIITLRKEIGQLTQYKNGNLTQKKQQKLNPDNKSIDEIIDKLDKNKQKLQSYSKRLRRYKISNKRKSDNRLFSSNQKLFYQKLTTENIRVLNPPSIDNVETYWKDLWSKPVHHNAHSSWIEEEDSVNIDPMPRIIVNKDDISRAIGKTLNWKAPGPDKVQNFWLRYFTATHEPLANAFNNLIQHPQECPSFLTQGITYLKPKDNDTTNPSKYRPITCLSTIYKLLTSIISFKLNTHIIQNHIIPEEQKGCSKGSRGCKEQLVIDTEIHHNVRVQQRNLFYSYIDYEKAFDSVPHSWLIYILKHYRVDNALIQFLQHIMKNWSTKLSLQTQNTSHCTRPIKILRGIFQGDSLSPLWFCLCLNPLSKILNKTNYGYVIDRENNTKITHLLYMDDIKLYAPNRQQLDHLLKLTETFSTDIKMNFGINKCKINSIIKGRHNKTNSFNLILQKGIIESMEPKETYKYLGYQQSTSLNHTEIKNTLKTKYKQRLHKILATQLSARNKIKAINTYAIPILTYSFGIIKWSDTDLTALNTMTRTASNKHNIHHIHAAVQRFTLKRKLGGRGCVDIKNLHYTQIDNLRTYFQTKANTSILHKAIVNLPQSGTSLQLQNNLFDPKLKIIKDDKKIEEWKAKALHGKYPYQLEQDHVDRNASCTWLTKGNIFGETEGFFIAIQDHIIKTRNYAKYILKESIESDKCRLCHRTTETIDHIIGGCSILANKEYTHRHDNVAKHIHQQLAIKHNLIKTYTPYYQYKPKPVIENDTAKLYWDRDIITDRTVLSNRPDITLTLKSSKTTYLIDVSVPNTHNLKQKHTEKIQKYLNLADEIKQMWHQESVKIVPIIISSTGVVPKNLKSALKLLELNENTYIPMQKSIVIDTCSIVRRFLNPSYITFQEEQNSPNLVAGSSLSIPVDTHNHNISHIHDTLNTQINHQTSHANN

SEQ ID NO: 1246 - protein, 1373 aa, Apodemia mormo
MRLRNRNIPQAGTLKGESRPEPSVSGSPSYSGGGNVSLISAQPSTVADNQSSSHITSHPSSSNTSSQSLDSTETSYISPQLSSLPSNIISPLSCDVAQEASAHSPVPTTDITNSTQMIPTTFPNCVDINTHSPTLNINTPAGSALQEMMPATTLAGKSRQRMKWTHNINKELLRCYYIVTQCERDLTAYRPLLHAKFVEKFPELNHLSEQRLVDQIRVIHKNNRISPPERERIKSLVSQIIDQTHNIQYASRTDTQTTSNTPTSQHTATDLLNNTDCVHYLNSTNTQQPIIITPTFQIGENSEHTTETPQTQELTEITIDPIYYEKINNTFTESLLKYRGTDPSLRPSLPKLQINRHTIKTVNTINEIINNHLQTKDTTYTLEELHEVIYSAALTVTIIHSRKNTKSDYDILHTKNNVIDKPKVSQWEKRIANKIEGLRKQIGQLTQHLNGNLSQKKQRKINVISKNRDEIVEHLDLDKQKLLAYTKRLRRYKKSNERKSQNNLFNNNQQLFYKKLNTEHVKITENPNIETIKTYWKNIWSKPILHETHTPWAEVEEQETRSIDPMEQIIIGEEDVTSSIKTTHNWKAPGSDKIQNYWLKHLTATHKYIASTFNDLIRNPQKIPKFLTQGVTYLKPKDHDTNNPSKYRPITCLPTIYKLLTSIIAHKLTSHISHHKIIPEEQKGCCKNSRGCKELLVIDSEIHSQVKHKHRNLYYSYIDYQKAFDSVPHSWLLHVLKIYKVDSNIIKFLQQAMTKWTTTLNLKTCDKTLSTSPIKIARGIFQGDSLSPLWFCLALNPLSRILNRTDYGYNIDRVNNIKITHLLYMDDIKLYAASRNQLDQLLRLTEQFSNDIKMTLGTDKCKVNSIIKGQHNQTQPYHLELNRGLIESMELTDTYKYLGYQQNTAITQPDIKNSLISKYKQRLNKILNTQLSARNKTRAVNTYAIPILTYSFGIIKWSDTELNALNTATRIACYRHNTHHIHSSVERFTLKRKHGGRGFIDINSLHYSQIENLREYFYTKSQESSLHKAIVNISNLGSPLQLNNRQFDPKQKIISDVQKLENWKKKALHGRYPHQLDQDHIDKDASCSWLTKGNIFGETEGFLLAIQDQVIKTRNYTKYILKQTIETDKCRLCHQTTETIDHITGGCSVLANKEYTHRHDNVAKHIHQQLALKFKLLDSYTPYYKYKPKNVLENNIAKLYWNRDIITDRTILSNRPDITCTLKSTKTTYLIDISIPNTHNLKQKYTEKIQKYISLADEIKQMWHQETVTIIPIIISSTGVIPKTLEKSLRILELHKNTYVTLQKSTILDTCAIVRRFLNSTSLALQNTQNTNTNTNHLINTHTSIRDSQHTFAQYLHAPITPYTNTSQSEPNI

SEQ ID NO: 1247 - protein, 1246 aa, Boloria selene
MESNNNDKRIGPLPGGDRRGTSGAGAGRHSMRSASGRQLHRQAEVNKNATAYTNIDTQPTTSTNPTSSVLQEMMPATTLGGRNRQRMKWTDEINIELLRCYYTVTNLETNLTTYRPSLHRMFVQKYPELHFITEQRLSDQIRVIHRNNRIPATARDKIKKSIEEIINRDNNEHSENTMQNQSFTNIQDNNTTEGETNIETHTAQTQLYTQHTQYSNDTDTLTREYNSTQSQERNVENNTHIQNENHTQLEYEQISATFTEMLIKFKGTDPTLRPRIPKLQTSRKTIKTVNTINQIIKLHLQNNDDTTIENIHDIIYCGAKTVTSIHTEKEKLSENKFKKIRTNDNKPAWQKRIERKIAKLRKEIGQLTQHLNGKLSQKKQKKLKVYEKDTNEVVDELDKNKQKLAAQSKRLRRYKLSNLRKEQNKTFNFNEKVFYRNLQQTQTITQPPDITQVQNFWEDRWGNCVHHNHNAKWIESEENKVKHMENMTQFVIDTNDVKTAIRKTLNWKAPGPDKIQNYWIKYFTSTHAHLAKALNTLIQEPQNIPTFLLQGITYLKPKDTDTTNPAKYRPITCLPTIYKLLTSIIAYKLDIHITQNQIIPEEQKGCCKGSKGCKEQLVIDTEIHNQVKQKHRNLFYAYIDYEKAFDSVPHSWLIEILKLYKVDKVLINFLENAMKEWTTTLTLRTEKENLTTTPIKIARGIFQGDSLSPLWFCLAINPLSSILNSTEYGYTIDREAKTKITHLLYMDDIKLFASNRIQLNHLLKLTEQFSNDIKMNFGTGKCKINSILKGQHKKTEAYNLTLHEGTIGAMDSTEIYKYLGYQQSTCLNHTDIKQTLKTKYTQRLNTILKTHLSARNKTKAINTYAVPILMYSFGVIKWSDTDLNALNTLTRSQAFKHHIHHIHSSTERFTLQRKQGGRGFIDIKNLHYTQIENLRSYFLSKSNNSKLHKAITTMTTAGTPLQLNDNNYEPVRKVIQEQKKIEDWKKKALHGKYPHQLEQNHIDKEASNTWLTKGNLFAETEGFFIAIQDQIIKTRNYSKYIIKESIETDVCRLCHQSKETIEHITGGCKILATKEYIKRHDNVAKQIHQILALKYKLINTYTPYYKYTPRNVLENQTAKLYWNVDIITDKTIACNRPDITLTLKSPKITYLIDISIPNTENLKNKHQEKIQKYIPLADEIKDMWHQDLIKIVPIILSSTGVVPKTLHKSIELLELHKLTYIQLQKSIVLDTCSIVRRFLNPSSLSP

SEQ ID NO: 1248 - protein, 1331 aa, Thymelicus sylvestris
MRLRNRELPQAGTHTGESRPGPSGTGCPTYSGGGNVSLRSAQSSTVAATDNTSPLHHSTSSPISSTHSLFQSPSSSPHSYELHRSSRSTTTSPMSCDVAQEALANILVPTTDTTYPTRLQQNSTNCVDHNTQSTLLDSNTPARSVLQAMLPATTLAGKSRQRMKWTKEINTELLRCYYTVTLCETDMTAWRPLLHQKFKEQFPELSHISEQRLSDQIRVIHRNNRIPATEREYIKQVISQTLPSINNQEEGSSNTLAHINQQSTTQDTPTTQHIHTHNQSQTCGHQTNTLTRISQTLESNEHIQTRENQPTDTLVRSIDNEEIENVFTEMVVKYAGMDPTLRPTIPKLQITRQNIKTVNATNEIVDKYLKNKDTITLEIVHDVIYCAAITVATFHTKQPNKTTTHTSFTSNNKTEKQKEPQWKKRIENKITLLRKEIGQLTQYLNGNLTQKKQQKLNLHNANRQEIVDQLDTKKQKLQAQAKRLNRYKKSNQRKSDNILFKNNQKIFYQKLNSESITVTQQPDITHVQKYWENIWSKPVQHNTHTTWTKIEEQEMGNIEPMLEITISKDDVTHAIKRTLNWKAPGPDKIQNYWIKYFTSTHIHIANAFNYLIKNPKDMPAFLTQGVTYLKPKDNDTTNPAKYRPITCLPTIYKLLTSIVTHKINSHISINKIIPEEQKGCSKGSMGCKEQLIIDAEIHNQVKHKNRNLYYSYIDYQKAFDSVPHSWLLHVLKIYKIDNNLIQFLQHAMTKWTTKLNLRTHTTTLSTSQIKIARGIFQGDSLSPLWFCLALNPLSRILNNTPYGYTIDKENKIKLTHLLYMDDIKLYASNKQELNHLLSLTEKFSTDIKMTFGTSKCKINSISKGQHCKTDSFELALQGGTIDSMEPRESYKYLGYQQSTSLNHTDIKNTLKTKYKQRLNKILNTQLSARNIVKAVNAYAVPILTYSFGIIKWSDTELNALNTVTRTLCNKHNIHHIHSAVQRFTLNRKLGGRGFIDLKNLHYTQVQNLRTYFIQKADDSTLHKAILNIYHSGTPLQLNNHQFDPKTKILRVDQKIENWKNKALHGKYPHQLEQDHVDKNASTAWLTNGNIFCETEGFMIAIQDQVIKTRNYSKFILKDPIETDKCRLCHRYTESIDHITGGCGVLANKDYTHRHDNVAKYIHQQLALKYKLTDTHTPYYKYKPVNVLENSNVKLYWDRDIITDRTILSNRPDITLILKSTKTTYLIDIAVPNTNNLKQKHTEKIQKYIPLADELKQMWHQESIKIVPLIISSTGVIPKTLHTALKTLDLHPKTYIPLQKSIILDTCSIVRRFLNPTSLTLQDSPDITNTQT

SEQ ID NO: 1249 - protein, 1339 aa, Theope publius
MRLRNRVIPQAGTCEGESRPESTSSGCPTYSGGGNVSQSSAQPMAVAVYNENSLSSHITTHSFSPPSSSNSFQYQHTSSSSHTDTNSSMLSDVVQEANAMSPVPIIDNTHPTQITLNSQTNCVDFTTHTSTPNSNTLARSALRDMMPATTLAGKSRQRMKWTDNINKELLRCYYQVTRCETNLTMYRPLLYAKFIEIFPELKHLSEQRLADQIRVIHKNNRITASEREHLKQQVAQASEGIYDTHNHVIDSHTENNNVRNTSTNNIQQTGATPHILHTEHNNSQCLSISSTLPSYITIPTSQIPVSIEHTQTINTETLTETNGESLDYEKLTDTFNEMLIKYKGTDPTFRPPIPKLQVKRHVIKTINTVNDIIDKYLRTKDLYSIEEIHEIIYSGALTVITTHSKRKIKSNSNKTGANENPTCKPNKPHWETRLGNKITALRKLIGQLTQYVNGNLTQKKQRKLNPDNKSLDEIIELLDNNKQKLQAYSKRMRRFKISNQRKTDNNLFNTNQKQFYQKLNTDSIKITDPPHNSDVQTYWQSLWSTPVQHNVHSSWTEIEEQEVNNINPMTDLMIDEEDVKQSIRKTLNWKAPGPDKIQNYWIKYFTATHKHIALTFTDLVHNPHNMPDFFTQGITYLKPKDRNTTDPTKYRPITCLPTIYKLLTSIITHKLNLHITHNQIIAEEQKGCCKGSRGCKEQLIIDAEIHNHAKQKRRRLFYSYIDYQKAFDSVPHSWLIYILKIYKVDDKTINFLQHAMSKWTTQLNLHTNKSTFRSPPIKIARGIFQGDSLSPLWFCLALNPLSRILNKTNFGYIIDRQYDIKLTHLLYMDDIKLYASDKDQLDNLLRLTENFSTDIKMKFGIEKCKINSIVNGRYNKTDPFDLEQQGGLIESMEPKETYKYLGYHQSTAINQLDIKNLLKIKYKQRLNKILNTQLSARNKTKAINTYAVPILTYSFGIINWTDTELNALNISTRMASYRHNIHHIHSSLERFTLKRKLGGRGFMDIRNLHFNQIDNLRKYFLTKANDSSIHNAIVKLTCSGTPLKLNNNQFYPELKITKDTHKIENWKKKALHGKYPHLLDQDHIDKIASCSWLTKGNIFGETEGFLIAIQDQIIKTRNYAKYILKENIVTDKCRLCNQSTETIDHITGGCSLLANKEYTHRHDNVAKHIHQQLALKYKLVDQYIPYYKYKPKNVLESSTTKLYWNRDIITDKTILSNRPDITLTLKPKKTTFLIDISIPNNNNLKQKYIEKIQKYIPLADEIKQMWHQDTVKIIPIILSSTAVIPKTLKTSLKLLELHENTYIPIQKSVVLDTCAIVRRFLNSTSLTLQNAVSTDQTLT

SEQ ID NO: 1250 - protein, 1343 aa, Chamunda chamunda
MTNGAIVIVTAMRLRSMKILPQAGTRNGESRPEPTNSGSPAYSGGGTVSPELVQPSTVASGKSYTPSTSPQYHQQQSPSSSPTYSYSSSSYHPQYTSSSRSTTLSPMSCDVVQEASANYPAPITDFMNPTHITETNSSSNCVAMHTPTHTINTTHTPARSVLQEMLPATTLAGKSRQRIKWTNEINRKLLRCYYMVTHCEENLTAYRPLLHKKFIEAHPELSHLTEQRLADQIRVIHRNNRIPASERQIIKQSLLHLVTNANTFQNFINDNNTQNTVAPTLETIITTQIVNAESIQSPVMETQVTYEQTQIQDLVTSKEPTTYITIENTFTEMLVKYTGTDPTLRPTIPKLQISRNTIKTVNTINEIISKHLQNKEVVTIEELQEIIYCAAKAITIIHTQRDYTNDPNKNIKQINKKPEYTQTIPKWQRRLEDKITLLRKKIGQLTQYLNGNMTQKKLIRKINPNNNSKDELIDEVDVHKQKLQAYSKRLRRYKISNQRKLDNSLFNTNQKLFYRNLNTDLIKVTEPPNIAEVQNYWENLWSKPIQHNSQSSWIITEEQEVQDLEAMPEININKTDVKQAIKNTLNWKAPGPDKIQNYWLKYLTSTHEHIAKTFNHLLHTPQDIPPFLAQGTTYLKPKDKDTTNPAKYRPITCLPTIYKLLTSIISYKINSHLTHNKIIPEEQKGCCKGSMGCKEQLVIDTEVHNQVKQKHRNLYYSYIDYQKAFDSVPHSWLLQVLKIYKVDTRLINFLQHAMTKWTTKLNIRTYNNTLTTPPIKIARGIFQGDSLSPLWFCLALNPLSRLLNKTGYGYIIDRENNIKLTHLLYMDDIKIYATNRQQIDKLIKITEEFSTDIQMKFGTDKCKVNSIIKGQHKERDPHVLEFQTGTIDSMQPRESYKYLGYQQRTSISHTEIKNTLKIKYKQRLNRILNTHLSAKNKVKAINTYAVPILTYSFGIVKWTDTELEALNTSTRTACNKHKDHHIHSAVQRFTLKRKLGGRGFIDIKNLHYTQIINLRSYFHTKANNSPLHKAIVNLPQSGTPLELNNKQLNPESKIVKDEQKIEKWKKKALHGKFPHQLEQEHVDQAASCAWLLKGNIFSETEGFLIAIQDQVIKTRNYSRYILKEAIETDKCRLCHHTTESIDHITGGCSALANKEYTHRHNNVAKHIHQQLALKYKLLTEYTPYYKYKPKNVIENNTAKLYWDRDIITDRTILSNRPDITLTLKSTKTTYLIDVAVPNTYNLKQKHTEKIQKYIPLADEIKQMWHQDTVKIIPIIISSTGVVPKTLKAALNSLQLHENTYIPLQKSIVLDTCSIVRRFLNPTSLPLHSNHEHHSNNILNPIHT

SEQ ID NO: 1251 - protein, 995 aa, Heliopetes ericetorum
MITKLKITRHVIKTVNTMNEIIDKYLSTKDTLNLEEIHLVIYCAAQAITTLYTKHLNVLTNVTGDTSKSRKPKWEKRIETKIETLRKEIGQLTQYINGNLSLKKQHKLNSHFKSRDEITTQLDTNKQKLQAYCKRLRRYKKSNERKSHNKLFNNNQKLFYQKLNTENIQITQLPDKNELHNYWKKLWSNPVQHNTNLSWSEIEEEEQANINPMSELRIDKEDVVQAVKKTLNWKAPGPDQIQNYWLKYLSATHKYIAITFNHLLHNPKDTPSFLTQGVTYLKPKDSDTTNPAKYRPITCLPTLYKLLTSIITHKLNTHITTNQIIPEEQKGCSKGSRGCKEQLIIDTEVHHQVKQKHRNLTYCYIDYRKAFDSVPHSWLIHILKRYKVDNRLIQFLQYTIKNWTTKLHLRTKNTTLCTPPIKILRGIFQGDSLSPLWFCLALNPLSKILNKSGYGYCIDRERNIRLSHLLYMDDIKLYASNRTQLNHLLKLTENFSSDIKMSFGTEKCKINSIIKGKYDEAEPFDLHIQGGTIDRMEPMETYKYLGYQQSIYVNHSEIKNTLKSKYKQRLHKIFNTQLSGRNIVKAVNTYAVPILTYSFGIIKWSDTELEALNTTTRTVSNKHNIHHIHSALQRFTLKRKLGGRGFIDIKNLHYTQIKNLRDYFLKKADVSPLHNAIVKLPQSGTPLQLNNQVFDPKLKILTDDKKIENWKNKALHGRYPHQLDQDHIDRNASCTWLTRGNIFSETEGFLIAIQDQIIKTRNYAKYILKESVFTDKCRLCHQATENIDHITGGCSALASKEYTHRHDNVAKHIHQQLALKYKLLDTYTPYYQYKPKNVIENSTAKLYWDRDIITDRTILSNRPDITLTLKSSKTTYLIDIAVPNTHNIKQKHTEKMQKYIPLADEIKQMWHQDTVRIIPIIISSTGVIPKTLSNALKILDLNENTYIHLQKSIIIDTCSLVRRFLNPTSLIVNDQNTDTNLTSHNTPHIHNTADT

SEQ ID NO: 1252 - protein, 858 aa, Chiomara georgina
MNEIIDQIDVKKQKLQAYSKRLRRYKISNKRKSDNKLFNNNQKLFYQKLNTENIRVINPPNINDVESYWKELWSKPVYHNSITSWTEEEESTSIDPMPSVIINKDDVSQAIRKTLNWKAPGPDKIQNYWIKYLTATHEPLANAFNYIIQNPQETPSFLTQGITYLKPKDNDTTNPSKYRPITCLPTIYKLLTSIISFKLNIHIARNHIIPEEQKGCCKGSRGCKEQLVIDTEIHHHVRIKQKNLFYSYIDYQKAFDSVPHSWLIDILKLYRVDNTIIHFLQNSMKNWTTKLFLHTQNTSYYSQPIKILRGIFQGDSLSPLWFCLSLNPLSKILNNSGYGYVLDRENNTKITHLLYMDDVKLYAANREQLEHLIKLTEMFSTDIKMSFGTSKCKINSIVKGRHHETNPFYLDSERGMIDSMELKETYKYLGYQQSTSLNHTEIKNTLKVKYKQRLNTILSTQLSARNKIKAINTYAIPILTYSFGVIKWSDTELEALNTTTRTASNKYNIHHIHSAVQRFTLKRKLGGRGCIDIKNLHYTQVNNLRTYFQTKANTSTLHKAIVNLTHSGTPLQLHNSLFDPKLKINKDEQKIEQWKAKALHGKYPHQLEQEHIDRDASCSWLTKGNIFGETEGFLVAIQDQIIKTRNYAKYIIKEAIESDKCRLCCQTTENIDHITGGCSVLANKEYTHRHDNVAKHIHQQLALKYNLVEAYTPYYQYKPKNVLENATAKLYWDRGIITDRTVLSNRPDITLTLKSSKTTYLIDIAVPNTHNLKQKHTEKIQKYLNLADEIKQMWHQKTVRIVPIIISSTGVIPKNLKSALKLLDLDENTYIPMQKSIIIDTCSIVRRFLNPSSLTLQE

SEQ ID NO: 1253 - protein, 1381 aa, Allancastria cerisyi
MRLRPRNRLLQAGPRNGESRPEPNSSGCPTYSGGDTVSLHHAQSRTAAGDKNDTTQSRNIHLHTSSSQNHFQSPGSLPHHLQTESILIPSTSLQMPCDVMREAHANHPASISGNINSTHTSQINSPLTSVETNIQTNYPNTNTPSRSVLQEMLPATTLAGKSRQRMRWTYDINCDLLRCYYLVTSCEENLTAYRPLLYEKFTETYPELRNLTEQRLADQIRVIHRNNRIPAPEREIIKQSILRTIRTTSISESFSNVTNCEMQTPISNNNSLINHNINTQTPEISNNTQLPQTPEETTFTGLQETCEHAQSQNHQITISPIEQVNYEKIYNTYSEMRIKYTGTDPTLRPIIPKIKPTRFIIKTVNTVNDIIKNHLQNIDVVTIEEVHEIIYCAAITVTTIHMNPKHKKDYNECNMRNLTKENKKDHNKSNTQNSTNNKKAAKWQRRLENKITTLRKRIGQLTQFLNGNIAQKKQQKINPNNKSRDEILNELDTAKQKLQAYSKRLRRYKISNQRKSDNNLFSTNQKLFYRKLNKDHIVITEPPNISDIQQYWEKLWSKPLQHNTHSSWAKIEEQEVENIDPMPEISINKNDVTQAVRETLNWKAPGPDKIQNYWLKYLTSTHEHIANTFNHILHNPQDLPNFLTQGITYLKHKDNDTTNPAKYRPITCLPTIYKLLTSIITKKLNAHLTYNRIIPEEQKGCSKASRGCKEQLVIDAEIHYQVKKMQRNMYYSYIDYQKAFDSIPHSWLLHILRIYKIDQRLIQFLQHAMTKWTTKLYVRTGNTTLNTSSIKIARGIFQGDSLSPLWFCLALNPLSRILNKSGYGYTIDRENNIKLTHLLYMDDIKLYAANRQQIEHLIRLTEEFSRDIKMTFGTDKCKINSIVKGQYNETDPYNLELQAGTIDNMEPRETYKYLGYQQSSSINHTEIKKSLKSKYKQRLNRILKTQLSARNKVKAINTYAVPILTYSFGIIKWSDTELEALNTTTRTACYKQNIHHIHSAVQRFTLKRKLGGRGFIDIKNLHYTQIHNLRSYFFTKATDSTLHKAIVNLSQAGTPLLLNNNQFDPKLKINKEEQKLETWKKKALHGRFPHQLEQEHIDKNASCTWLTKGNIFSETEGFLIAIQDQVIKTRNYSRYILKETIETDKCRLCHQTTETIDHITGGCTILANKEYTHRHDNVAKHIHQQLALKYKLLENYIPYYKYKPKSVMENNTAKLYWDRDIITDRTILSNRPDITLTLKPTKTTYLIDIAVPNTHNLKQKHTEKIQKYIPLSDEIKQMWHQEVVKIIPIIISSTGVIPKTLKTALKLLELPESTYIPLQKSIVIDTCSIVRRFLNPNSLPLCAYPESEYNNTIYQDASLSHTACNNNMPTNVENIHDIQVT

SEQ ID NO: 1254 - protein, 1116 aa, Cecropterus albociliatus
MFVQNVPVLSHLSEQRLADQIRVIHKNNRIQAPEREQIKQSVSFLISSSLNSLVVARNDDDHSNINTTLTIDNPLISDSHNQTLNPQHTVTAIHDAITNTQIYQSCESSEHRQIYDSEPINRQSDSVDYKKIQEIFREMLIKYTGTDPTLRPNISKPQTTRNVIKTVNSINQIVDKYFQTKESITIEEIHEVIYCAAQTVVKIHKNIFKKFENSTKSNNNKERKPYWEKRIENKIITLRKEIGQLTQYLNGNLSLKKQKKLNPTNRREDEIMEQLDNSKQKLQAYTKRLRRYKKSNERKSHNKLFNINQKLFYQKLNSKQIHITQPPDKIDIQNFWKNIWSIPVQHNIHTSWTEIEEQEMENIDPMPEITINKDDVLLAIKKTLNWKAPGPDKIQNYWIKYLPATHQHIANALNHILRNPQDTPYFLTQGITYLKPKDNDTTNPANYRPITCLPTIYKLLTSIISHKLNSHITQNHIIPEEQKGCCKGSKGCKEQLVIDTEIHTQVKQKHRNLYYAYIDYQKAFDSIPHSWLIHILKIYKVDIRLIQFLTHTMKNWTTKLTLHTNNISLSTQKIKILRGIFQGDSLSPLWFCLALNPLSRILNKTGYGYVICKDTNIKLTHLLYMDDIKLYAANRKQLDHLLKLTENFSTDIKMTFGTNKCKINSIIKGQHQKTDPFQLETTGGTIDNMEFRETYKYLGYQQSTSMDHTEIKNTLKSKYTQRLHKIFNTELSARNKTKAVNTYAIPILTYSFGILKWSDTELEALNTVTRTISHKHNIHHIHSAVQRFTLKRRQGGRGFIDIKTLHYTQIDNLRSYFLLKANESNLHKAIVHLSEAGTPLLLNNKQFDPKLKILKDDQKIENWKKKALHGKYPHQLEQDHIDYNASCTWLTKGNIFGETEGFLVAIQDQIIKTRNYAKYILKEAIETDKCRLCQNNTETIDHITGGCSVLANKEYTHRHDNVAKHIHQQLALKHKLLESYTPYYQYKPKKVLENNIAKLYWDRDIITDRTILSNRPDITLTLKSSKTTFLIDIAVPNTHNLKQKHTEKIQKYIPLADEIKQMWHQESVRIIPIIISSTGVIPKTLKIALRLLDLHEDTYIPMKKSIVISFVRWKYV

SEQ ID NO: 1255 - protein, 1362 aa, Entheus sp.
MRLRSRKIPQAGTREGESRPEHSGPGCPSNSGGGNVSHKIAQSHAVAIDQSPSHSLSPSLSTHSLFQSPISSPTSSTCSSLFTPMSCDVAQEALVNSVPITDITNPTRASQKNPTGREHNNAHTSSLDTNTPARSVLQGIFPVTTLAGKTRQRMKWTDQINRHLLRCYYTVTHNETNLTAWRLLLHQRFVETTPELSYLSQQRLADQIRVIHKNNRISSHDRELIKQSVASSLSTLNTSIDHNIINNTEQQPNTAINISPTFNDPQPSLYSSHTLNITQANNTITQTQQPLDNTEHIQNKGPNTTTKPLDPIDYNKIKNTFTETLIKYTGTDPTLRPIIPKLSTTRNLIKTMNTINEIIENLLQTYDTITLEEIHEIIYCAAQTVTTLNSKFLDPPKTPNNKNNNNITTKQNTPQWEKRIENKIIALRKEIGLLTQYLNGNLTYKKQQKLNPNNRTRDEIIDQLDKNKQKLQAHSKRLRRYKKCNQRKSHNKLFHTNQKLFYQKLNTDQIQITDPPHKDDLQNYWKNLWSKPVQHNTHQSWTEIEEQETENLVPMPEIIIDRHDVSQAIRKTLNWKAPGPDKIQNYWIKYLPATHPYIAKIFNDLISNPKSTPRFLTQGITYLKPKDNDTVNPAKYRPITCLPTIYKLLTSVISSKLNLHIIQNQIIPEEQKGCSKGSRGCKEQLIIDTEIHNQVTHKHRNLFYSYIDYQKAFDSVPHSWLIHILKIYKIDNKLIQFLQHSMKNWITQLNLRTNNASLLTDPIKITRGIFQGDSLSPLWFCLALNPLSRILNKTGHGYTIDRDRNIKITHLLYMDDIKLYAANRQQLDQLLALTENFSLNIKMTFGINKCKINSIIKGQHKNTHPFNLQNEGEVIDSMDFKQTYKYLGYQQSTFINHTDIKNELKTKYKQRLHKILNTQLSARNKIKAINSYAIPILTYSFGVIKWSDTELDALNMVTRTTSNKHNIHHIHSAIQRFTLKRRLGGRGFIDIKNLHYTQIDNLRTYFLNKANESTLHKAIVYVSQCGTPLQLNNSQFDPKLKIVNDAQKIENWKKKAIHGKYPHQLEQDYVDHNASCAWLTKGNIFGETEGFLIAIQDQIIKTRNYSKYILKEAIETDKCRLCHKSTETIDHITGGCSVLANKEYTHRHDNVAKHIHQQLALKHKLIDTYTPYYQYKPKNVLENSTVKLYWDREIITDRTILSNRPDIILTLKPSKTTYLIDIAVPNTHNINQKHTEKIQKYIPLADEIKQMWHQEYVRIVPIIISSTGVIPKALKTALNLLHIHENTYIPLQKSVIIDTCSIVRRFLNPTTLPLHNCENNPNTTIHRHSTSTHNTTYNIQTHIHETSNLPNIFHPVHSHTDT

SEQ ID NO: 1256 - protein, 1173 aa, Calpodes ethlius
MLPATTLAGKSRQRMKWTKEINTELLRCYYAVTLCETDMTAWRPLLHQKFKDQFPELSHISEQRLSDQIRVIHRNNRIPANERDCIKHSISQTLTSTNNNNITIEEETSDTFAHSNQQPNTQDTHTTQHIHSQIRELQTTTSTPESRPLESTEHIQTHTHTGNESIITSVRSIDYEQIENVFTEMLIKYTDTDPTLRPTIPKLQSTRQVIKTINTINKIINEYFKNKDIITLEEVHDTIYCAAKTVAIFHTKESKKHVNQTSLASNDKTEKRKVPQWQRRIEQKITLLRKEIGQLTQYLNGNLTQKKQNKLDIGNKSRQEIVDLLDTNKQKLQAQAKRLSRYKKSNQRKSDNILFRNNQKVFYQKLNSDNITVTQQPDITQIQKYWENIWSKPVQHNTHIPWIEIEKRDMENIEPMPQISIGKDDVTQAIKNTLNWKAPGPDKIQNYWIKYFTSTHIHIANTLNNIIKHPHDMPAFLAQGVTYLKPKDNDTTNPAKYRPITCLPTLYKLLTSIITHKINSHISLNKIIPEEQKGCSKGSMGCKEQLIIDAEIHNQVKHKCRNLYYSYIDYQKAFDSVPHSWLLHVLKIYKIDNSLIQFLQHAMSKWTTQLNLRTNTKTLSTSHIKIARGIFQGDSFSPLWFCLAINPLSRILNNTPYGYTIDRKNKIKLTHLLYMDDIKLYASSKQELDHLLKLTETFSTNIKMTFGTSKCKINSITKGQHNKTDSFELELQGGTIDSMEPKESYKYLGYQQSTSLNHTDIKNTLKTKYKQRLNKILSTQLSARNIVKAVNSYAVPILTYSFGIVKWSDTELNALNTLTRMICNKHNIHHIHSALQRFTLNRKLGGRGFIDVKNLHYTQIENLRNYFIRKAIDSPLHKSITNMNHSGTPLQLHNKQFDPKTKILTAEQKIDNWKNKALHGKYPHQLEQDHVDRNASTTWLTNGNIFSETEGFMIAIQDQVIKTRNYSKFILKEAIETDRCRLCHRYTESIDHITGGCNVLANKDYTHRHDNVAKYIHQQLALKYKLTDTYTPYYKYKPKNVLENNTVKLYWDRDIITDRTILSNRPDITLTLKPTKTTYLIDISVPNTNNLKQKHIEKIQKYIPLADEMKQMWHQKTIKIVPILISSTGIIPKTLHTALKTLDLHPKTYIPIQKSIILDTCSIVRRFLNPTSL

SEQ ID NO: 1257 - protein, 1323 aa, Cyclargus thomasi
MRLRNRNIPQAGTGANSKGESRPGSSDPGCPSYSGGDTVPHSSVQYNTVTVNSVPISSTIVQSYPSSPSSSVSLFPSQHSSPQSYMFDTNFSSSWSHTISPLSEDVTREAPAIYPVSTPDITPSTSTLQISVPQPVDHNIQQSPLINTSARSVLQEMLPATTLAGKCRQRMKWTDLINQELLRCYYIVTSCETNLTSFRPSLHKKFIESFPELNHISEQRLADQIRVIHRNNRIPVARREHIKQSVSETIQTQVENNSQTSIQDPTSQFSILNIQTSRQSTVYISPPGHSDVLVSSSPLTLPAHSDSIEHEDTVDRNSIDSQKIENIFRETLIKYTDTAPSFRPVIPKLQVTRSIIKTVNVLNTIISRHLADKEKLDIVEIQTIIYCAALTTTILHATTKLENQSEKNETLKTINNNNPKWQVRIENRIKNLRKEIGLHIQYLKGNLSTKKRRKINPKNYTTSQLVDQLDNLKQKLQAHSKRLRRLKISNDRRRHNTLFQNNQKAFYQNLNSESIKISQTPNMEEVKTYWENVWSKPAQHDEQASWIEIETQEQQVTSIMPEIIITQEDVINAIKKTLNWKAPGPDKIHNYWIKYFSATHRYIADIFNSFIQDPQTVPDFLTHGITYLKPKDSDTTNPTKYRPITCLPTLYKLLTSIITQKLNTHIIQNKIIPEEQKGCAKGSMGCKEQLIIDTEIHNQAKQKHRNLYYSYIDYQKAFDSVPHSWLIHVLKIYKVDTKLIYFLKHIMSTWSTKLNIKTSNANFCTSTIKIKRGIFQGDSLSPLWFCIALNPLSKILNKSCYGYTIDKLNNVKVTHLLYMDDIKLYASDRQQLEHLIKLTEKFSIDIKMNFGIEKCKINCIEKGLHTQTEPLNLEFQEGIIDSMQANDSYKYLGYKQSITINHKDIKNTLKSKYKQRLNKILTTQLSGRNKIKAINTYAIPILTYSFGIIKWTDTELESLNTTTRMLSYKRNIHHIHSAVERFTINRRLGGRGIIDIKNLHYSQIENLRKYFFNKSQTSQLHKAIVTLPYKGTPLQLNNDLFNPNHKIVKETDKIQKWKSKALHGKYPHHLEQEHVDHIASCSWLTRGNIYAETEGFLIAIQDQIIKTRNYSKYILKESINTDKCRLCHLTTETIDHITGGCSALANKEYTHRHNNAAKHIHQLLAIKYNLIDSYTPYYKYKPQNVLENSNVRLYWDRDIITDRTILSNRPDITLTIKPEKTTYLIDIAVPNTNNLKQKHNEKIQKYIPLADEIKQMWHQDVVKIIPIIISSTGVIPKTLAGSLKSLNLHKNTYIQMQKSIIIDTCSLVRRFLNPSSSSPTPQT

SEQ ID NO: 1258 - protein, 1362 aa, Ypsolopha scabrella
MRLRSRNILPQAGTSNGESRPEPTSSGSPTYSGEGNVSLHPAQSSTVAGQENNTPSPDMLSYASSPISSTHSLFQSPSSSPYDFQLTSTSRSTTISPMSCDVVQEALAICPTGIMNPTRTSETNSHSNRVDTNTERHTTDTNTPARSVLRDMLPATTLAGKSRQRMRWTNQINHELLRCYYMVTNCEENLTAYRPLLHQKFTETFPELSHLTEQRLADQIRVIYRNNRIPASERESIKQAVLQSITTLDNPNTNNFETQVNTNNNDVIYNQFQNSHTLEQTDNTQQTIASTPQPIIMTLSDNEITTESASVAFQETYEHTQSQGPEIDITSEESINYQKIEDTFTEILIKYTGTDPTQRPIISKIQTTRKVIKTIKTVNEIINKHLQNKEDVTIVEIHEIIYCAALTVTTYTNSTNKGKKKEHNKTNTNINQANKKKTPQWQKRLENKIAILRKEIGRLTLYLNGNLTQKKQQKLNPNNKSRDEIVNELDNYKQKLQAYSKRLRRYKISNQRKSDNNLFNTNQKLFYRNLNSDQIEITEPPNIDEVKHYWENLWSNPLQHNSHSSWAKIEEQEVDNIDPMPEISINIDDVTYAIKNTLNWKAPGPDKIQNYWLKYLTSTHKYIASTLNHLLHNPQDIPTFLTQGITYLKPKDNDTTNPAKYQPITCLPTIYKLLTSIISHKINSHLTSNKIIPEEQKGCSKGSRGCKEQLVIDTEIHNQVKKKHRNLYYSYIDYQKAFDSVPHSCLLHVLKMYKIDNRLIQLLEYAMTNWKTKLNIRTNNITLSTPSIKIARGIFQGDSLSPLWFCLALNPLSRILNKTGYGYNIDTGNDIKLTHLLYMDDIKLFAANRQQINHLIRLTEEFSRDIKMTFGTDKCKINSMIKGQHKETDPYILEQQTGTIDSMEPKETYKYLGYQQSTSIDHTEIKNALKTKYKQRLSKILKTQLSTRNKTKAINTYAIPILTYSFGIVKWSDTELEALNTTTRTTCNKHNIHHIHSAIQRFTLKRKLGGRGFIDIKNLHYTQIINLRSYFHTKANESAIHKAIVNLPQPGTPLQLNNSQFEPKHKITTDEQKLENWKKKALHGRFPHQLDREHIDRTASCTWLTKNNIFGETEGFLIAIQDQIIKTRNYSKYILKETIETDKCRLCNLASETIDHITGGCSTLANKEYTHRHDNVAKHIHQQLALKYKLLQSYTPYYQYKPKKVIENSSAKLYWDRDIITDRTILSNRPDITLTLKSTKTTYLIDISVPNTHNLKQKHTEKIQKYIPLADEMKQMWKQETVKIVPIIISSTGIVPKTLKKALELLDLPIKTFIPMQKSIVIDTCSIVRRFLNPTSLPLLTNHTTPHINTTHSMPPNTQVMQ

SEQ ID NO: 1259 - protein, 1305 aa, Blastobasis lacticolella
MRRSTRIKNKNAAQSTTVAATSSSSSPTRISTASSPISSTQSIFQSPSSSPHSYQHHYGSSSRSTTISPVSYDVAHEASADSHVSTVDTTNPTLLSQTNTLNCVDHNTQISLPIRDTPARSVLQEMLPATTIAGKSRQRMKWTNEINIELLRCYYIVTICETDFTAWRPLLRQKFVEKFPELNHLSEQRLSDQIRVIHRNNRIPAPERERIKQSLSTNLIDDRINQSNNILVDPHISNTPTQCDIEQTMIVSQSPPQAIINTQQTPNDIETTQIITPIEQTQNTEIESATEPIVYEEIETIFTEMLIKYSGTDPTLRPAIPKQQTTRKLIKTMNTVNDIVEKHLQNKEAVSIEVIHEIIYCAAMTVTKIHAKKPKKVVETASNTSNTTKDKQKRPCWELRLENKIKALRKSIGQLTQYLNGHLTKKNQQKLNPNNKSRQEMVDLLDTNKQKLQAQAKRLSRYKKSNRRKSDNILFNTNQKIFYKKLNSENITVTQHPDTANVQKYWENLWSIPVQHNAHTSWTEIEEREMENINPMPEITIETEDVTQAIKRTLNWKAPGPDKIQNYWIKYLTSTHTHIAIALNHLIHNPQDIPAFMTQGVTYLKPKDNDTTNPAKYRPITCLPTSYKLLTSIISQKINTHISTNKIIPEEQKGCSKGSMGCKEQLIIDTEIHNQVKKRHRNLHYSYIDYQKAFDSVPHSWLLHVLKIYKIDNSLIQFLQHAMTKWTTKLSLSTNSTTLTTAPINIARGIFQGDSLSPLWFCLAINPLSRILNNTPYGYTIDRENNIKITHLLYMDDIKLYASNKRALDHLLKLTENFSTDIRMTFGTNKCKINSIIKGQHSKTDSFALELQGGTIDSMEPKESYKYLGYHQSTSINHTDIKNILKSKYKQRLHKILSTQLSGRNKVKAVNTYAVPILTYSFGVINWSDTELNALNTLTRTTSNKYNIHHLHSAVQRFTLKRKLGGRGFIDIKNLHYTQIDNLRSYFLQKSQESTLHKAIVNLTNSGTPLQLNNNQFEPKTKVLQDEQKIENWKNKALHGKYPHQLAQDHVDPIASSTWLTKGNIFGETEGFLVAIQDQTIKTRNYAKYILKESIETDKCRLCHQHTENIDHITGGCSILANKEYTHRHDNVAKHIHQQLALKHKLLETHTPYYKYKPKNVLENDKAKLYWDRDIITDRTILSNRPDITLILKPAKTTYLIDIAVPNSHNLKQKHAEKVQKYIPLADEVKQMWHQETVRIIPIIISSTGVVPKTLHTALKMLDLHEKTYVPLQKSIVIDTCSIVRRFLNPTSLTLQDSQITNQDI

SEQ ID NO: 1260 - protein, 1359 aa, Choaspes benjaminii
MRLRSRNTLPQAGTRNGESRPEQNASGSPTYSGGGTVSLEPAQSETVAVRKTHTQSPDTQSHPSSPTSSTLSPYHSPSSSSSYRPHLSSPRSTTISPVSCDVVQEALANNPAPITDTTNPKRISENIALSNRLDTYTHTDTTYNNTTGRSVLQEMLPATTLTGKSRQRMKWTDPINHELLRCYYIVTNCEENLTAFRPLLHKTFTKTFPELNHLTEQRLADQIRVIHRNNRIPAQEREIIKQNVRQTYIETHTCTNNNQSIPIHTQNLHSQGNTDNIQNALTHTIQSTGTTTLAGIEPRPESNITEHQEIYEHAQTQDASTDVTHQEPMTYKKIEDTFSEMLIKYTGTDPALRPTIHKIQTTQKFIKTVNTINSIIEKYLHNKEVATLEEIHEIIYCAAKTVTVIHTEHTKKKDSYKTISNHKTPENIQKIPKWQRRLETKITLLRNSIGKLTQYLNGNLSQKKQLKVNPSNKSRDEIIQELDTKKQKLQASAKRLHRYKISNKRKSDNILFSRNQKQFYQNLNTENVKITKPPCIAEVKNYWESLWSRPVYHNPHTSWATIEEKEVQNIEPMPEIIITTLDVTQTIKNTLNWKAPGSDKIQNYWLKYLTSTHEHIAKIFNHLLRNPHNIPPFLTQGITYLKPKDKDTTNPAKYRPITCLPTIYKLLTSIISHKLNSHLTHNQIIQEEQKGCSKGSMGCKEQLVIDTEIHNQVKQQHRNLYYTYIDYQKAYDSVPHSWLIHVLKIYKIHNTLIHFLEQTMTKWNTKLHIRANNTTLNTSSIKITRGIFQGDSLSPIWFCLALNPLSKILNKTGYGYIINRENNIKLTHLLYMDDIKLYATNRQQINDLINLTEEFSTDIGMMFGTDKCKINSIIKGQHKETDPHRLKLQGGTIESMDPKETYKYLGYHQSTGINHTEIKTTLKVKYTQRLKKILNTQLSARNKTKAINTYAIPVLTYSFGIVKWSDTELEALNTTTRTACNKHRYHHIHSAVQRFTLKRKLGGRGFIDIKNLHYSQVDNLRSYFYTKSNECSLHNAIINLPHSGTALQLNNRKFDIKQKVVTEVQKLENWKKKALHGKYPHQLDQEHIDRNASCSWLTKGNIFGETEGLLIAIQDQVIKTRNYSRYILKESIETDKCRLCHQNIETIDHITGGCSALALKEYTHRHNNVAKHVHQKLALKYKLLDTYTPYYQYKPNSVMENSTVKLYWDRDIITDRTILSNRPDITLTLKNTKTTYLIDVAVPNTHNIRQKHTEKIQKYIPLSDEIKQMWHQNTVKIIPIIISSTGVIPKTLKNAFKQLDLPEHTYVPLQKSVVIDTCSIVRRFLNPTSLSLLGNHHTNHTNTSTPNNTQNTRQTITYT

SEQ ID NO: 1261 - protein, 1327 aa, Nerula fibrena
MRLRNRQLPQAGTLPGESRPAPSGPGCPSYSGGGTVSLNTAQPSAVAEINTTLNSNTYMSTHTSSPSSSMSLFQSPNSSPQSYLYQSTSRSTTPSSMSENVAQEAQATVPAPTLGITNSTRISLYNSPPRVDHNTHFSHPIINTPARSVLQDMLPATTLAGKSRQRMKWTYEINKELLRCYYIVTSCETNLTAYRPLLYQKFIESFPELNHISEQRLADQIRVIHKNNRIPENERKHIRQIVHSENSAQNNCSDQSNSNEIEYDLLTNNATAATQRHIHTTPHEVTETQHTNTLTYTPHPIETREHVEAQDNIIINSINPIEYNTIENTFIENLTKYSGTDPTLRVSIPKLQITRNIIKTVNYVNLIIEKHLQNKESFSLEEIHETIYCAAMTVIMSHSRQSEKPTAADISNRTIGQRKPYWQNRIENKIAALRKEIGQLTQYLNGNLTQKKQYKINPNNSNKDEIVNRLDNNKQKLLAYSKRLRRFKISNKRKTDNNLFNKNQKLFYKNLNAENIEITNLPDIADVQMYWEKLWSKPIQHNSNASWTHIEEQETHNIEIMPEITINKDDVTKAIKKTLNWKAPGPDKVQNYWLKYFTSTHSHIAKAFTHIINNPEDMPSFLTQGITYLKPKDQNTTDPSQYRPITCLPTTYKLLTSIIAAKLDAHITRNGIIAEEQKGCCKGSRGCKEQLIIDTEIHNQVKQKHRNLFYSYIDYQKAFDSVPHSWLIHVLKIYKVDNRLIQFLQQTMNKWITKLTLHTNTVSLSTQSIKIARGIFQGDSLSPLWFCLALNPLSRILNKSGFGYALDLNNDVKLTHLLYMDDIKLYASNRQHLNHLLSVTEKFSTDIKMTFGLDKCKINCIIRGQHKETDSYHLKIQGGIIDSMEPKESYKYLGYQQCTNINHTEIKNTLKRKYKQRLNKVLNTQLSARNKTKAINTYAIPILSYSFGVIKWSDTELEALNTLTRTTCNKHNIHHIHSAVQRFTLKRKLGGRGFIDIKNLHYTQVDNLRTYFKTKANDSGLHKAIVQLPNSSTPLKLNDSHYNPKSKIMKDEEKLENWKKKALHGKYPHQLDQSHIDRLSSCTWLTKGNIFGETEGFMVAIQDQTIRTRNYSKFILKEPLQTDKCRLCHQTSETVDHITGGCSILATKEYTHRHDNVAKHIHQQLALKYKLLEAYTPYYEYKPKKVLENSTVKLYWDRDIITDRTILSNRPDITLTLKTSKTTYLIDISVPNTHNLKQKCTEKIQKYIPLVDEIKQMWHQESVRVVPIIISSTGVIPKTLKSALKLLDLHEKTYIPLQKSIIIDTCSIVRRFLNPNSITLQNDADNT

SEQ ID NO: 1262 - protein, 1271 aa, Helias cama
MSYDVVQEATAISPEPITDVINPTRVSQNNLSDRVHHITNPLSPHINTPVRSVLQDMLPATTLAGKSRQRMKWTDQINRELLRCYYIVTCNETDMTAWRPLLQQKFMESFPELSHLSEQRLADQIRVIHRNNRIAASERENIKNTVSLLIPTTSNVSQDTDLSNVYQSTTDIINLTTNNVTQTNVDLNGPTLNTQNTHTLQEYLTTQIHLNIEHVQTQVAGTTDRAQKPLHHENIENIFTEMLIKYTGTDPTLRPKIPKVQISHNTIKAISTINKMIEKHLQNIDNTIEEIHNTIYCSAQTIVAVQNKYSEVDNNTNNHGNTIGKKGKPKWEKRIENKITSLRREIGQLTQYKNGNLTQKKQQKLNPNNKSINEIIDQLDLNKQKLQAYSKRLRRYKISNKRKSDNKLFNTNQKLFYQKLHSENIRVRNSPNIDDLENYWKDLWSRPVHHNTFTSSIVEEETGNIDPMPSVIISKDDVSQAIKKTLNWKAPGPDKIQNYWIKYFTATHKPLAHAFNNIIQNPQETPPFLTQGITYLKPKDNDTTNPAKYRPITCLPTIYKLLTSIISFKLNTHITRNHIIPEEQKGCNKGSRGCKEQLIIDTEIHHQVRVKQRNLFYSYIDYQKAFDSVPHSWLIDILKLYRVDNTLVNFLQHSMKNWTTKLYLQTQNTTLHTLPIKILRGIFQGDSLSPLWFCLSLNPLSKILNKTGYGYVIDRENNTKITHLLYMDDIKLYAANREQLDHLIKLTEKFSTDIKMSFGTNKCKINSILKGRHNETNPFYLSMDGGVIDSMESKDTYKYLGYQQSTSLNHTEIKNTLKNKYKQRLNKVLSTQLSARNKIKAINTYAIPILTYSFGVIKWSDTELAALNTVTRTVSNKHKIHHIHSSVQRFTLKRKLGGRGCIDIKNLHYTQIENLRSYFLDKSNTSTLHKAIVNLSQSGTPLQLHNNLFNPKLKILKDDQKIENWKAKSLHGKYPHQLEQDHVDRNASCTWLTSGNIFGETEGFLIAIQDQIIKTRNYAKYILKEAIESDKCRLCHQNTETIDHITGGCSVLANKEYTHRHNNIAKHIHQQLAIKHNLIKTYTPYYQYKPKNVIENATAKLYWDRDIITDRTVLSNRPDITLTLKSSKTTYLIDIAVPNTHNLKNKHTEKIQKYLNLADEVKQMWHQETVKIVPIIISSTGVIPKNLKFALKLLDLHENTYIPLQKSVVIDTCSIVRRFLNPSSLPFYDDQQIPNTVTLTQAPTHTLNTSNTDNTRTLNTLITQHSNHANI

SEQ ID NO: 1263 - protein, 1360 aa, Cecropterus bathyllus
MRLRNRQIPQAGTREGESRPGPSSSGCPTYSGGGNVSHKTAQSSTVAVDKSLTPSQPSSPISSTHSLFPSPSSSPYSFQFQPSSSRSSTITSLSCDVAQEAHANPPVPTTDSIYPTRVTQNNQPNRVTHSTHSSSHTTDTPARSVLQDMLPTTTLAGKSRQRMKWTDEINKELLRCYYIITKNETNLTAWRPQLRRLFAENVPVLSHLSEQRLADQIRVIHKNNRIPAPEREQIKQSVSFLISSSSNSLSNQAITRNDDDNHSNINAALTSNNQLISDSHNQTLNPNHTVTITHDAITNTQAYQSCESSEHMQSQDVEPINRLLDSVDYKKIQEVFREMLIKYTGTDPTLRPNISKPQTTRNVIKTVNSINEIVDKYLQTKDSITIEEIHEVIYCAAQTVVKIHTNRVETLETNTKNNNNNQRKPHWEKRIENKIVTLRKEIGQLTQYLNGNLSQKKQKKLNPHNGSKDEIIEQLDNSKQKLQAYTKRLRRYKKSNERKSHNKLFNTNQKRFYQKLNSEQIHITQPPDKIDIQNYWKNIWSIPVQHNTHSSWTEIEEQEMENIDPMPEITINKDDVVLAIKKSLNWKAPGPDKIQNYWIKYLPATHGHIANALNHILCNPQYTPNFLTQGITYLKPKDDDTTNPAKYRPITCLPTIYKLFTSIIAHKLNSHITQNHIIPEEQKGCCKGSKGCKEQLVIDTEIHTQVKQKHRNLYYSYIDYQKAFDSIPHSWLIHILKIYKVDVRLIKFLLHTMKNWTTKLTLHTNNISLSTQKIKILRGIFQGDSLSPLWFCLALNPLSRILNKTGYGYVINKDTNTKLTHLLYMDDIKLYAANRKQLDLLLRLTENFSTDIKMTFGTDKCKINSIIKGLHQKTDPFQLDTIGGTIDSMEFRETYKYLGYQQSTSIDHTEIKNTLKTKYKQRLHKIFNTELSARNKTKAVNTFAIPILTYSFGILKWSDTELEALNTVTRTISHKHNIHHIHSAVQRFTLKRRLGGRGFIDIKNLHHTQIDNLRTYFLLKATESALHKAIVDLPQAGTPLQLNNKQFDPKLKIIKDDQKIENWKKKALHGKYPHQLEQDHIDYNASCTWLTKGNIFGETEGFLVAIQDQIIKTRNYAKYILKEAIDIDTCRLCHQNTETIDHITGGCSVLAHKEYTHRHDNVAKHIHQQLALKHKLLESYTPYYQYKPKNVLENNTAKLYWDRDIITDRTILSNRPDITLTLKSSKTTFLIDIAVPNTHNLKQKHTEKIQKYIPLADEIKQMWHQETVKIIPIIISSTGVIPKTLKTALKLLGLHENTYIPMQKSIVIDTCSIVRRFLNPTTLTLQTHQDTHSGTPTQDSLQRATIQNTQIHTHTHHHPP

SEQ ID NO: 1264 - protein, 1005 aa, Morvina fissimacula
MLIKFSGTDPTFRPTIPKIPATRKTIKTVNTVNTIIKKHLEQKEEVTIEDIHEAIYCAAQTVTTMHTQNTNRDNKNDTNNTINKKSTPLWQRRLETKITGLRKEIGQLTQYLNGNLTHNKQCKINPNNKSRDEITDQLDNDKQKLQAYSKRLRRYKISNKRKSDNILFNSNQKLFYRKYNNATDKIITKSPNISIVQNFWENIWSKPVMHNSHASWTKIEEEETSEIHNMPEVKISKDDVIAAIKKTLNWKAPGPDKIQNYWIKYFTATHEYLANTLNNFIQNPSTLPPFLTQGITYLKPKDDDTTNPAKYRPITCLPTIYKLLTSIISHKLNSHITQNKIIAEEQKGCCKGSMGCKEQLVIDTEIHNHAKQKHRNLFYGYIDYQKAFDSVPHSWLIHVLQVYKVDDRLISFLQHTMKNWTTVLNIRTNNKTLNSNPIKIARGIFQGDSLSPLWFCLAVNPLSRILNKTDQGYNIDRENSIKLTHLLYMDDIKLYASNRQQLEHLLNLTEKFSKDIKMTFGTDKCKLNSIVKGQHRETGNFELMTQEGTIESMNHKDTYKYLGYHQNTSVNHTDIKNTLKTLYKQRLNKILNTQLSARNKTKAINTYAVPILTYSFGIIKWSDTELEALNTTTRTSCNKHNIHHIHSAVQRFTLKRNLGGRGFIDIKNLHYSQIDNLRKYFLMRAHDSIIHKAIVNLPHSGTPLQLNNRQFDPKQKILKDEQKIDKWKSKALHGKFPHQLLQDHIDQTASCTWLAKGNIFGETEGFLIAIQDQVIKTRNYSRYILKESVVDDKCRLCHQTTETIDHITGGCSVLANKEYTHRHDNVAKHIHQQLALKYNLLETYTPYYKYKAKNVLENRTTKIYWNRDIITDRTILSNRPDITLTIKPTKTTYLIDIAVPNTHNLKQKHAEKIQKYIPLADEIKQMWHQENVRIIPIVISSTGVVPKNLKDALKILQLPENTYIPLQKSIVIDTCSIVRRFLNPTSLPLSSIEGNMNTNSTQNTQ

SEQ ID NO: 1265 - protein, 1365 aa, Camptopleura auxo
MRLRSGYKLPQASTGANRTGESCPESTSSGCPVYSGGDTVSQTSAQSHTVAVNKPSSSHTLTHSSSPISSTQSLFQSPSSSPQSYEFNHSLLHSSPISSMSYDVAQEATAIYPEPTTDIIDPTRVSQNNLNNRVHQTHSISHHINTPVRSVLQDMLPATTLAGKSRQRMKWTDEINRELIRCYYVVTCNETDMTAWRPLLHQKFTESFPELSHLSEQRLADQIRVIYRNNRIPASEREVIKNTVSLLIPTTSNLSQNTDLSNVHESTTNITPITVNHTHAQTNIDLNVQTLSTQNTFTTTQEYSTTQTHLNIEHVQTQIAETTDRPQEPPYYENIEKTFTEMLIRYTGTDPTLRPKIPKAQISRNIIKVVSTINKIIEKHLQNTENTIEEIHNTTYCAAQTIIAIQNKYSETENNTNNHGNIIGKKEKPKWEQRIENKITSLRKEIGQLTQYKNGNLTSKKQQKLNPNNKSINEIIDQLDLCKQKLQAYSKRLRRYKLSNKRKSDNKLFNTNQKLFYQKLHTDNIRVINSPEKDDLENYWKNLWSKPVLHNTSTSWIKEVETENIDPMPSITISKEDVSQAIRKALNWKAPGPDKIQNYWIKYFTATHKPLANAFNNIIQNPQEVPSFLTQGITYLKPKDNDTTNPAKYRPITCLPTIYKLLTSIIASKLNTHITRNNIIPEEQKGCNKGSRGCKEQLVIDTEIHHHARVKQRNLFYSYIDYQKAFDSVPHSWLIHILKLYRVDHTLIHFLQHSMKNWTTKLFLQTQTTSHYTQSIKILRGIFQGDSLSPLWFCLSLNPLSKILNETGYGYVLDRENNTKITHLLYMDDIKLYAANREQLDHLIKLTEKFSTDLKMSFGTNKCKINSILKGRHNETNPFHLSIQGGIIESMDPKDNYKYLGYQQSTGLNHTEIKNTLKTKYKQRLNKILSTELSARNKIKAINTYAIPILTYSFGVIKWSDTELAALNTVTRTSSNKHYIHHIHSSIQRFTLKRKLGGRGCIDIRNLHYTQIDNLRTYFLNKSNTSPLHKAIVNLPQSGTPLQLHNNLFDPTLKILKDDQKIENWKAKSLHGKYPHQLEQDHVDRNASCTWLTKGNIFAETEGFLIAIQDQIIKTRNYSKYILKEPIESDKCRLCHQTTETIDHITGGCSVLANKEYTHRHNNIAKHIHQQLALKHNLIKTYTPYYQYKPKNVIENATAKLYWDRDIITDRTVLSNRPDITLTLKSSKITYLIDIAVPNTHNLKNKYTEKIQKYLNLADEIKQMWHQETVKIVPIIVSSTGVIPKNLKSALKLLDLHENTYIPLQKSVVIDTCSIVRRFLNPSSLPFHDDHHNLNIVTHTHTHNISNTHDTLNTYITQHSNNENI

SEQ ID NO: 1266 - protein, 938 aa, Cycloglypha thrasibulus
MINVKKTNEHRKPQWETRIENKISTLRKEIGQLTQYLNGNLTQKKQQKVNKNFTSRDNIIEQLDKDKQKLLAYSKRLRRYKISNQRKFHNKLFNDNQKLFYQKLNTDYINITQPPHKDDIQNYWKNIWSKPVQHNTNTLWADIEEQETEDISPMPVVHVAKDDVSQAIRKTLNWKAPGPDKVQNYWIKYFTATHAHIANIFNYLIQNPHETPSFLTHGVTYLKPKDTDTTNPSKYRPITCLPTIYKLLTSIITQKLNSHITLNKIIPEEQKGCSKGSRGCKEQLVIDTEIHNQVKQKHRNLFYSYIDYQKAFDSIPHSWLIYILKIYKVDNVLIEFLQHLMTNWNTKINLRSSNKVICTQSIKILRGIFQGDSLSPLWFCLALNPLSKILNKTKYGYIIDRQNNIKLSHLLYMDDIKIYAASRHELDHLLKIVENFSSDIKMALGTDKCKINSIIKGHHNETAGFALNVQGGTIDGMDPEETYKYLGFYQSSSLNHSAIKNTLKTKYKQRLNRILNTQLSARNKSKAVNTYAIPILTYSFGIIKWSDTELEALNTTTRTVSNKHNIHHIHSSIHRFTLQRKFGGRGIIDIKNLHYTQVDNLRTYFLAKAEVSDLHKAIVNIPQSGTPLQLYNKQFNPKLKIVTDDQKLECWKKKALHGKFPNILQQHHVDRDASCTWLTKGNIFGETEGFLIAIQDQIIKTRNYSKFILKETIDSDKCRLCNQATENIDHITGGCNVLANKEYTHRHDNVAKHVHQQLALKYNLINTYTPYYQYKPKNVIENNIAKLYWDRDIITDRTILSNRPDIILSLKPSKTTYLIDISVPNTHNLKQKHTEKIQKYINLADEIKQMWHQESVRIVPIIISSTGVVPKTLKLALKLLDLHENTYIPLQKSIVIDTCSIVRRFLNPTTLTLQNNCHPDANAHADFTRIHHTSHNHP

SEQ ID NO: 1267 - protein, 1344 aa, Lycas argentea
MRLRNRRLPQAGTHTGESRSEPSGSGRPTYSGGGNVSLRSAQSSTVAATVNTSPPTYHSPSPTSSTHSLFQSPSSSPHSYELHHSSRSTTTSPLSCDVAQEARANSLVPTADITSPTRVLPNNSITSVDHNTHSSLHDINTPARSVLQDMLPATTLAGKSRQRMKWTKDINTELLRCYYTVTLCETDMTAWRPLLHQKFLERFPELSHISEQRLSDQIRVIHRNNRIPPNDRETIKQTISQTLPSSNTVSNIVETQDTLNSHTHNNTQEDIQDTQNIYNTPNTHTHTRDHNDYNQLTIPTQTHPLEVNEHIQTQEHQPRNNTVAPIEYEKIENTFKEMIIKYTGTDPTLRPTIPKLQTSRQIIKTVNTVNQIVKKHLHDRDNITLVEVHEAIYCAAVTVTTLHTKQHKNAVDRTSLKSDNNNTHKQKEPQWKRRIENKITALRKEIGLLTQYLNGNLSQKKQLKLNPYNKTRQDIIELLDLNKQKLQAQAKRLNRYKISNKRRSDNILFKTNQKVFYRNLNEEHITVTQQPDIAQVQKYWEEIWSKPVQHNTHRSWIELEEREMDNIESMTKITISKDEVTLAIKRTLNWKAPGPDKIQNYWIKYLTSTHIHIANTLNHLIQNPHEMPAFFTHGVTYLKPKDNDTANPAKYRPITCLPTIYKLLTSIITHKINTHISTNNIIPEEQKGCSKGSMGCKEQLIIDAEIHNEVKVKNRNLYYSYIDYQKAFDSVPHSWLLHVLKVYKIDHHIIQFLQYAMTKWTTKLHLKTNNTTLSTSHIKIARGIFQGDSLSPLWFCLALNPLSRILNNTTNGYTIDKENKIKLTHLLYMDDIKLYASSKQDLEQLLRLTEQFSTDIKMTFGTSKCKINSIIKGQHSKTDPFELELQGGKIDSMEPRETYKYLGYQQSTSINHTDIKNTLKTKYKQRLQKIFKTQLSARNIVKAVNTYAVPILTYSFGIVKWSDTELNALNILTRSVSNKHNIHHIHSALQRFTLKRQLGGRGFIDIKNLHYTQIQNLRTYFTRKANDSTLHKAIVNMPHPGTPLQLHNDHFNPKTKIISEEQKIENWKKKALHGKYPHQLEQEHIDKKASTTWLTKGNIFSETEGFLVAIQDQVIKTRNYSKFILKEAVETDKCRLCHKYTESIDHITGGCSTLANKEYTHRHDNVAKYIHQQLALKHKLTDTHTPYYKYKPKSVLENSSVKLYWDRDIITDRTILSNRPDITLTLKSSKTTYLIDIAIPNTNNLKQKHTEKIQKYIPLADELKQMWHQETIKIVPIIISSTGIIPKTLHAALKMIDLHPNTYIPLQKSVIIDTCSIVRRFLNPTSLSYNLPTDTQSSQDHHSP

SEQ ID NO: 1268 - protein, 1332 aa, Quadrus cerialis
MRLRNRIIPQAGTREGESRPEPSSSGCPAYSGVGNVSHMTVQSHTVTVNNNNNVTPLHINPSSSSPISSTHSLFQSPPSSPQSYEVDSTLSRSNTTTPLSYDVTQEAYANSPASISDNTYHARVLQNNTDNRVHQHTNSSTSNINTPARSVLQDMLPATTLAGKSRQRMKWTDQINKDLLRCYYMVTQNETNLTAWRPLLHRKFLEMVPELSHLSEQRLADQIRVIHRNNRIQASEREAIKQSLCPTILNSQNTSNQNTSPTNTLNQSPLDTQSTSQHHNSEHISSITQQTENSRYLTYQNFTNTEHTETQTLDTSTQLASADYKTLENTFIEMLIKYTGTDPSLRPTIPRLQTSRISIKAISALNEIIDRHIQTKENLPIDEIHIIIYCAAQTITAHTRNKLKISTFDTNGNKLKENKPRWKKRLENKITLLRKDIGQLTQYLKGNLTHKKQQKINPNNKSKNEIVELLDINKQKLQAYSKRLRRYKISNQRKTHNKLFNTNQRRFYQGLNSENIQITEPPDKEDLQTYWKKLWSKPVNHNTHMIWKEIEEHETENISPMQEIAIDKNDVSLAIKRTLNWKAPGPDKIQNYWIKYFTSTHEHIAKAFNHLMHNPQETPPFLTHGITYLKPKDDDTTNPANYRPITCLPTIYKLLSSIISHKLHIHITQNQIIPEEQKGCSKGSKGCKEQLVIDTEIHNQVKQKHRNLFYAYIDYQKAFDSVPHSWLTHILKIYKVNNRLINFLEHTMKHWATKISLNTNKTSLCTHPIKIARGIFQGDSLSPLWFCLALNPLSKILNNSGNGYVIDRDTNIKITHLLYMDDIKLYAANRTQLDHLLQLTEQFSTDINMTFGINKCKINSIIKGQHKNTYQFDLSMQGGKIDSMEPKETYKYLGYHQSTCINHTEIKNTLKAKYKHRLHQILNTQLSARNKTKAINTYAVPILTYSFGIVKWSDTELEALNTTTRTLSNKHNIHHIHSAVQRFTLKRKLGGRGMIDIKNLHYTQIHNLRAYFLTKAGQNGLFKAIVNLYQTGTPLQLHNKQFDSQKKLLKDEQKIEEWKKKALHGKYPYQLEKDHVDRNASVTWLTRGNIFGETEGFIVAIQDQIIKTRNYSKYILKERIETDRCRLCHQTTETIDHITGGCSILAQREYTHRHDNVAKHIHQQLALKHKLIDSYTPYYQYKPKNVIENSSAKLYWDRDIITDRTILSNRPDITLTLKSTNTTYLIDVAVPNTHNLQQKHTEKIQKYLPLADEIKQMWHQETVRIIPIIISSTGVIPKTLKTALNLLNLNENTYIPLQKSIIIDTCSIVRRFLNPTSLTLQQDIQQNNHSTS

SEQ ID NO: 1269 - protein, 1313 aa, Eburuncus unifasciata
MQLRSRKIPQAGTREGESRPGPSSPGSPTYSGGGDASHSATQPRAVVATPTHTISNSSTPVPSTHSPFETSSSSIHSYERRSSLQSTSSSLSCDASRNSITDSPVPIADITNHTRETNQNTDNRVNHDTHASLIINTPARSVLQDMLPATTLAGKSRQRMKWTNDINRELLRCYYIVTRNETDLTAWRSLLHKKFVETIPELNHLSEQRLSDQIRVIHKNNRIQIQERENLKKEVLLLQTPLNNIDESIAINETTHLSTTSTQNYNLHTSTFNQTIDSNHVRPFLQNTNTTTQEFQPVLNTSYNKTQNPDTDCQKGIIDKTKIQDTFKEMLIKYSDTDPLFRHIIPKPKITRKLIKITQVTNDIIYEYLQEKEIVTLKDVHETIYCAAQTITTINAENFNNLHPKKDNTNKSQWERRLNNKIVTLRKEIGQLTQYLKGNLTRKKQVKVNPNNKSTDEIQEELDKKTQKLQAYSKRLRRYKISNQRKSQNILFDTNQKQFYQTLNNERIQISVPPPKEHIQNYWKNIWSKPTQHKTHALWEEVERKEMANIDAMPEIIILKNDIEQAIRKSLNWTSPGPDKLHNYWIKYLTSTHEHIANTFNYLIQNPHETPTFLTNGITYLKPKDDDTTNPAKYRPITCLPTIYKLLTSIIAEKINRHVTINKIIPHEQLGCKRGSKGCKEQLIIDTEIHNQVKQKHRNLFYAYIDYQKAFDSVPHSWLTHILKIYKVDNKLIQFLKHAMNNWATKLSLYTSTTSICTDLIKIKQGIFQGDSLSPLWFCLAINPLSRILNKTNYGYVIDREIKIKITHLLYMDDIKLYASNRQELDHLLRLTENFSADIKMSFGTQKCKINSICRGQHKVTDSFNLNIQEGIIDSMKPKETYKYLGYQQNISISHTEIKNILKAQYKHRLHKILNTQLSARNKIKAINTYAIPILTYSFGIIKWSDTDLEALNTTTRTISNKHNIHHIHSATQRFTLKRKHGGRGVIDIKNLHYTQIENLRTYFLTNAKHNNLIKAIVNMPHSGTPLQFNNKEFDPKLKILSDDQKIKVWKTKALHGKYPHQLEQDHIDQNASLSWLTKGNIFGETEGFMIAIQDQIIKTRNYTKYILKESIDTDKCRLCNQSTETMDHITGGCSILAYKDYTHRHDNVAKHIHQQLALKHNLIQSSTPYYQYKPKSVMENTNTKLYWNRDIITDRTILSNRPDITLIMKHTKTTYLIDISVPNTHNLKQKHNEKIQKYMSLADEVKQMWHQDIVKIVPIIISATGVIPKNLKSALQLLELHENTYIPLQKSIIIDTCSIVRRFLNPTSLNMQ

SEQ ID NO: 1270 - protein, 1246 aa, Boloria selene
MESNNNDKRIGPLPGGDRRGTSGAGAGRHSMRSASGRQLHRQAEVNKNATAYTNIDTQPTTSTNPTSSVLQEMMPATTLGGRNRQRMKWTDEINIELLRCYYTVTNLETNLTTYRPSLHRMFVQKYPELHFITEQRLSDQIRVIHRNNRIPATARDKIKKSIEEIINRDNNEHSENTMQNQSFTNIQDNNTTEGETNIETHTAQTQLYTQHTQYSNDTDTLTREYNSTQSQERNVENNTHIQNENHTQLEYEQISATFTEMLIKFKGTDPTLRPRIPKLQTSRKTIKTVNTINQIIKLHLQNNDDTTIENIHDIIYCGAKTVTSIHTEKEKLSENKFKKIRTNDNKPAWQKRIERKIAKLRKEIGQLTQHLNGKLSQKKQKKLKVYEKDTNEVVDELDKNKQKLAAQSKRLRRYKLSNLRKEQNKTFNFNEKVFYRNLQQTQTITQPPDITQVQNFWEDRWGNCVHRNHNAKWIESEENKVKHMENMTQFVIDTNDVKTAIRKTLNWKAPGPDKIQNYWIKYFTSTHAHLAKALNTLIQEPQNIPTFLLQGITYLKPKDTDTTNPAKYRPITCLPTIYKLLTSIIAYKLDIHITQNQIIPEEQKGCCKGSKGCKEQLVIDTEIHNQVKQKHRNLFYAYIDYEKAFDSLPHSWLIEILKLYKVDKVLINFLENAMKEWTTTLTLRTEKENLTTTPIKIARGIFQGDSLSPLWFCLAINPLSSILNSTEYGYTIDREAKTKITHLLYMDDIKLFASNRIQLNHLLKLTEQFSNDIKMNFGTGKCKINSILKGQHKKTEAYNLTLHEGTIGAMDSTEIYKYLGYQQSTCLNHTDIKQTLKTKYTQRLNTILKTHLSARNKTKAINTYAVPILMYSFGVIKWSDTDLNALNTLTRSQAFKHHIHHIHSSTERFTLQRKQGGRGFIDIKNLHYTQIENLRSYFLSKSNNSKLHKAITTMTTAGTPLQLNDNNYEPVRKVIQEQKKIEDWKKKALHGKYPHQLEQNHIDKEASNTWLTKGNLFAETEGFFIAIQDQIIKTRNYSKYIIKESIETDVCRLCHQSKETIEHITGGCKILATKEYIKRHDNVAKQIHQILALKYKLINTYTPYYKYTPRNVLENQTAKLYWNVDIITDKTIACNRPDITLTLKSPKITYLIDISIPNTENLKNKHQEKIQKYIPLADEIKDMWHQDLIKIVPIILSSTGVVPKTLHKSIELLELHKLTYIQLQKSIVLDTCSIVRRFLNPSSLSP

SEQ ID NO: 1271 - protein, 801 aa, Thymelicus sylvestris
MENIEPMPEITISKEDVTHTIKKTLNWKAPGPDKIQNYWIKYLTSTHIYIANTLNNLIKNPHDLPTFLTQGVTYLKPKDNDTTNPAKYRPITCLPTIYKLMTSIITHKINSHISINKIIPEEQKGCSKGSMGCKEQLIIDAEIHNQVKHKNRNLFYSYIDYQKAFDSVPHSWLLYVLKIYKIDNSVIHFLQHAMSKWTTKLNLKTNTTTLSTSQIKIARGIFQGDSLSPLWFCLALNPLSRILNNTPYGYIINRENRTRITHLLYMDDIKLYASNRQELDHLLRLTEKFSTNIKMTFGTSKCKINSITKGQHSRTNSFELELQGGTIDSMEPRETYKYLGYQQSTSLNHTDIKNTLKNKYKQRLNKVLSTQLSARHMVKAVNSYAIPILTYSFGIIKWTDTELNVLNTLTRTISNKHNIHHIHSASQRFTLSRKLGGRGFIDIKNLHYTQIDNLRTNFLQKATNSTIHKAIVNMPHPGTPLNLNNNHYDPKTKIQNVAQKIKNWKDKVLHGKYPYQLEQDHVDKNASTAWLTNGNIFSETEGFIVAIQDQVIKTRNYSKYILKETIETDRCRLCHKYTESLDHITGGCSVLANKEYTHRHDNVAKYIHEQLALKYKLTDTHTPYYKYKPMSVLENNTVKLYWDREIITDRTILSNRPDITLTLKSKKTTYLIDIAVPNTNNLKQKHIEKIQKYVPLADEIKQMWHQDTIQIIPLIISSTGIIPKTLHTALKTLDLHPKTFIPIQKSIVIDTCSIVRRFLNPTLLTLQNMPDSNTLTFTSSHTQAMSTDTHSAQNAHNHQSS

SEQ ID NO: 1272 - protein, 1183 aa, Apodemia zela
MLFIYNNNNNNMHAKFVEKFPELNHLSEQRLADQIRVIHKNNRISTPEREHIKSSVSQIIDQTHNIHHSNRTDIQTATNNPTSQHTSTDLFTNTGSLHYLTSTGTQQSNIITPSCQTVESSEHIMQTPQTQESIEIRIDPTYYEKIKNTFTESLIKYTGTDPSLRPPIPKLQITRHTIKTINTVNEIVSNHLQTKDTVYLLEELHEIIYSAALTVTIIHSRKNTKSENHIIHTKNNVMNKTKVPQWEKRISNKIVGLRKEIGQLTQQLNGKLSQKKQRLLNVISKSRDEIVEQLDLNKQKLLAYAKRLRRYKKSNERKAHNNLFNNNQKLFYQKLNTEQIKITENPDIETIQTYWKNIWSKPIQHETHTPWVEIEDQETRNIDQMDQIIIDEEDVTRSIKKTLNWKAPGPDKIQNYWLKYLTSSHKYIASTLNDLIHNPQKIPKFLTQGVTYLKPKDHDTTNPSKYRPITCLPTIYKLLTSIITHKLNIHITQHKIIPEEQKGCSKNSRGCKELLVIDSEIHSQVKHKHRNLYYSYIDYQKAFDSVPHSWLLHILKMYKVDSNIIKFLQHAMKKWTTTLNLKTSDKILSTRPIRIARGIFQGDSLSPLWFCLALNPLSRILNRTDHGYKIDRDNNIKITHLLYMDDIKLYAASRNQLDQLLRLTEQFSNDIKMTLGTDKCKVNSIIKGQHNQTHPYDLELNRGLIESMEPTDTYKYLGYQQSTAIPHSDIKNSLRSKYKQRLTKILNTQLSARNKTRAINTYAIPILTYSFGIIKWSDTELNALNTATRVSCYKHNIHHIHSSVERFTLKRKLGGRGFIDISSLHHSQIENLREYFYKKSHESSLHKAIVNISNPGLPLQLNNRLFEPKHKIVSDIQKLENWKKKALHGRYPHQLDQDHIDKNASSSWLTKGNLFGETEGFLVAIQDQIIKTRNYTKFILKQTIETDKCRLCHQTTETIDHITGGCSVLANKEYTHRHDNVAKHIHQQLALKFKLLESYTPYYKYKPKNVLENNIAKLYWNRDIITDRTVLSNRPDITCTLKSTKTTYLIDISIPNTHNLKQKHAEKIQKYISLADEIKQMWHQEIVTIIPVIISSTGVIPKTLHTSLKILELHKNTYVALQKSTILDTCAIVRRFLNSTSLALQNVQDSNTIHLTTTHTPIRDTQHTSTHLQAPITLHTNTS

SEQ ID NO: 1273 - protein, 1266 aa, Telemiades fides
MLHRKLMQIDITDHTRASENSLSNRVTHNTHIPTHNTNTPARSVLQEMLPATTLAGKSRQRMKWTEQINKELLRCYYIVTQNETNLTAWRPLLHRRFIATIPELSHLTEQRLADQIRVIHRNNRISAHEREQMKQSVSLLLPTPNSTINVEQQSNTNNLADNFQQNTTIQNTTTQNASTQNTTTQNTTTENTPTQNTTTQNTTTQNTIQNNSSQNQLPQQIENEHIQTQVYETPNRLADSIEYEKIENTFKEMLIKYTGLDPTHKPTIPRVPITRNVIKTINTLNEIIDIYFRTKDTITLEDIHGIIYCAAQTVITLHNRSVKMLDNTNNNKSYEGNKQRKPQWERRIEAKIINLRKEIGQLTQYINGNLSQKKQEKINPNNKNRDAVLEQLDKSKQKLQAYSKRLRRYKISNERKSHNRLFNTNQKLFYQKLNTEQIKVTQPPHKDDIQNYWENIWSNPVQHNIYSSWSKIEQEEMVNINPMSGINIDKNDVLQAIKKTLNWKAPGPDKIQNYWIKYLTATHQHIANAFNRLINNPLETPAFLTQGLTYLKPKDNDTSNPAKYRPITCLPTIYKLLTSILAHKLNTHITQNKIIPEEQKGCSKGSRGCKELLVIDTEIHNQVKQKHRNMYYSYIDYQKAFDSIPHSWLIHVLKIYKVDNTLVQFLKHTMKNWTTNLTLQTNNTSICTNKIKILRGIFQGDSLSPLWFCLALNPLSRMLNNTDFGYIVDKDTKIKLTHLLYMDDIKIYAANRQQLDHLLRLTENFSKDIKMTLGTDKCKINSIIKGQHKMTDPYELEMQRGTIDNMELKQTYKYLGYQQSTSINHTDIKNELRRKYKQRLHKIFNTHLSARNKVKAVNTYAIPVLSYSFGIIKWSDTELEALNTITRTTSNTHKIHHIHSAVQRFTLKRKLGGRGFIDIKNLHYNQIDNLRTYFLTKAKESTLHNAIVHLPHSGTPLQLNNNNYDPKLKIMSDEEKLENWKKKALHGKYPYQLQQNHIDHNASCTWLTKGNIFGETEGFLVAIQDQIIKTRNYSKYILKETLDTDKCRLCHQNSETIDHITGACSVLANKEYTHRHDNVAKHLHQQLALKYKLLESYTPYYQYKPKNVIENNSVKLYWDREIITDRTILSNRPDITLTLKHCKTTFLIDITVPNTHNLTQKHTEKIQKYMSLANEIKLMWHQESVKIVPIIISSTGVVPKSLKTALKLLDLHENTYIPMQKSIVIDTCSIVRRFLNPTTLTLGNNHNTAHNSTPENTLTHVTQTHS

SEQ ID NO: 1274 - protein, 1160 aa, Narcosius parisi
MLPATTLAGRSRQRMKWTNEINKELLRCYYVVTQNGTNLTAWRPQLHRIFSEKIPELSHLSEQRLADQIRVIHKNNRIPAPERELIKQSVSLLIPSTSNSLNDHVIARNIDNQPNINPTPSTNNHQSVTDSHSQILNSQHTVTITHHTILTTQAHQPSQNNEHMHTQDFESTNRSLDSVDYKKIEEVFREMLIKYTGTDPILRPTISKPQTTRNFIKTVNFINEIIDKYLQTKNSITLEEIHELLYCAAQAATTIHKKHFKTLENSTNNNNRSERKPQWEKRIENKILTLRKEIGQLTQYLKGNLNQKKQQKLNPNNRRKDEIVEQLDYNKQKLQAYTKRLRRYKISNERKSHNKLFNTNQKLFYQKLNSEQIQITQPPDKTDIQNYWKNIWSTPVQHNTHTSWSEIEKQEIEKIDPMPEITIDKDDVLLASKKTLNWKAPGPDKIQNYWIKYLPATHEHIANAFNRILCNPQDTPYFLTQGITYLKPKDNDTTNPAKYRPITCLPTIYKLFTSIIAHKLNTHITRNHIIPEEQKGCCKGSKGCKEQLVIDTEIHTQVKQKHRNLYYSYIDYQKAFDSIPHSWLIHILEIYKVDNRLIQFLLHTMNNWTTKLTLHTKNLSLCTQKIKILRGIFQGDSLSPLWFCLALNPLSRILNKSGSGYVIDQNTNMKLTHLLYMDDIKLYAANRQQLDHLLRLTENFSTDIKMTFGTNKCKISSIIKGQHQETDPYQLETQGGTIDNMEFRETYKYLGYQQSTSINHTDIKNKLKAKYKQRLHKILNTQLSARNKIKAVNTYAIPVLTYSFGIIKWSDTELEALNTATRTISNKHNIHHIHSAVQRFTLKRKLGGRGFIDIKNLHYTQIDNLRTYFLSKANESALHKAIVYSPQSGTPLQLNNRQFDPKLRILKDDQKLENWKKKALHGKYPHQLQQDHIDYNASCSWLTKGNLFGETEGFLVAIQDQIIKTRNYSKYILKEAIDTDKCRLCQQATETIDHITGGCSILANKEYTHRHDNVAKHIHQQLALKHKLLNSYTPYYQYKPKNVLENDKAKLYWDRDIITDRTILSNRPDITLTLKPSKTTFLIDISVPNTHNLKQKHTEKIQKYIPLADEIKQMWHQESVRIIPIIISSTGIIPKTLKNALKLLDLHENTYIPMQKSIVI

SEQ ID NO: 1275 - protein, 792 aa, Piruna pirus
MPEIKIDKNDVTHAIKKTLNWKAPGPDKIQNYWIKYLTATHEPLANAFNYLIQNPQEIPSFLTKGITYLKPKDKNTTNPANYRPITCLPTIYKLLTSIISHKLNTHITQNGIIPEEQKGCSKGSKGCKEQLVIDTEIHNQVKQKHRNLFFSYIDYQKAFDSVPHSWLIYILKLYKVDNRLVQFLQHAMTNWTTKLHLQTNNSILCTQPIKILRGIFQGDSLSPLWFCLALNPLSKILNKSGHGYVIDREKNIKLSHLLYMDDIKLYAANRKQLDQLLQLTEKFSTDIKMSFGTNKCKINSIVKGQHKETNTFNLNIQGGKIDSMEATDTYKYLGYQQSTSINHTDIKNTLKTKYKQRLYKILKTQLSAKNKIKAVNTYAVPILTYSFGVIKWSDTELEALNTATRTAFNKNNIHHIHSAIQRFTLKRKLGGRGVIDIKNLHYTIIDNLRTYFFAKANSSTLHKTMVNIPLSGTPLQLNNNLYDPKSKIVKDEQKIENWKKKAIHGKYPHELDQDHIDRNASCTWLTKGNIFGETEGFLVAIQDKIIKTRNYSKYILRERIETDKCRLCHQSTENIEHITGGCPILANKEYTHRHDNVAKHIHQQLALKYKLLKSYTPYYQYQPKKVIENNTARLYWDRDIITDRTILSNRPDITLTLKSTKTTLLIDIAVPNTHNLKQKHTEKIQKYMSLADEIKQMWHQESVRIVPIIISSTGVIPKTLKSALKLLNLHENTYIPMQKSIIIDTCSIVRRFLNPTTLSLQDEQQTNPHTRTQHLPTLATATTHNTSNTRDS

SEQ ID NO: 1276 - protein, 1365 aa, Autochton pseudocellus
MRLRNRQIPQAGTREGESRPGPSSSGCPTYSGGGNVSHKTAQSSTVAVDKSLTPSHPSSPISSTHSLFPSPSSSPYSFQFQPSSSRSSTITSLSCDVAQEAHANSPVPTTDSTNPTRVTQNDQPNRVTHSTHSSSHITNTPARSVLQDMLPTTTLAGKSRQRMKWTDEINKELLRCYYIVTQNETNLTAWRPQLHRLFAENVPVLSHLSEQRLADQIRVIHKNNRIPAPEREQIKQSVSFLISSSSNSLNNQAIARIDDDDHSNINATLTTNNQLISDSHNQTLNPQHTVTITHDTITNTQAYKSCESSEHMQTQDFEPINRLLDSMDYKKIQEVFREMLIKYAGTDPTLRPNISKPQTTRNVIKTVNSINKIVDKYLQTKDFITIEEIHEVIYCAAQTVVRIHTNRVNILEKSTKSNNNNQRKPHWEKRIENKIVTLRKEIGQLTQYLNGNLSQKKQKKLNPNNGSKDEIIEQLDNSKQKLQAYTKRLRRYKKSNERKSHNKLFNTNQKLFYQKLNSEQIHVIQPPDKIDIQNYWKNIWSIPVQHNTHSSWTEIEEQEMENIDPMSEITINKDDVLQAIKKTLNWKAPGPDKIQNYWIKYLPATHEHIAHALNHILCNPQDTPYFLTQGITYLKPKDDDTTNPAKYRPITCLPTIYKLLTSIIAHKLNSHITRNHIIPEEQKGCCKGSKGCKEQLVIDTEIHTQVKQKHRNLYYSYIDYQKAFDSIPHSWLIHILKIYKVDIRLIQFLQHTMKNWTTKLTLHTNNISLSTQKIKILRGIFQGDSLSPLWFCLALNPLSRILNKTGYGYVINKDTNIKLTHLLYMDDIKLYAANRKQLDHLLRLTENFSTDIKMTFGTNKCKINSIIKGQHQKTDPFQLETIGGTIDNMEFRETYKYLGYQQSTSIDHTEIKNTLKTKYKQRLHKIFNTELSARNKTKAVNTYAIPILTYSFGILKWSDTELEALNTVTRTISHKHNIHHIHSAVQRFTLKRRLGGRGFIDIKNLHHSQIDNLRTYFLLKANESALHKAIVHLPQAGTPLQLNNKQFDPKLKILKDDQKIENWKKKALHGKYPHLLEQDHIDYNASCTWLTKGNIFGETEGFLVAIQDQIIKTRNYAKYILKEAIDTDKCRLCHQNTETIDHITGGCSVLANKEYTHRHDNVGKHIHQQLALKHKLLESYTPYYQYKPKSVLENNTAKLYWDRDIITDRTILSNRPDITLTLKSSKTTFLIDIAVPNSHNLKQKHTEKIQKYIPLADEIKQMWHQETVKIIPIIISSTGVIPKTLKTALKLLDLHENTYIPMQKSIVIDTCSIVRRFLNPTTLTLQTHQDTHSGTPTQDSLPRATTQTHTNTHTQCNKHTHHRPP

SEQ ID NO: 1277 - protein, 1405 aa, Parapoynx stratiotata
MANGAIVEHNMRLRNRQIPQAGPQTRESRPAPTGAGSPIVSEGGNVSQSTAQSSTVAGNRNYSHKSTSPSLAHSPTSSVSLFQSPNSSPNSYNYYSTPSSSSSYSHSNKTSPMSNNAAQEAYATFPLPILDNTNPTHTSYLSQSNRVDQITHTINTHTNTPTRNVLHEMLPATTLAGKSRQRMKWTDEINKELLRCYYIVTLCETDLTAYRPLLRQKFLEVFPELNHLTEQRLADQIRVIHRNNRIQADEREQIKQTVSLTNAINTNIEYHRNPNVNANCIEPEYNTVENINLHTALTNTSTSQTQESTTSTQQTSNTAILALRHLDNTEHSNTLSIPVHNSEETSILAEPTTSHELKNTFEEVLIKYTDADPTYRPPIPKPQMSRYTIKTVNCLDFLIKQHLQNKTTVTLYEIHNAIYCAAITVTTINSKQGKKIHINTKNTNNTHTNTTHTNSTQNNTPTNTKHTAGPKIPQWQRRIENKITGFRKEIGQLTQYLNGNLNQKKQLKVNPNNFSKDEIIDRLDNYKQKLQAYSKRLRRLKVSNQRKKDNSLFSTNEKLFYQNLNSEHIKITQPPNSIDIQRYWEKLWSMPVQHNTSTSWAEIEEEETRDIETMPEIIITKDDITQAIKKTMNWKAPGPDKIQNYWIKYLPSTHEYLAKIFNDIIQNPQDMPDFMTQGVTYLKPKDNDTTNPSKYRPITCLPTLYKLLTSIISQKLNMHVTQNKIIPEEQKGCIKGSRGCKEQLVIDTEIHNKVKQSHGNLFYSYIDYQKAFDSVPHSWLIHILYRYKVDNKLIHFLQCAMNNWITKLSLKTNDSTLSSKPIKIKRGIFQGDSLSPLWFCLALNPLSRVLNKTVSGYTIDKQNNTKLTHLLYMDDIKLYAANRDELNHLLQLTDKFSSDIKMTFGTNKCKINCIIKGKHSRLEPFNVEQQGGIIDSMDPKESYKYLGYQQTTSINHTEIKNNLKAKYKQRLNKLLNSQLAARNKIKAINTYAIPILTYSLGIIKWSETELEALNIATRTACYKHNIHHIHSAVQRFTLKRKLGGRGVIDIKNLHYKQIDNLRTYFLKKAKESELHRAIANLPYSGTPLQLNNGQYDPKLKIITDEKKIELWKTKALHGKYPHQIEQDHINRTASCTWLSKGNIFGETEGFLIAIQDQIVKTRNYSKYILKENIATDKCRLCHQTTETIDHITGGCSILANKEYTHRHDNVAKHIHQLLALKHKLLDTYTAYYKYNPKNVLENNSAKLYWNRDIITDRTMLSNRPDITLTLKTTKITYLIDIAVPNTHNLKQKHTEKIQKYIPLAEEIKQMWHQDAVNIIPVIISSTGVIPKNLSVALKQLDLHENTYIPLQKSIIIDTCSIVRRFLNPTTLLRQNNEQTDTLDTLTHTNLVHHTTQSHTTQLNTT

SEQ ID NO: 1278 - protein, 791 aa, Racta chiria
MPELTINKDDVTLAIKNTLNWKAPGPDKIQNYWIKYFTATHEHIANTFNNILNNPQNIPTFLTQGVTYLKPKDSDTTNPSKYRPITCLPTIYKLLTAIIAQKLNTHITRNRIIPEEQKGCSKGSGGCKEQLIIDTEIHNQVKQKHRDLFFSYIDYQKAFDSVPHSWLIHVLQIYKVDSKLIQFLKYTMNTWTTKLNLRTSNTTLISPKIKIARGIFQGDSLSPLWFCLSLNPLSRILNKSSCGYLIDKNNDTKITHLLYMDDIKLYAASRQQLDHLLKLTEEFSSDIKMTFGTDKCKVNSIIKGQHKETYPFNLEFQDNTIDSMAPKETYKYLGYQQATSINHTDIKNTLKAKYKQRLTTILKTQLSARNKVKAVNTYAIPILTFSFGIVKWSDTELEALNIATRSASNKYNIHHTHSAIQRFTLKRKLGGRGFIDIKNLHYSQIQNLRTYFLNKVNNSQLHKAIANVSPSGTSLQLNNNNFDPKLKILRYDEKVENWKKKALHGKYPHQLDQDHVDRVASCSWLTKGNIFGETEGFLVAIQDQVIKTRNYSKYILKESIENDKCRLCHQTTETIDHITGGCSILAKKEYTHRHDNVAKHIHQLLALKYQLLNKYTPYYKYKPNNVLENNSARLYWNRDIITDRTVLSNRPDITLTIKSSKTTYLIDVAVPNTHNLKQKNTEKVQKYICLADEIKQMWHQETVRIVPIIISSTGVIPKTLHTAIKLLELNKNTYIPLQKSIVIDTWSIVRHFLNPTILTLPNIQDIILSKTYTRHSTHSKIVHQIIKPYLI

SEQ ID NO: 1279 - protein, 1367 aa, Dardarina dardaris
MRLRNRRIPQAGTREGESRPGPSGSGCPTYSGGGNASHTAQSQAVAVDKTTHNTSTHNRHTPDSSPISSTHSLFRSPSSSPQWYESHHSRSRSTTATPMSCDVAQDALANPPAPNTDITNRTRAQQNNTTNRVAHNTHIPTLNTNTPARSVLQDMLPATTLAGKSRQRMKWTNEVNRELLRCYYEVTQGETNLTAWRPALHQRFTQIVPELSHLSEQRLSDQIRIIYKNNRIPATERENIKHTVAIMLSSPSDTNQHINTSNTEQQINASPTTNNQQTITCNTTTISPYILEHLTNPIDLQRPQTATQQQQHETTHIYEYVEQDQTQNSDMTDEPQNTLDYENIQNIFTEMLLKYLGTDPTLRPIIPKLHVSRQIVKTIHSLNKIIDKHLLNKEIITIEEIHGIIYCAAQTIIFIHNTTHNNPANVKNNTNNSTKISQKKPKWETRIENKIKTLRKEIGQLTQYINGNLTQKKQRKVNPNNKNIDDIREQLDKSKQKIQAYSKRLRRYKLSNERKTHNTLFNSNQKLFYQKLNNNQIHIEQPPKIDDIHNYWKNLWSKPVQHNTNISWIEIEEQETSKIDPMPEIKIDKNDVTQAIRKTLNWKAPGPDKIQNYWIKYLTATHEPIATAFNYLLHNPHDIPSFLTHGITYLKPKDNDTTNPSKYRPITCLPTIYKLLTSIISQKLNTHITLNQIIPEEQKGCSKGSRGCKEQLIIDTEIHNQVKQKHKNLFFSYIDYQKAFDSVPHSWLIYILKLYKVDNNLIKFLDQTMKNWTTNLHLRTKNISVSTQPIKILRGIFQGDSLSPLWFCLALNPLSNILNKSGHGYVLNRDNNTTITHLLYMDDIKLYAANRQQLENLIKLTEKFSTDIKMSFGTNKCKINSITKGQYQKTDALDLTIQGGKIDSMDAVETYKYLGYQQSTFINHTEIKNTLKIKYKNRLNKILKTQLSAKNKTKAVNAYAVPILTYSFGIIKWSDTELEALNRSTRAAFNKHNIHHIHSAIERFTLKRKLGGRGVIDIKNLHYIQIDNLRNYFLAKANVSALHNAVINMQPSGTPLQLNNNSFNPTHKIVTEEEKIERWKRKALHGRYPYDLEQDHVDRNASCTWLSKGNIFAETEGFLMAIQDKIIKTRNYTKYILKEAIETDRCRLCHKSTETIEHVTGGCSILANKEYTHRHDNVAKHIHQQLALKYKLEKSYTPYYLYKPKNVIENNTAKLYWDRDIITDRTILSNRPDITLTLKSSKTTYLIDISVPNTHNLKQKHTEKIQKYMTLADEIKDMWHQDSVKIVPIIISSTGIIPNTLKSALKLLGLHENTYIPMQKSIVLDTCSIVRRFLNPTTLALQDEQHRDPNTSTHNARVPTNTPTLNI

SEQ ID NO: 1280 - protein, 1382 aa, Astraptes hopfferi
MRLRNRQIPQAGTREGESRPGPSSSGCPTYSGGGNVSHKTVQSSTVAVDKLHTPSHSLSPISSTHSLFPSPSSSPYSYQFQPSSSRSSTITPLSCDAAQEALANCPVPTTDSINPTRVLEDNAYNRVNHDTHSLSPIINTPARSVLQDMLPATTLAGKSRQRMKWTDEINRELLRCYYIVTQNETNLTAWRPQVHQKFAVTFPELRHLSEQRLADQIRVIHRNNRISLQEREYIKQSVSLLLPTTNRCNVDPITNNIETSLNTSLITNNNEQTTLSPSQILNSQHTITLNQSHTQHSHTHSHQINTTTRTSHLYENSEHNETQNPETTNKPLDPIDYNKIKNTFSEMLIKYTGTDPTLRSTIPKLQITRNSIKTVNTMNEILGIHLSTKNFVTLVEIHEIIYCAAQTIVTLHSKHSKKSESSNNNNPNAIKQKKPHWETRIEKKIATLRKEIGQLTQYLNGNLAHKKQRKLNPNNKSRNEIEEELDNDKQKLQAYSKRLRRYKLSNQRKSHNKLFSNNQKLFYQKLNTEQITITQNPNKDDLHNYWKNIWSKPVQHNTHTSWNDIEDQEIEKIEPMSEIHISKDDVFQAIKKTLNWKAPGPDKIQNYWIKYLPATHGYLANIFNHLMSNPQDTPSFLTHGITYLKPKDNETTNPAKYRPITCLPTIYKLLTSIISHKLNTHITQNHIIPEEQKGCSKSSKGCKEQLIIDTEIHNQVKHKHRNLYYAYIDYQKAFDSIPHSWLLQILKIYKVDVRLIEFLQDTMKNWTTKLSLRTNNTTISTQPIKILRGIFQGDSLSPLWFCLAINPLSRILNKTGYGYVIDRESKIRVTHLLYMDDIKLYAASRHQIDHLLKLTENFSTDIKMIFGINKCKINSIIKGQHKETHPFDLEIQGGKIESMEPKDTYKYLGYQQSTSINHTHIKNTLKTKYIHRLHKILNTQLSARNKVKAVNTYAIPILTYSFGIIKWSDTELEALNTITRTASNKHNIHHIHSATQRFTLKRKFGGRGFIDIKNLHYTQIDNLRTYFLTKAKESNLHKAIVLLSHPGTPLQLNNCEFDPKLKIIKDEQKIQDWKKKALHGKYPHQLEQDHIDYTASCSWLTKGNIFGETEGFLVAIQDQIIKTRNYSKYILKETIDTDKCRLCHQTTETIDHITGGCSVLANKEYTHRHDNVAKHIHQQLALKYNLLETYTPYYQYKPKNVLENKTTKLYWDRDIITDRTILSNRPDITLTLKSAKTTFLIDIAVPNSHNLKQKHTEKIQKYIPLADEIKQMWHQESVRIIPIIISSTGLVPKTLKTALKLLDLHENTYIPIQKSIVIDTCSIVRRFLNPTSLTLQACQNTHTSTVTQNSSTHTHNTQTHNAPNTLIIAHSNLTNSRESGYL

SEQ ID NO: 1281 - protein, 1365 aa, Ypsolopha scabrella
MRLRSRNILPQAGTSNGESRPEPTSSGSPTYSGEGNVSLHPAQSSTVAGQENNTPSPDMLSYTSSPISSTHSLFQSPSSSPYDFQLTSTSRSTTISPMSCDVVQEALAICPAPITGIMNPTRTSETNSHSNRVDTNTERHTTDTNTPARSVLQDMLPATTLAGKSRQRMRWTNQINHDFLRCYYMVTSCEENLTAYRPLLHQKFTETFPELSHLTEQRLADQIRVIYRNNRIPASERESIKQAVLQTITTLDNPNTNNFETQVNTNNNDVMYNQFQNSHTLEQRDNTQQTIASTPQPIIMTLSDNEITTKSASVAFQETYEHTQSQGPEIDITSEESINYQKIEDTFTEILIKYTGTDPTQRPIISKIQTTRKVIKTIKTVNEIINKHLQNKEDVTIVEIHEIIYCAALTVTTYTNSTNKEKKKEHNKTNTNINQANKKKTPQWQKRLENKIAILRKEIGRLTQYLNGNLTQKKQQKLNPNNKSRDEIVNELDNYKQKLQAYSKRLRRYKISNQRKSDNNLFNTNQKLFYRNLNSDQIEITEPPNIDEVKHYWENLWSNPLQHNSHSSWAKIEEQEVDNIDPMPEISINIDDVTYAIKNTLNWKAPGPDKIQNYWLKYLTSTHKYIASTLNHLLHNPQDIPPFLTQGITYLKPKDNDTTNPAKYRPIICLPTIYKLLTSIISHKINSHLTSNKIIPEEQKGCSKGSRGCKEQLVIDTEIHNQVKKKHRNLYYSYIDYQKAFDSVPHSWLLHVLKMYKIDNRLIQLLEYAMTNWKTKLNIRTNNTTLSTPSIKIARGIFQGDSLSPLWFCLALNPLSRILNKTGYGYNIDTGNDIKLTHLLYMDDIKLFAANRQQINHLIRLTEEFSRDIKMTFGTDKCKINSMIKGQHKETDPYILEQQTGTIDSMEPKETYKYLGYQQSTSIDHTEIKNALKTKYKQRLNKILKTQLSARNKTKAINTYAIPILTYSFGIVKWSDTELEALNTTTRTTCNKHNIHHIHSAIQRFTLKRKLGGRGFIDIKNLHYTQIINLRSYFHTKANESAIHKAIVNLPQPGTPLQLNNSQFEPKHKITTDEQKLENWKKKALHGRFPHQLDQEHIDKTASCTWLTKNNIFGETEGFLIAIQDQIIKTRNYSKYILKETIETDKCRLCNLASETIDHITGGCSTLANKEYTHRHDNVAKHIHQQLALKYKLLQSYTPYYQYKPKKVIENSSAKLYWDRDIITDRTIFSNRPDITLTLKSTKTTYLIDISVPNTHNLKQKHTEKIQKYIPLADEMKQMWKQETVKIVPIIISSTGIVPKTLKKALELLDLPIKTFIPMQKSIVIDTCSIVRRFLNPTSLPLLTNHTTPHINTTHSMPPNTQEMQ

SEQ ID NO: 1282 - protein, 1305 aa, Pyrgus malvae
MSAQYRTVAANNTNPSSYIHPHSSPSNPSSPISSTHSLFPSPSSSPHSYQLQSSSRSTTISPVSFNVAQEAYANHPVPINDNTNPTRESETSPDNRVNHHYTHSVSFNSNTPARSALQDMLPATTLAGKSRQRMKWTDNINRELLRCYYIVTQNETNLTTWRPLLHQRFTENFPELSHLSEQRLSDQIVIHRNNRIPTTERDDIKQSVSLLLSTANQEYQNNINIISSTDNNRTNTDIINQTIHSHHDPEMPTTTQNFQPPIHSGHSIQIEDSEITNIQHDTLEYTRIENTFREIVIKFSGTDPTLRPTIPKLQITRHIIKTVNTTNEIVGKYLSTKVDLTIDELHEIIYCAAKTITKLHLEKETNMTGNNTKYSDKINVPNKQKPKWEVRIENKIIKLRKDIGQLTQYLNGNLTEKKRKKLNPCNKSKNELIDQLDKNKQTLQAYSKRLRRYKLSNKRKSDNKLFNCNQKLFYQKLNTENIQVTQTPDIDDIQNYWKNIWSKPVQHTPHPPWLEMEELETANINPMAEITISKEDVSQAIRNTLNWKSPGPDKIQNYWINYLTVTHEYIAKLFNNLLQNPQETPHFLTQGITYLKPKDTDTTNPSKYRPITCLPTIYKLLTSIIAHKLNTHIKINEIIAEEQKGCRKGSRGCKEQLIIDGEIHNQVRQKHKNLFYSYIDYQKAFDSVPHSWLIHILKIYKVNNSLIQFLQHVMHNWTTKINLRTSNTTLSTHPIKILRGIFQGDSLSPLWFCLALNPLSKILIKTGYGYTIDTNTNTKLTHLLYMDDIKIYAANRQQLDHLLKLTEKFSTDIKMTLGTGKCKINSIIKGQYKETEPFDLSLQEGKIDSMDPKETYKYLGYQQSTFTNHTAIKNSLKTHYKQRLHKILNTQLSGRNMTKAINTYAIPILTYSFGVIKWSDTELESLNTLTRMTSYKHNIHHIHSAIQRFTLKRKLGGRGFIDIKNLHYSQIGNLRNYFLTKADRSPLHKAIVNISKSGTPLQLNNSQFNHTIKIINDEQKLVNWKSKALHGKYPHQLDQDHIDRTASCSWLTKGNLFAETEGFLIAIQDQIIKTRNYSKYILKESTLTDKCRLCHQTTETIDHITGGCSVLANKEYTHRHNNVAKHIHQQLALKYKLLETHTPYYQYKPKNIIENSTAKLYWDRDIITDRTILSNRPDITLTLKSSKTTYLIDISIPNTHNLKQKHTEKIQKYIPLADEIKQMWHQDSVRIVPIIISSTGIIPKNLKSALNLLDLHDNTYIPLQKSVVLDTCSIVRRFLNPTTLTLQDTPVNTVTQNLENNHSLQ

SEQ ID NO: 1283 - protein, 1187 aa, Pyrgus malvae
MLPATTLAGKSRQRMKWTDNINRELLRCYYIVTQNETNLTTWRPLLHQRFTENFPELSHLSEQRLSDQIRVIHRNNRIPATEQDDIKQSVSLLLSTANQEYQNNINIISSTDNNRTNTDIINQTIHSHHDPEMPTTTQNFQPPIHSGHSIQIEDSEITNIQHDTFEYTRIENTFREIVIKFSGTDPTLRPTIPKLQITRHIIKTVNTTNEIVGKYLSTKVDLTIDELHEIIYCAAKTITKLHIEKETNMTGNNTKYSDKINVPNKQKPKWEVRIENKIIKLRKDIGQLTQYLNGNLTEKKRKKLNPCNKSKNELIDQLDKNKQTLQAYSKRLRRYKLSNKRKSDNKLFNCNQKLFYQKLNTENIQVTQTPDIDDIQNYWKNIWSKPVQHTPHPPWLEMEELETANINPMAEITISKEDVSQAIRNTLNWKSPGPDKIQNYWIKYLTVTHEYIAKLFNNLLQNPQETPHFLTQGITYLKPKDTDTTNPSKYRPITCLPTIYKLLTSIIAHKLNTHIKINEIIAEEQKGCRKGSRGCKEQLIIDGEIHNQVRQKHKNLFYSYIDYQKAFDSVPHSWLIHILKIYKVNNSLIQFLQHVMHNWTTKINLRTSNTTLITHPIKILRGIFQGDSLSPLWFCLALNPLSKILIKTGYGYTIDTNTNTKLTHLLYMDDIKLYAANRQQLDHLLKLTEKFSTDIKMTLGTGKCKINSIIKGQYKETEPFDLSLQEGKIDSMDPKETYKYLGYQQSTFTNHTAIKNSLKTHYKQRLHKILNTQLSGRNMTKAINTYAIPILTYSFGVIKWSDTELESLNTLTRMTSYKHNIHHIHSAIQRFTLKRKLGGRGFIDIKNLHYSQIGNLRNYFLTKADRSPLHKAIVNISKSGTPLQLNNSQFNHTIKIINDEQKLVNWKSKALHGKFPHQLDQDHIDRTASCSWLTKSNLFAETEGFLIAIQDQIIKTRNYSKYILKESTLTDKCRLCHQTTETIDHITGGCSVLANKEYTHRHNNVAKHIHQQLALKYKLLETHTPYYQYKPKNIIENSTAKLYWDRDIITDRTILSNRPDITLTLKSSKTTYLIDISIPNTHNLKQKHTEKIQKYIPLADEIKQMWHQDSVRIVPIIISSTGIIPKNLKSALNLLDLHDNTYIPLQKSVVLDTCSIVRRFLNPTTLTLQDTPVNTVTQNLENNHSLQ

SEQ ID NO: 1284 - protein, 1366 aa, Apodemia walkeri
MRLRNRVIPQAGTCEGESRPESSGLGCPTYSGGDNVSLNSAQPKAVAGNSQISQPSSHSSSIISSSSSLFDTPDSSLNLHQLQDSFSSASSSTSRLSCDVAQEVLVYPHVPTNDNINPTHSTFVNSSYCVGNETHPSTLGTNSPVRSVLQDIMPATTLAGKNRQRMKWTHNINKELLRCYYIVTKCEKDLTTYRQLLHHKFIESFPELQHITEQRLADQIRVIHKNNRISQPERERIKQLVSQIISNSDNNHSESNDATEIPSVSSTFPMSQQQSSTGLSLIQYSIQDSIHTNTQQSDIATQSLSAHTVENIEHNIQTHHSQTPTRTLEKKSLETVENTFREMLIKYEGTDPTLRPPIPKLQTTCNTIKTVNIVNDIVGKHLEAIPAHTLEQLHEVIYSAAFTVATIHSKRVGNAVGHSYTSNHSTYKQNISPWEKRLVNKVVFLRKEIGQLTQHLNGNLSYKKQLKLNIYNKNGDEIINQIDNCKQRLQAYSKRLRRYKKSNQRKLDNNLFNTNQKLFYQRLSTDQIKITQPPDIDVLQNYWKNIWSKSVKHNTHSTWTEIEEQEMSDIGLMAKIVIDEEDIALSIKKTLNWKAPGPDKLQNYWLKYLTTTHKYIARVLNDIILNPQKMPNFFTQGITYLKPKDHDTTNPSKYRPITCLPTLYKLLTSIIANKLNIHISQHNIIPEEQKGCCKGSKGSKELLVIDTELHNQVKQKHRNLYYSYIDYQKAFDSVPHSWLIHILKIYKIDDNIIQFLQYAMTKWTTKLTLRTPDQTLCTHPIKIARGIFQGDSLSPLWFCLSINPLSRILNRTDYGCKIDRDNNIKLNHLLYMDDIKLYAGTRNQLDQLLRLTEQFSTDIKMTLGTDKCKINCINNGKYKKTETFDLEIHGGLIESMEPKDTYKYLGYCQSTCINHSDIKNLLKNKYKNRLQKILNSQLSARNKTKAVNTYAIPILTYSFGIVKWSDTELNALNTATRVASYRHNIHHIHSSVERFTLKRKLGGRGFLDICDLHYTQIDKLRSYFFTKANNSSIHNAIVNMSHSGTPLQLNNRTFDPNLKRVTDTQKLENWKKKALHGKFPHQLDQDHIDRNASCNWLTKGNIFGETEGFLIAIQDQVIKTRNYSKFILKENIETDKCRLCHQNTETIDHITGSCSVLAYKEYTHRHDNVAKHIHQQIALKYRLVNKYTPYYKYKPKQVMESDTIKLYWNRDIITDRTILSNRPDITLTLKALKTTYLIDISVPNTHNLKQKHTEKIQKYIPLADEIKQMWHQQTVTIVPIIISSTGVIPKSLNKSLKLLDLQENIYVPLQKSIVIDTCAIVRRFLNPTTLSLQNTENIANTNQNLISSPQFISHNNHTEIHTTNNR

SEQ ID NO: 1285 - protein, 1332 aa, Asbolis capucinus
MRLRNRVLPQAGTHLGESRPGPSGSGCPTYSGGGTVSLRSAQSSTVAAIVTTSPSHNSSLSPMSSTKSLFDSPCSSPHSYELHQSPRSSTSSPMSCDVAQEALANSHVPTTDITNTTRSLPNNLLNSVDPHIQSSSNDINSPVRSVLQDMLPATTLAGKSRQRMKWTKDINIELLRCYYDVTRCETDMTAWRPQLHRKFIEQFPELSNISEQRLSDQIRVIHRNNRITAIDREHIKQTISSRTLPSTIDNAQDPVITDIHNNQHVTTQITSPVEKTLTLQPTQSCAHENQTFTSIYLDRPLESSEHLYSEEKEPRKSLVRQLDYEEIENIFKEMIIKYTGMDPTLRPTIPRLQTTRQMIKTVNIVNKLADKYFNQNNETITLVEVNEIIYCAAITVASIHAKHHTGTSNNTNGHAITKSDKKIGNRKEPQWKRRIENKITSLRREIGQLTQYLNGNLTQKKQYKLNPTNKSSKDIVDQLDTNKQKLQALAKRLNRYKKSNQRKSDNILFNNNQKLFYQKLEPEKKFTSTQQPNITEIKKYWENIWSKSVQHNIHTSWVEIEEQEMANIEPMPEITIDKEDVTHAIRRTLNWKAPGPDKIQNYWIKYLTSTHIHLANTLNHIIQNPQEMPNFLTQGVTYLKPKDSETTDPAKYRPITCLPTIYKLLTSIITHKIHIHISKNKIISEEQKGCSKGSMGCKEQLIIDAEIHNQVKVKNRNLYYSYIDYQKAFDSVPHSWLLHVLKIYKIENSLIHFLQHAMTKWRTKLNLRTNTTTLSSPYIKIARGIFQGDSLSPLWFCLALNPLSRILNNTSCGYTIDRENKVKITHLLYMDDIKLFGSNKQELDTLLRLTEKFSTDIKMAFGTNKCKINSINKGQYSKTDSFELELQQGKIESMEPKETYKYLGYQQSTSINHTDIKDKLKTKYKQRLHKLFSTQLSARNIVKAVNAYAVPILTYSFGVIKWSDTELNALNILTRTISNKHNIHHIHSASQRFTLKRHLGGRGFIDIKNLHYTQIDNLRTYFIQKAHNSTLHKTIVNMPNSGTPLQLHNNLFDPKSKIVKEEHKIESWKNKALHGKYPHQLEQEHVDKNASTTWLTKGNIFSETEGFLIAIQDQIIKTRNYSKFILKEAIETDQCRLCHRYTESIDHITGGCSVLANKDYTHRHDNVAKYIHQQLALKYKLTDTHTPYYKYKPENVLENNNVKLYWDRDIITDRTILSNRPDIILRLKTTKSTYLIDIAVPNTNNLKQKHTEKIQKYIPLADEIKQMWHQETVNIVPIIISSTGIIPKTLHTALKLLDLPPKMYVPLQKSIVIDTCSIVRRFLNPTLLAYTY

SEQ ID NO: 1286 - protein, 1127 aa, Codatractus cyledis
MQNNQPNRVNHTHSPTHTINTPARSVLQDMLPATTLAGRSRQRMKWTDHINKELLRCYYIVTRNEANLTAWRPQLHRKFAETIPELSHLSEQRLADQIRVIHKNNRIPAPVREQIKQSVSLLIPYSDNLNYLTTSINHPFNINTTPPTNWQQSITDTHRQILNSQQTETNTQHDITTPPSYQPSETNEHNQTQIYEEINSSLNSLNYKKIKDTFTEMLRKYAGIDPTLRPTILKPEFKRNFIKTLNIINEIIDKYLRTKDSVTIEEIHEVIYCAAQTVSTIYTKHERKTESNTTNTKIYTIGAERKPHWEKRLENKITKLRKEIGQLTQYLKGNLTQKKQQKLNPNNRNRDEIIEQLDKDKQKLQAYTKRMRRYKISNERKLQNKLFNTNQKLFYQKLNAEQIHITQPPDINDIENYWKNIWSNPGPHNTHTSWSKIEEQEVENIDPMSEVTISKDDVLRAIKKTLNWKAPGPDKIQNYWIKYLTATHEHIANTFNRLLHNPRETPYFLTQGITYLKPKDNNTTDPSNYRPITCLPTIYKLLTSIISHKLNEHITQNHIIPEEQKGCSKGSRGCKEQLVIDNEIHTQVKLKHRNLYYSYIDYQKAFDSIPHSWLIHILKIYKIDSTLIQFLQHTMKSWTTKLSLRTNHMSFCTQKIKILRGIFQGDSLSPLWFCLALNPLSRILNRSDSGYVIDSNTNTRLTHLLYMDDIKLYAANRQQLDHLLRLTENFSTDIKMTFGIDKCKINSIIKGKHKNTEPLELSSQKGTIESMEPQDTYKYLGYHQSTSINHTDIKNTLKTKYKQRLHKILNTQLSARNKIKAVNTYAIPILTYSFGVVKWSDTELEALNTATRTISNKHNIHHIHSAVQRFTLKRKLGGRGFIDIKNLHYTQIDNLRTYFLLKAKESALHKAIVHLPQPGTPLQLNNSNFDPKLKFLKDNIKIENWKSKALHGKYPHQLEQDHIDYNASCTWLTKGSIFGETEGFLVAIQDQIIKTRNYSKFILKEAIDTDKCRLCHQSTETIDHITGGCSVLANKEYTYRHDNVAKHIHQQLALKHNLLESYTPYYQYKPKNVLENDTAKLYWDRDIRTDRTILSNRPDITLTLKSSKTTFLIDIAVPNTHNLKQKH

SEQ ID NO: 1287 - protein, 1404 aa, Spathilepia clonius
MPREGRTLDSTLLHYSSDQQSNSTQKYAMRLRNRNIPQAGTREGESHPGPSGSGCPTYSGGGNVSHTTAQSSTVAVENPHTPSHPSSPTSSTHSLFPSPSSSTYSYQLQPSTSRSSTITPLSCDVAQDAHANIPVSIIDNTKLTRAKQINQSNCVTHNTHSPSHIINTPTRSVLQDMLPATTLAGRSRQRMKWTDEINKELLRCYYIVTQNETNLTAWRPQLHRTFAETVPELSHLSEQRLADQIRVIHKNNRIPAPEREQIKQSVSLLLPSTTNSSYDYTTVRNIDHDSNINTTLSISAPQISTDSHKQTLNSEHTVTITHHAITTAQACLSCENSEHIQTQDNESTNTLSDLVQYKKVENTFREMLIKYTGTDPTLRPTIPKPEISRKFIKTVNSVNKIVDQYLGTKDSLTLEEIHEVIYSAAQTVTSIHSKYIKTPKNSTNNNNTYIVGNERKPQWEKRIESKIIMLRKQIGQLTQYIKGNLSQKKQQKLNPNNISRDEIIEWLDNYKQKLQAQTKRLRRYKKSNERKAHNKLFNTNQKLFYQKLNAEHIQITQPPEKVDIQNYWKNIWSVPAQHNTHNSWTEIEEREMENIDPMPEITIEKDDVLQAIKRTLNWKAPGPDKIQNYWIKYLPATHAHIANILNHILCNPENTPHFLTEGITYLKPKDGDTTNPANYRPITCLPTIYKLLTSIIAHKLNTHITRNHIIPEEQKGCSKGSKGCKEQLVIDTEIHSQVKLKRRNLHYSYIDYQKAFDSVPHSWLIHILRIYKVDKRLIQFLIHTIKNWTTKLTLRTNNISLYTQKIKILRGIFQGDSLSPLWFCLALNPLSRILNKTGSGYVIDKDTNTKLTHLLYMDDIKLYAANRQQLDHLLTLTENFSTDIKMTFGVNKCKINSIIKGQHQETHPFQLETQRGTIDSMEFRETYKYLGYQQSTYINNTDIKNTLKTKYKHRLHKILNTQLSARNKIKAVNTYAVPILTYSFGVVKWSDTELEALNTATRTISNKHNIHHIHSAVQRFTLKRRLGGRGFIDIKNLHYTQIDNLRTYFLLKANESALHKAIVHLPQSSTPLQLSNSQFDPKLKILKDDQKIENWKKKALHGKYPHQLQQDHIDFNASCTWLTKGNIFGETEGFLVAIQDQIIKTRNYSKYILKEAIVTDKCRLCHQATENIDHITGGCSVLANKEYTHRHDNVAKHIHQQLALKHKLIESYTPYYQYKPKSVLENKAAKLYWDRDIVTDRTILSNRPDITLTLKSSKTTFLIDIAVPNTHNLKPKHTEKIQKYIPLADEIKQMWHQESVRIIPIIISSTGVIPKTLKTALKLLDLHENTYIPMQKSIVIDTCSIVRRFLNPTTLTLQNHQDTHPNTATQNSSTHNTTHNTNTHTHNTPDTLVITHPRHTNSRE

SEQ ID NO: 1288 - protein, 1272 aa, Yanguna spatiosa
MRLRNREIPQAGTRQGESRPGPSGSGCPAYSGEGNVSRMTTQSGTVVVDNSIPHTTSSLSHLSSPISTSMSSTHSLFQTPNSSPDLYEQSVSSSSSNTPSSCCAVQVAHAISHAPTTDVTNPTRVFQNNTDNRVNHNSHSLSPQNNTPTRSVLREIFPTTTLAGKRRQRMKWTEQINKELLRCYYVVTNIETNLTAWRSMLHQKFSESFPELSYLTEQRLADQIRVIYKNNRISELERDEIKKSITPLLPTPISPNQINLPNNSIHPNTINNTPTSNTHESNVSPSSETFNTQHTQTIIQKHNTITETHNLYNNMEHTEHQNLEAANKDSIDYKKLEYTLNEMLIKYSGTDPSLRPTIPKLQITRNVIKSVNIINKIIEEHLRTKTTITLEEIHEVIYCAAQAVTTIHTKYVNKLDNNMDNSNRLTNKVNKPQWERRIENKITMLRKEIGQITQFLKGNLTQKKHRKVNPNKRSNDEISEQLDINKQKLQALSKRLRRYKISNKRKSDNILFNTNQKLFYQNLNEEHIQITLPPDKDDVQNYWKNLWSKPVQHNTHTSWAEIEEQETTDINPMPNILINKDDVYQAIRKTLNWKVPGPDKIQNYWIKYFSATHQYIANTFNHILSNPQETPSFLTKGITYLKPKDKDTSNPANYRPITCLPTIYKLLTSVISHKLDMHITKNQIILEEQKGCRKGTKGCKEQLIIDTEIHNQVKQTHRNLFYSYIDYQKAFDSIPHSWLIHILKIYKVDNKVIQFLQHTIKNWATKLNLRTNKISFCTEAIKISRGIFQGDSLSPLWFCLALNPLSKILNKSGFGYIVDRESNTKITHLLYMDDIKLYAANRLQLDHLLKLTENFSTDIKMSFGINKCKINSIVKGQYKRTDPFDLSTQAEKIYSMEPKETYKYLGYQQSTAINHRDIKNTLKTKYRQRLYKIFNTQLSARNKTKAVNTYAIPILTYSFGVIKWSDTELEALNRLTRTAANKYNIHHIHSAVQRFTLSRKLGGRGFIDIKKLHYTQIDNLRTYFLTKANENTLIKAITNLPQAGTPLQLNNSQFNPKLKILKDEEKINSWKQKSLHGKYPHQLEQEHVDRKTSCSWLTKGNIFAETEGFLIAIQDQIIKTRNYSKYILKEIIQTDKCRLCYQTTETIDHITGGCSMLARKEYTHRHDNVAKHIHQQLALKHKLLESYTPYYQYKPKNVMENGSAKLYWNRDIITDRTILSNRPDITLTLKSSKTTYLIDIAVPNTNNLKQKHIRHYIKKKSRFPSFYPIIFF

SEQ ID NO: 1289 - protein, 1370 aa, Heliopetes ericetorum
MLYTKPAANGALVIRKYAMQLRSRRLPQAGTCEGESRPGPSSSGSPTYSGEGNSSHMTAQSHTVAANINQSSPITSVSSSPISSTYSLFQSPSSSPHSYQMQRCSSRSTTTSPVSFDVAQEAHANFSVPITDTRNPTRIQQNTSNNRVNNITHLPSPNINTPALSVLQDMLPATTLAGKSRQRMKWTDNINRELLRCYYIITHNEANLTAWRTLLHQRFAEKFPELSHLSEQRLSDQIRVIHRNNRIAATERDDIKRSVSLLLSTTNVEHQTDANITPSTDNYHTNTDTHTRYLQEGQEIPTTTHLFQPPIHSGHSIQIQDVETTNAQNDTIDYMQIEHTFTETLLKYSGTDPTLRPTIPKLQITRHVIKTVNTANEIVRKHLSTREELTITELHEVIYCAAITITKLHTHTKEINNMTLDNKKDSERSNIYNKKKPKWEVRIENKITKLRKDIGQLTQYLNGNLTEKNRKKLNPSNRTRNELIDQLDKNKQTLQANSKRLRRYKLSNKRKFDNKLFNSNQKLFYQKLNTEHIQVTQPPDIDVIQNYWKNIWSRPVQHTPHPSWLEIEELETANIEPMAEIRISKDDVSLAVKNTLNWKAPGPDKIQNYWLKYLTATHEHIAKIFNTLLQNPQETPHFLTQGVTYLKPKDNDTTNPSKYRPITCLPTIYKLLTSIITHKLNTHVTHNEIIPEEQKGCSKGSRGCKEQLIIDSEILNQVKQKHKNLFYSYIDYQKAFDSVPHSWLIYILKIYKVNSSLVQFLQHIMQNWTTKIHLRTNNTTLCTQAIKILRGIFQGDSLSPLWFCLALNPLSKILIKTGYGYTINTDTNTKLTHLLYMDDIKLYAANREQLDHLLKLTEKFSTNIKMTFGTDKCKISSIIKGQYKETEPFHLNLQEGKIDNMDASETYKYLGYHQSTYTNHTTIKNTLKAHYKQRLYKILNTQLSGRNITKAVNTYAIPILTYSFGVIKWSDTELESLNTLTRTASYKHNIHHIHSAIQRFTLKRKLGGRGFIDIKNLHYTQIDNLRNYFLAKANRSPLHKAIVNISSKSGTPLHLNDSHFNHALKILKDEQKLENWKSKALHGKYPHQLEQDHVDRSASCSWLTKGNLFAETEGFLVAIQDQIIKTRNYSKYILKESLITDKCRLCHQTTETIDHITGGCSILANKEYTHRHDNVAKHIHQQLALKYKLLQTYTPYYQYKPQNVIENSTAKLYWDRDIITDRTILSNRPDITLTLKSSKTTYLIDISIPNTHNLKQKHTEKIQKYIPLADEIKQMWHQDSVKIVPIIISSTGIIPKNLRSALKLLDLHDSTYIPLQKSVVLDTCSIVRRFLNPTTLTLQDNNINMKAASKNSENTSHPTHTDTQEPGYLA

SEQ ID NO: 1290 - protein, 1310 aa, Telemiades fides
MRLRNRQIPQAGTRKGESRPGPSGSGCPTYSGGGNVSHNTAQSRTVAADNSHNTSHSSSPLSSTHSLFPSPNSSPHSYQFHQSSSRSSTITPLSGADAQEAYATNPVPITDTTNHTRATESNLFNRVHHDTHTLSYITNTPARSVLQDMLPATTLAGKSRQRMKWTDQINRELLRCYYVVTQNETNLTAWRPQLHQRFVETFPELNHLSEQRLADQIRVIHKSNRIPTSEREQIKQTIALPVSTSNTSEDTNTPSYNNLQETPDSHNYTLHSQNTPNIQHSTAQLSQPVLSSEHMHTQNYETSNRLEDSVEYGKIENIFREMIIKYTGIDPIHKPTIPKLQITRNVIKTVNTVNEIVDLHLQSKDTITLEDIHDTIYCAAQTVTSLHKKYDKPINLKNNTDNHNMYNKQGKPQWEKRIQNKITILRKEIGQLTQYLKGNLTQKKQQKLNPNNKSKDELIELLDTNKQKLQAYSKRLRRYKISNERKSHNKLFNTNQKLFYQKLNSQEIQITQPPHKDEIQKYWENIWSKPVQHNKHTSWTKIEEQEMENINPMPEIIIDKDDVSQAIKKTLNWKAPGPDKIQNYWIKYISATHNHIANIFNRLISNPQETPSFLTQGITYLKPKDNDTSNPAKYRPITCLPTIYKLLTSIIAHKLNTHITQNQIISEEQKGCSKGSRGCKEQLIIDSEIHHQVKEKHRNMYYSYIDYQKAFDSVPHSWLIHVLKIYKVDNRLVLFLQHTMNNWTTNLSLRTNNFSVCTNKIRIQRGIFQGDSLSPLWFCLALNPLSRILNNTDFGYTVDRDRNIKVTHLLYMDDIKLYASNRQQLNHLLRLTENFSMDIKMTFGTNKCKINCISKGQFKRTDPYDLETQQGTIDNMEPKATYKYLGYEQSTCINHTNIKSELKIKYKQRLHKIFNTQLSARNKVKAVNTFAVPILSYSFGIIKWSDSELEALNILTRTTSNTHKIHHIHSAVERFTLKRRLGGRGFIDIKNLHYTQVENLRSYFLLKARESTLHKAIVSLGGTPLQLNNSQYDPRLKILTDEEKIENWKKKALHGKYPHQLQQNHIDHNASCTWLMKGNIFSETEGFLVAIQDQIIKTRNYSKYILKEAIDTDKCRLCHQTTETIDHITGGCSVLANKEYTHRHDNVAKHIHQQIALKYKLLESYTPYYQYKPKNVIENSSAKLYWDRDIITDRTILSNRPDITLTLKHCKTTFLIDIAVPNTHNLAQKHNEKIQKYMSLADEIKQMWHQESVKIIPIIISSTGVIPKSLKTALRLLELHENTYIPMQKSIVIDTCSIVRRFLNPTTSSM

SEQ ID NO: 1291 - protein, 921 aa, Morvina fissimacula
MLRLPIKNKNTQRTPPWKTRIINKIKTLRINIGRLTQYIKGNLSQKKRYKINPKNLRIDQLIDELDTNKQKLAAYAKRLSRYEESNRRKADNNLFRNNQKLFYRNVNSEHVKITQKPDETQVQKFWENIWSVPEDYNSNAEFIKLEEKETENIKPMPPFVIDTEDVKNIVRKTHNWKAPGPDKIQNYWLKYLTATHYHLAHALNTLIHKPQDMPRFLTQGITYLKPKDSDTTNPSKYRPITCLPTLYKLLTSIITHKLNVHIINNNIIPEEQKGCCKGSMGCKEQLVIDAEIHHQVKQKHRNLFYSYIDYQKAFDSVPHSWLIYVLKLYKTDNNILNFLQQTMSTWTTILNIHTDKGTLRTNPIKISRGIFQGDSLSPLWFCLALNPLSRILNRTNYGYTLDKQKNTKITHLLYMDDIKLYAANRQQLNHLLILTEQFSKDIKMTFGIDKCKLNCIIKGKHKETESHITLQGETISNMEFKETYKYLGYQQSTTLNHTEIKNTLKSKFKQRLISILKTKLSARNKTRAINTFAVPILTYSFGIINWSETELNALNTLTRTTCNKHNIHHIHSAVERFTIKRKHGGRGFIDIKNLHYSLVHNLRSYFQNKAKDSSLHKSIVNSPTAGTPLKLNNAQYTPNEKIQTEEEKIENWKKKALHGKYPQQLEQSHIDKEASNGWLMKGNIFGETEGFLVAIQDQIIKTRNYAKFILKENIETDKCRLCHQTSETIDHITGGCSALASKDYTHRHDNVAKHIHQQLALKYKLLHTYTPYYEYKPKNVLENNEAKLYWNRDIITDRTILSNRPDLTLTLKATKTTYLIDISVPNTNNLKLKHSEKIQKYIPLADEIKQMWHQDFVRIVPIIISSIGIIPKTLLNALQFLQLPKHTFIPLQKSVVLDTCSIVRRFMNTSSLPMHRSISES

SEQ ID NO: 1292 - protein, 1356 aa, Zera sp.
MEKLAKRKYNLRPLPGGRRGTSGVGAGCGSMRTVDGLELSRRAPAGHVPEVTTAEIISNPSSPISSTHSLFSSPNSSPHSYENPSTSRSTTSSPMSVNVARGLLANSLVPIIDTTNATRGSQRDTHNTRVEIINHTLTTPTPTTSILRDMLPATTQGGKIRQRMKWTDEINRELLRCYYKVTKCETDITAYRPLLHYTFMQIYPELQHITQQRLSDQIRVIHKNNRISPPERIHIKKQIAEMSSTNFHPQDNIPSTGNILCCQNNNTTHNFSETNAAYMTSTANPEIIVSGDIDENTQNRNVLSQNYTSNPINQPPPPTQQNLDKDHSYDKIEIEFKQNILKFRDIDPTLKPTIPKLDISRFTIKTVNIINDVIHTYLKDKISPSLEELHNIIYSAAVTITSTHVKEKKKKSNSNNTGNKNRQKQPPWKVRLTLQIEKLRKEVGRMTQYLKGNLTIKNARKINHKNLNTDQFIIELDEYKQKLSAYTKRLKRYEESNKRKTDNNLFKTNQKLFYRNLHSDHIKITQAPDITQIQQFWEDIWSIPADHNSKAEFIKLEEKQAENIPAMTPTIITLEDIQYAVRKTLNWKAPGPDKVQNYWLKYLTSTHTHITNAFNTLIKEPHHMPKFLTQGITYLKPKDSDTSNPSKYRPITCLPTLYKLLTSIITHKLNTHITLNNIIPEEQKGCCKGSMGCKEQLVIDAEIHHQVKQKHRNLFYCYIDYQKAFDSVPHSWLLHVLKLYKTDDTILKFLQYTMTTWTTTLNIHTHNGTLTTKKLKISRGIFQGDSLSPLWFCLAINPLSRILKQTNHGYMLDKHNKTKITHLLYMDDIKLYAENRPQLNQLLTLTEKFSSDIKMSFGIDKCKLNSIIKGKYKETYAHNLTQQVGSISNMQFKETYKYLGYQQSTAIKHTDIKNTLKSKYKQRLNTILKTKLSARNKTKAINTYAMPILTYSFGIIKWSETELNALNTLTRTTCNKYNIHHSHSAVERFTIKRKNGGRGFIDIKNQHYTQLHNLRTYFLNKAKDSILHRAITNSPTSGTPLMLNEAEYNPREKIRTEEEKIGQWKNKTLHGKYPQQLDQPHIDKEASNSWLTKGNIFGETEGFLVAIQDQIIKTRNYSKYILKERIETDLCRLCYKTTETIDHITGGCSALAYKEYTYRHNNVAKHIHQQLALKHKLLQDYTPYYQYKPKTVMESKDVKLYWDRDIITDRTILSNRPDITLTIKATKTTYLIDISVPNTNNLKQKFTEKLQKYIPLADEIKQMWHQHSVRIIPIILSSTGVIPKTLFNALQALQLSKTTYIPLQKSIVLDTCAIVRRFMNPSSLALQSANIDNCNISTTPDTHTPIIQNTQNIPNT

SEQ ID NO: 1293 - protein, 1306 aa, Pythonides amaryllis
MRTVDGLELSRRAPAGHVPEITTADITSNPSSPISSTHSLFPSPNSSPHSYENPPTSRSTTTSPMSINVARRLSANTFVPIIDTTNATQELRNTNKSCVETNSRIHTLTTPTPSSNNGPTRGVLQEMLPATTLGGKSRQRMKWTDEINRELLRCYYKVTKCETDITAYRHLLHNTFIQAYPELQHITQQRLSDQIRVIHKNNRISPSERIVIKKQIAEIVFSNPGPEENISCTTNISCTQNNNTLHNSTENNPQHITGTINPGDSTLNLLDKNTQHSNILNQNCVCDPVNQPPESEPQNSDVHLNYGLVETEFKQNLIKFQDIEPTLKPTIPKLEISSFSVKTVNIVNDVVGTYLNNKQFISLEELHNTIYSAAVTITSLHVKQKKLNIDSNNATNKNRHKQPPWKVRLTLQTEKLRKEVGRMTQYLKGNLTLKNQRKINHKNLNTDKFIDELDKNKQKLLAYTKRLKRYEESNRRKKDNNIFKTNQKLFYRNLNSEHLKTTQTPDITQIQQFWKNIWSIPEDHNSDAEFIKLEEKQVENIETMTPIIITTKDIKDALSKSLNWKAPGPDKVQNYWLKYLTSTHNHIAIAFNTLIKEPHKTPTFLTQGITYLKPKDSDTSNPAKYRPITCLPTLYKLLTSIITHKLNTHVSVNNIIPEEQKGCCKGSMGCKEQLVIDAEIHHQVKQKHRNLYYCYIDYQKAFDSVPHSWLLQILKLYKTDDKILNFLQHIMTTWTTTLNIHTDTGTLSTDKLKISRGIFQGDSLSPLWFCLAINPLSRILKQSNYGYTLDKQNNIKITHLLYMDDIKLYAANRQQLNHLLTLTEKFSTDINMTFGIDKCKLNSIIKGKFKETHIHNLTQQVGSISNMQFKETYKYLGYQQSTTINHTDIKNTLKSNYQQRLNTVLKTKLSARNKTKAINTYAVPILTYSFGIIKWSETELNALNTLTRTTCNKHHIHHSHSAVERFTIKRKHGGRGFIDIKNLHYTQVHKLRTYFFNKANDSPLHKAIINSPTSGTSLTFNNTQYNPIVKIQTEEEKIQKWKSKTLHAKYPQQLDQPHIDKEASNTWLAKGNIFGETEGFFVAIQDQIIKTRNYSKYILKERIETDLCRLCHKTSETIEHITGGCSALAYKEYTYRHNNVAKHIHQQLALKHKLLQNYTPYYQYKPKSVLENGDAKLYWDRDIITDRTILSNRPDITLTLKTTNTTYLIDISVPNNNNLKQKFTEKIQKYIPLADEIKQMWHQNSVRVVPIILSSTGVIPKTLFNALQALQLSKNTYIPLQKSIDDPNGAVVTMLVRCSKGPGFDS

SEQ ID NO: 1294 - protein, 985 aa, Glaucopsyche alexis
MLIKYSDTDPTLRPIIPKLQVTRNVIKTVNLLNDFIGKYFEEKGIPCLDEIQNAIYCGAMTTATLHTKIINRSEEKETRKTIDQSKPKWQIRIENRIKQLRKEIGQLTQYLNGNLNPKKHKKINPNLLTKSQLLDHLDNLKQKLQAQCKRLRRLKISNTRRKDNILFSNNQKIFYQNLNSENIKITQPPDINEVKGYWENLWSKPVQHNNNSSWIDAVKQDYQSINQMPDIIVDKDDVTFATKRTFNWKAPGPDKIQNYWLKYFTATHPHIANIFNSFIQNPQTIPSFMTQGITYLKPKDKNDTSNPTKYRPITCLPTLYKLFTSIITQKLNTHIIQNEIIPEEQKGCTKGSMGCKEQLVIDAEIHNQAKKKRKNLYFAYIDYQKAFDSVPHSWLIQVLQIYQVNNKLIQLLQYLMSTWSTKLNLRTSDNTLSTSTIKIKRGIFQGDSLSPLWFCLALNPLTNILNKSCHGYTIDKVNNIKLTHLLYMDDIKLYATDRQQLEHLLELTERFSTDIKMTFGIDKCKINCLIKGQHQQINPHNLELQENIIDSMQAKDTYKYLGYRQKSIKITLKSQYKQRLNKILSTQLSGRNKIKAINTYAIPILTYSFGIIKWSDTELEALNITTRAASYKHNIHHIHSAVERFTLKRKLGGRGCIDIKNLCYNQIKNLRTYFQTKSHTSHLHQALLSLTHSGTPLQLNNSHFDPKHKIIKDSEKIVKWKSKALHGKFPHQIEQDHINQAASFSWLTRGNIYSETEGFLVAIQDQIIKTRNYSKYILKENIDTDKCRLCHQTTETIDHITGGCSSLASKEYTHRHDNVAKHIHQLLALKYKLIDIHTPYYKYKPCSVLENSTAKLYWDRGIVTDRTILSNRPDITLTIKLEKITYLIDIAVPNTNNLKQKHSEKIQKYITLADEIKQMWRQETVKIIPIIISSTGVIPKTLTAALKVLDLNKNTYIPIQKSIVIDTCSIVRRFLNPSSFTPPQS

SEQ ID NO: 1295 - protein, 1351 aa, Plebejus argus
MRLRNRDILPQAGTGAKSNGESRPGPSGPGCPSYSGGGAVSHSTAQSSTAAENNNFQIINNTYSYPSSPTSSVSLFPSLHSSPQSFMLNNSFSSRSTTLSPISDDVTQEAIASNPVPIPDITPSTSHSQYINPNIVDHNTLTQPHLTNTPVRSVLQDMLPPTTLAGKSRQRMKWTDQINRELLRCYYIVTSCESNLTAFRPSLHKKFAETFPELSHITEQRLADQIRVIHRNNRIPIHERNKIKINVAHALDCPNDQNNTISGMPHNVTDALTLPNPLTQPINDSTLPNPSTQPINDLTLTLPNPSSQPINDRPLTLSNSPEVCSMEHPIVPETNDTDTITADTELAETHKIEIGFKEMLIKYADTDPTLRPVIPKLQITRNIIKTVNTLNKLLKKHLEEKESPDLDEIHSAIYCAAITTTNLHTKKNNPIEKNTFDKTIDRIIPKWQLRIENRVKKLRKEIGQFTQYLKGNLSEKNQRKLNPNNLTENQIVDLLDNLKQKLQAQSKRLRRLKISNSRRTDNLLFTNNQKLFYQNLNSENIKITQPPSTEELKNYWENMWSKPVHHNVHASWLGTETSESNDINPMPEVVIDINDVTFAIKKTLNWKAPGPDKIQNYWIKYFTSTHHYIAKAFNSALQDPRTVPLFMMQGITYLKPKDKNDTENPTKYRPITCLPTLYKLFTSIITQKLNAHITENKIIPEEQKGCAKGSMGCKEQLVIDAQIHNQAKKDHNNLYYAYIDYQKAFDSVPHSWLIHVLQIYKVDNNLIEFLQHLMLNWSTKLNLRTVNTTLSTSPIKIKRGIFQGDSLSPLWFCLALNPLSKILNRSKYGYIIDKANKISITHLLFMDDIKIFAPDRHQLENLLKLTEKFSTDINMTFGVDKCKINCIVKGKHTHTEPLNLEQQIGTIDSMQVKDTYKYLGYIQNTAIDHKGIKNTLINKYKQRLNKILKTQLSGRNKIKAVNTYAIPILTYSFGIIRWSDTDLEALNTATRTASYKHNIHHIHSAVERFTIKRKQGGRGFIDIKNLHYTQIDNLRTYFRTKANTSPLHKAIISLSHSGTPLQLNNDQFDPKNKIIKDVNKIQKWKSKSLHGKFPYQLSQDHIDQDASFSWLTKGNIYSETEGFLIAIQDQIIKTRNYSKFILKESIDTDKCRLCHQTTETIDHITGGCSALANKEYTHRHDNVAKHIHQSIATKFNLIDTHTPYYKYKPSNVLENDSVKLYWDRDIVTDRTILSNRPDITLTIKSEKTTYLIDIAVPNTNNLKQKHTEKIQKYIPLADEIKQMWHQNTVKIIPIIISSTGVIPKTLAVALKSLDLHKNTYIQLQKSIVIDTCSIVRRFLNSSSSFPTTHTN

SEQ ID NO: 1296 - protein, 1331 aa, Plebejus argus
MICDYVIDIYPRRVPARKAMENPAPGPRARAVPRILGGGNVSLHSAQASTAAENIVPITSNTHSHSTSPTSSISLFPSPHSSPRSYMFDKSSSSSRSTSHSPMSYVVTREATATYPVPIVDNTQSTSTLQTNERHPVDHNTSQSHLTNTPTRSVLQEMLPPTTLAGKCRQRMKWTDEINRELLRCYYIVTSCESNLTAFRPSLHQKFIEIFPELSHLSEQRLADQIRVIYRNNRIAPHIREQIKNSVAEITQILEQPDVQNTTQDTDLQLLSNLQTDNNQSPSIIPSSHQSMSSPHQSNSLQNSSHTIEHTIELETDTTQSPSTNHNAIESEKIDNVFKEMLIKYSGSDPNLRPIIPKLQITRNVIKTVNILNCSIGKYLEEKVEPGLEEIHNTIYCGAMTTAILHSKTVKPKEKETRKTIDNSNPKWQIRIENRIKQLRKEIGQLTQYLKGNLNPRKQQKINPNNLPENQLLDRLDNLKQKLKAQSKRLHRLQISNARRKDNMQFNNNQKLFYQNLNSENIKITQPPDINHVKEYWESLWSIPVQHNTDCSWIRSEEQDYQNINQMPDITVDRDDVTFAIKKTLNWKAPGPDKIQNYWLKYFTSTHRHIANIFNSFIQTPETIPLFMTQGITYLKPKDKDQTANPSKYRPITCLPTIYKLFTSIITYKLNAHITQNKIIPEEQKGCTKGSMGCKEQLVIDAEIHNNVKRNRNNLYFAYIDYQKAFDSVPHSWLIKVLQIYQVNDKLIKLLQHLMSIWSTQLNLRTTDTQLSTAYIKIKRGIFQGDSLSPLWFCLALNPLSKILNKSSHGYTIDKVNNIKLSHLLYMDDIKIYATDRQQLEHLLKLTERFSTDIRMAFGIDKCKINCIIKGQYQQINPHNLELQDDVIDSMKAHDTYKYLGYIQDTAISHKDIKNTLKSKYKLRLNKILSTQLSGRNKIKAINTYAIPILTYSFGIIKWSDTELDALNTATRTASYKHNIHHIHSAVERFTLKRELGGRGCIDIKNLCYRQIENLRIYFQSKSETSNLHKAILKLTHSGTPLQLNNTQFDPKLKIIKDCDKITKWKSKALHGKFPHQLQQDHIDQTASFSWLTKGNIYSETEGFLVAIQDQIIKTRNYSKYILKENIDTDKCRLCHQTIETIEHITGGCSSLANKEYTHRHDNVAKHIHQLLAIKYKLIDTHTPYYKYKPCNVLENNTAKLYWDRDIVTDRTILSNRPDITLTIKSQKITYLIDIAVPNTNNLKQKHNEKIQKYIPLADEIKQMWRQNTVKIIPIIISSTGVIPKTLTAALKSLELNKNTYIPIQKSVVIDTCSIVRRFLNPSSSFTTSQS

SEQ ID NO: 1297 - protein, 995 aa, Celastrina argiolus
MLIKYAGTDPNLRPVIPKLQITRNIIKTVNIVNNLIGKYLEEKETPTLDEIHSVIYCAASTTTSLHSKLINPSENKVKDKTIDSPKWQMRIENRIKKLRKEIGQLTQYLKGNLNYRKQQKLNPKNLTNSQLLELLDNLKQKLQAQSKRLRRLKISSARRKDNALFTSNQKYFYKKLNSENIKITQPPDVNEVKNYWENLWSKPIQHNIQTSWLDIETKECQNINPMPDIIIDKVDVTYAIKKTLNWKAPGPDKVQNYWIKYFTTTHHHIANIFNSFIQDPKIIPQFITQGITYLKPKDNDTANPTKYRPITCLSTLYKLLTSIITQKLNIHISQNKIIPEEQKGCTKGSMGCKEQLVIDAQIHNLAKQGRKTLYYSYIDYQKAFDSVPHSWLIHVLQIYKVNHKLIEILQHLMSTWSTKLTLRTTNTTFSTSSIKIKRGIFQGDSLSPLWFCLALNPLSKILNRSNHGFIIDKVNNIKLTHLLYMDDIKLYATDRQQLEHLLKLTEKFSTDINMKFGTDKCKINCILKGKHTLTEPFNLEQGGIIDSMEMKDTYKYLGYFQSTAIDHKDIKNTLKTKYKQRLNKILTSQLSGRNKIKAINTYAIPILTYSFGVIKWSDTDLEALNKATRTASYKHNIHHIHSAVERFTIKRKLGGRGCIDIKNLQYTQIVNLRTYFMTKALTSQLHKAIVDIPHSGTPLQLNNNQYDPKSKIINEKIKIGKWKSKALHGKFPHQLEQDHIDLAASFSWLTKGNIYSETEGFLIAIQDQIIKTRNYSKYILKESIETDKCRQCHQSPETIEHITGGCSALANKEYTHRHNNVAKHIHQLLAAKYNLIDTHTPYYKYKPCNVLENSTAKLYWDRDIITDRTILSNRPYITLTIKSEKTTYLIDIAVPNTNNLKQKHNEKIQKYIPLADEIKQMWHQNTVKIIPIIISSTGVIPKTLNAALKSLDIHKNTYIQLQKSIVIDTCSIVRRFLNPSSSFPIPHTSLTTHAT

SEQ ID NO: 1298 - protein, 1331 aa, Celastrina argiolus
MRLRNRNIPQAGTGATSNGESRPGPSGLGCPSYSGGDTVSPLPAQSSTAADTIFVTTSNTYSYPTSPTSSISLFSSLNSSPKSYMLSDNSPSSRSTTLSPMSDDVTREANATYPVPISDITPSTSTLQNNQSYPVDHNIRQSHLINTPARSVLQDMLPATTLAGKCRQRMKWTDEINRELLRCYYIVTSCESNLTAFRPLLHKSFLETFLELNHISEQRLADQIRVIHKNNRIPMSERDKIKLSVAQTLDNSSDQNNIQVTDPHTSTSSIHNRDNHPFTDEPTPHHSAIHSLPETVNLLNSLTTEQIVTLHTNSTNSLLVDPNHRETQNVEIIFSEMLIKYAGTDPNLRPVIPKLQITRNIIKTVNIVNNLIGKYLEEKETPTLDEIHSVIYCAASTTTSLHSKLINPSENKVKDKTIDSPKWQMRIENRIKKLRKEIGQLTQYLKGNLNYRKQQKLNPKNLTNSQLLELLDNLKQKLQAQSKRLRRLKISSARRKDNALFTSNQKYFYKKLNSENIKITQPPDVNEVKNYWENLWSKPIQHNIQTSWLDIETKECQNINPMPDIIIDKVDVTYAIKKTLNWKAPGPDKVQNYWIKYFTTTHHHIANIFNSFIQDPKIIPQFITQGITYLKPKDNDTANPTKYRPITCLSTLYKLLTSIITQKLNIHISQNKIIPEEQKGCTKGSMGCKEQLVIDAQIHNLAKQGRKTLYYSYIDYQKAFDSVPHSWLIHVLQIYKVNHKLIEILQHLMSTWSTKLTLRTTNTTFSTSSIKIKRGIFQGDSLSPLWFCLALNPLSKILNRSNHGFIIDKVNNIKLTHLLYMDDIKLYATDRQQLEHLLKLTEKFSTDINMKFGTDKCKINCILKGKHTLTEPFNLEQGGIIDSMEMKDTYKYLGYFQSTAIDHKDIKNTLKTKYKQRLNKILTSQLSGRNKIKAINTYAIPILTYSFGVIKWSDTDLEALNTATRTASYKHNIHHIHSAVERFTIKRKLGGRGCIDIKNLQYTQIVNLRTYFMTKALTSQLHKAIVDIPHSGTPLQLNNNQYDPKSKIINENIKIEKWKSKALHGKFPHQLEQDHIDLAASFSWLTKGNIYSETEGFLIAIQDQIIKTRNYSKYILKESIETDKCRLCHQSPETIEHITGGCSALANKEYTHRHNNVAKHIHQLLAAKYNLIDTHTPYYKYKPCNVLENSTAKLYWDRDIITDRTILSNRPDITLTIKSEKTTYLIDIAVPNTNNLKQKHNEKIQKYIPLADEIKQMWHQNTVKIIPIIISSTGVIPKTLNAALKSLDIHKNTYIQLQKSIVIDTCSIVRRFLNPSSSFPIPHTSLTTHAT

SEQ ID NO: 1299 - protein, 907 aa, Celastrina argiolus
MRIENRIKKLRKEIGQLTQYLKGNLNHRKQQKLNPKNLTNSQLLELLDNLKQKLQAQSKRLRRLKISSARRKDNALFTSNQKYFYKKLNSENIKITQPPDVNEVKNYWENLWSKPIQHNIQTSWLDIETKECQNINPMPDIIIDKDDVTYAIKKTLNWKAPGPDKVQNYWIKYFTTTHHHIANIFNSFIQDPKIIPQFITQGITYLKPKDNDTANPTKYRPITCLSTLYKLLTSIITQKLNIHISQNKIIPEEQKGCTKGSMGCKEQLVIDAQIHNLVKQGHKTLYYSYIDYQKAFDSVPHSWLIHVLQIYKVNHKLIEILQHLMSTWSTKLTLRTTDTTFSTSSIKIKRGIFQGDSLSPLWFCLALNPLSKILNRSNHGFIIDKVNNIKLTHLLYMDDIKLYATDRQQLEHLLKLTEKFSTDINMKFGTDKCKINCILKGKHTHTEPFNLEQGGIIDSMEMKDTYKYLGYFQSTAIDHKDIKNTLKTKYKQRLNKILTSQLSGRNKIKAINTYAIPILTYSFGVIKWSDTDLEALNTATRTASYKHNIHHIHSAVERFTIKRKLGGRGCIDIKNLQYTQIVNLRTYFMTKALTSQLHKAIVDIPHSGTPLQLNNNQYDPKSKIINENIKIEKWKSKALHGKFPHQLEQDHIDLAASFSWLTKGNIYSETEGFLIAIQDQIIKTRNYSKYILKESIETDKCRLCHQSSETIEHITGGCSALANKEYTHRHNNVAKHIHQLLAAKYNLIDTHTPYYKYKPCNVLENSTAKLYWDRDIITDRTILSNRPDITLTIKSEKTTYLIDIAVPNTNNLKQKHNEKIQKYIPLADEIKQMWHQNTVKIIPIIISSTGVIPKTLNAALKSLDIHKNTYIQLQKSIVIDTCSIVRRFLNPSSSFPIPHTSLTTHAS

SEQ ID NO: 1300 - protein, 1265 aa, Astraptes naxos
MRLRNRQIPQAGTREGESRPGPSGSGCPTYSGGGNVSHKTTQSHTVVVERSPSHITTHSSSPTSSTHSLFQSPSSSPHSYQFQNSSSRSTTVTPLSCDVAQEAYANFPVPTTDIISPTRVLENNIHNRVDHISHSLSPNTNTPARSVLQDMLPATTLAGKSRQRMKWTDQINRELLRCYYLVTHNETNLTAWRPQLHQKFSTSFPELNHLSEQRLADQIRVIHRNNRIPVHERENIKQSVLSLLTTLDTSIDYTSTPITEDPLNTPLTINNFQLTTHSPNQTLNTQSIRTPNHNTYSQTQQSHIHAQRNNETRTNNFPENSGRNQTQDLETTNNSLDVIDYNTIENTFAEMIIKYTGTDPTLRPPIPKLQITRNAIKTVNTINEIVGTHLSTKNTVTLGEIHEVIYCAAQTTMTLHTKHIKKSEKDHNNTNVNYIKKQKKPQWEIRIEKKITTLRKNIGQLTQYLNGNLTQKKQHKLNPNNKGRNEIVEELDNNKQKLQAYSKRLRRYKLSNQRKSQNKLFNTNQKLFYQKLNTEPILITQHPNTDDVHNYWKNIWSKPVLHNTHLSWNEIVDEEVHNIEPMTDIYIDKDDVSQAIKKTLNWKAPGPDKIQNYWIKYLPATHKYLANSFDDLLNNPQDTPTFLTHGITYLKPKDNDTINPAKYRPITCLPTIYKLLISIISYKLNTHITQNRIIPEEQKGCSKGSRGCKEQLIIDTEIHNQVKHKHRNLYYAYIDYQKAFDSIPHSWLIQILKIYKVNIKLIEFLQNTMKNWTTKLNLTNNTTISTHPIKILRGIFQGDSLSPLWFCLAINPLSRILNKTGYGYVIDRESNVRLTHLLYMDDIKLFAASRQQIDHLLQLTEKFSSDIKMTFGINKCKINSIIKGQQKQTHPFDLETQRGKVDSMEPKETYKYLGYQQSTSINHTHIKNTLKTKYKQRLHKILSTQLSARNKVKAVNTYAIPILTYSFGIIKWSDTELEALNTTTRTASNSHNIHHIHSAIQRFTLKRKFGGRGFIDIKNLHYTQIDNLRTYFLTKANDSDLHRVISQLAQSGTPLQLNNSEFDPKNKILKDEQKIENWKKKALHGKYPHQLEQDHIDRNASCSWLTKGNIFGETEGFLVAIQDQIIKTRNYSKYILKDTIVTDKCRLCHQTTETIDHITGGCSVLANKEYTHRHDNVAKHVHQQLALKYKLLKSYTPYYQYKPKNVLENNTTKLYWDRDIITDRTILSNRPDITLTLKSAKTTFLIDIAVPNTHNLKQKHTEKIQ

SEQ ID NO: 1301 - protein, 1335 aa, Plebejus argus
MRLRNRYIPQAGTGAKRNGESRPGPSGSGSPSYSGGGNVSLHSAQSGTAADNIVPTTNDTHSYPTSPTSSISLFPSPHSSPRSYMFDNDKSSSSSRSTSLSPMSNVVSRGAIATYPVPNIDITPSTSTLAINEIHPVDHNIQQTHQLIDTPARSVLQEMLPPTTLAGKCRQRMKWTDEINKELLRCYYIVTSCESNLTAFRPLLHQKFIEIYPELRHLSEQRLADQIRVIHRNNRIASPIREQIKNSVAQITQNPEEFNDQNTIQDSDPQLSTCLSNSQIDHQSVANILPPHQYILSSHEPNNTQNSSDAIEHTNELDINTTQRTPRTQDPIETEKIENVFKEMLIKYTGLDPTTRPIIPKIQITRNVIKTVKILNHAIAKYLEDKEQPALEEIHSTIYCAAMTTVTLHTKIVKHNEKETRRTVSNSNPKWQIRIENRIKQLRKEIGQLTQYLKGNLNPRKQRKINPKNLTENQLLDHLDSLKQKLLAQSKRLRRLKISNARRKDNMLFNTNQKLFYQNLNSETIKITQPPDINDVKGYWESLWSIPVQHNNECSWIKSEEQDYQDINQMPDITVDIDDVTTAIKRTLNWKAPGPDKIQNYWLKYFTSTHHHIVNIFNSFIQTPQTIPLFLTQGITYLKPKDKNDTTNPTKYRPITCLPTLYKLFTSIITQKLNIHITKNKIIPEEQKGCTKGSMGCKEQLVIDAEIHNNAKRNRNNLYFAYIDYQKAFDSIPHSWLIEVLQIYKVNNKLIQLLQYLMSTWSTQLNLRTTNTELSSAPIKIKRGIFQGDSLSPLWFCLALNPLSKILNKSAYGYTIDKLNNIKLTHLLYIDDIKLYATDRHQLEHLLKLTERFSTDIKMAFGIDKCKINCLLKGQHQQINPYNLESQDDIIIDSMQINDTYKYLGYIQNTAISHKEVKNALKSKYKVRLNKILSTQLSGRNKIKAINTYAIPILTYSFGIIKWTDTELEALNTTTRTASYKHNIHHIHSAVERFTLKRNLGGRGCIDIKNLCYSQIENLRKYFQTKAQTCNLHKALTQLTPSGTPLQLNNSQFNPKLKITKDCDKIAKWKSKALHGKFPYQLEQDHIDQTSSFSWLTKGNIYSETEGFLVAIQDQIIKTRNYSKYILKENLDTDKCRLCHQTTETIDHITGGCSSLANKEYTHRHNNVAKHIHQLLAIKYKLIDAHTPYYQYKPSNVLENSTAKLYWDRDIVTDRTILSNRPDITLTIKSQNTTYLIDIAIPNTNNLKQKHNEKIQKYIPLADEIKQMWRQDTVKIIPIIISSTGVIPKTLTAALRTLDLNKNTYINIQKSIVIDTCSIVRRFLNPSSSFTTSRS

SEQ ID NO: 1302 - protein, 1329 aa, Lysandra coridon
MRLRNRKILPQAGTGANSNGESRPGPSGPGSPTYSGGGTVSLNSVQSCAAADNIIPTTLNTHSCPSSPTSSVSLFPSPHSSPQSYMFNNSSSSRSTSLSLMPDDATQEAIAYDPAPISDSTPSTSTSQNTNQNPVDHNIDIQPQLNITPARSVLQDMLPPTTLAGKSRQRMKWTDHINKELLRCYYIITSCESNLTAFRPSLHKKFIEIFPELSHISEQRLADQIRVIHRNNRISPPERNKIKAAVAQIINNSDIDIQNNLTQNSDLQTTPSTTLHTDNHPSTNDIIPYHSPITTTNLPINSPNIPDTFEQTITIESINTNIDTDSTETQKIENIFTEMLIKYSGTDPTLRPIIPKLHVTRNIIKTVNVLNNLIAKYLEGKEFPGLNEIHIAIYSAAMTAAALHNKIKNPPENTNTNKTIDYSNPKWQQRIENRIKNLRKEIGQLTQYLAGNLSPRKQQKVNPKNLSNAQLLDLLDNFKQKLQAQSKRLRRLKISNSRRKDNILFHSNQKIFYRNLTNENFKITQPPNIDEVKSYWENLWSKPVHHDMQSSWLDSEIQECQNLIPMPEIIISKDDVTAAIKKTLNWKAPGPDKIQNYWIKYFTATHRYIAEIFNTFIDDPRTIPSYLTQGITYLKPKDNNNTTDPTKYRPITCLPTIYKLLTSIITQKLNTHITQNAIIPEEQKGCAKGSKGCKEQLIIDAEIHNHAKQNHKNLYYSYIDYQKAFDSVPHSWLIHVLKIYKVDCKLIQFLQNLMSTWSTKLHLRTINTTFSTSPIQIKRGIFQGDSLSPLWFCLALNPLTKILNKCHGYIIDKTNKIKLTHLLYMDDIKIYATDRQQLEQLLRLTEKFSTDIKMTFGTDKCKINCILKGKHTQTEPHNLELQGGTIDSMQEKGTYKYLGYIQSTAINHKEIKNMLTSKYKLRLNKILSTQLSGRNKIKAINTYAVPILTYSFGIIKWIDTELEALNIATRTASYKHNIHHIHSATERFTLKRKLGGRGVIDIKNLHYNQIHNLRTYFLTKANTSPLHNALINIPHSDTPLKLNNNQFDPIHKIVKDSDKIIKWKGKALHGKFPHQIEQDHIDQEASFSWLTKGNIYGETEGFLVAIQDQIIKTRNYSKYILKENIETDKCRLCHQTTETIDHITGGCSALASKEYTHRHDNLAKQIHQLLAMKYNLIETHTPYYKYKPSNVLENSSVKLYWDRDIITDRTILSNRPDITLTIKSEKTTYLIDIAVPNTNNLKQKHNEKIQKYIPLADEIKQMWRQKTVKILPIIISSTGVIPKTLHSALKTIDLHKNTYIQMQKSIVIDTCSIVRRFLNPSSSFTTHQS

SEQ ID NO: 1303 - protein, 932 aa, Lysandra coridon
MTAATLHNKIKNPPENTNTNKTIDQSNPKWQQRIENRIKNLRKEIGQLTQYLAGNLSPRKQQKVNPNNLSNAQLLDLLDNFKQKLQAQSKRLRRLKISNSRRKDNILFHSNQKIFYRNLTNENFKITQPPNIDEVKSYWENLWSKPVHHDMQSSWLDSEIQECQNLIPMPEIIISKDDVTAAIKKTLNWKAPGPDKIQNYWIKYFTATHRYIAEIFNTFIDDPRTIPSYLTQGITYLKPKDNNNTTDPTKYRPITCLPTIYKLLTSIITQKLNTHITQNAIIPEEQKGCAKGSKGCKEQLIIDAEIHNHAKQNHKNLYYSYIDYQKAFDSVPHSWLIHVLKIYKVDCKLIQFLQNLMSTWSTKLHLRTIDTTFSTSPIQIKRSIFQGDSLSPLWFCLALNPLTKILNKCHGYIIDKTNKIKLTHLLYMDDIKIYATDRQQLEQLLRLTEKFSTDIKMTFGTDKCKINCILKGKHTQTEPHNLELQGGTIDSMQEKETYKYLGYIQSTAINHKEIKNMLTSKYKLRLNKILSTQLSGRNKIKAINTYAVPILTYSFGIIKWTDTELEALNIVTRTASYKHNIHHIHSATERFTLKRKLGGRGVIDIKNLHYNQIHNLRTYFLTKANTSPLHNALINIPHSDTPLKLNNNQFDPIHKIVKDSDKIIKWKGKALHGKFPHQIEQDHIDQEASFSWLTKGNIYGETEGFLVAIQDQIIKTRNYSKYILKENIETDKCRLCHQTTETIDHITGGCSALASKEYTHRHDNLAKQIHQLLAMKYNLIETHTPYYKYKPSNVLENSSVKLYWDRDIITDRTILSNRPDITLTIKSEKTTYLIDIAVPNTNNLKQKHNEKIQKYIPLADEIKQMWRQNTVKILPIIISSTGVIPKTLHSALKTIDLHKNTYIQMQKSIVIDTCSIVRRFLNPSSSFTSHQS

SEQ ID NO: 1304 - protein, 1311 aa, Lycaena phlaeas
MRLRHRKILPQAGTGAKSNGESRPGSSGPGSPAYSRGGTVSPNPVQSCTATDNIIPTTSNTHLCSSSPTSSTSLFSSPPSSPQSYMLNNNSSSSRSTSLSLMSDDATQEAIASDPVPISDITPPTSTSQNTDQNSVDHNIAIQPQLNITPARSVLQDMLPPTTLAGKSRQRMKWTNHINKELLRCYYIITSCESNLTAFRPLLHKKFIDVFPELGHITEQRLADQIRVIHRNNRISLPERNKIKAAVAQITNNSYLDIQNSLTQNSELQITPTTTPHTDNHPSTNDIIPYHSAITTANPPINSAIILDTLEQTITIESNNAIIDTDSTETQKIENIFTEMLIEYSGTDPTLRPIIPKLHVTRNIIKTINILNNLIAKHLAEMESPGLDEIHISIYSAAIITTATLHNKIKNPPETTNTNKTIDHTNPKWQQRIENRIKNLRKEIGQLTQYLAGNLSLRKQQKVNPKNLSNAQLLDLLDTFKQKLQAQSKRLRRLKISNSRRKDNILFYSNQKLFYQNLTNENFKITQPPNIDEVKSYWENLWSKPVQHNMQSSWLDSEIQECQNLIPMPEIIISKDDVTGAIKKTLNWKVPGPDKIQNYWIKYFTATHRYIAEIFNTFINDPRTIPSYLTQGITYLKPKDKNDTTDPTKYRPITCLPTIYKLLTSIITHKLNTHITRNTIIPEEQKRCAKGSRGCKEQLIIDAEVHNHAKQNHKNLYYSYIDYQKAFDSVPHSWLIHVLKIYKVDYKLIQLLQNLMSTWSTKLHLRTIDTFSTSPIKIKRGIFQGDSLSPLWFCLALNPLTKILNKCHGYLIDKTNKIKLTHLLYMDDIKIYATDRQQLEQLLKLTEKFSTDIKMTFGTDKCKINCILKGKHTQTEPHNLELQRGTIESMQEKETYKYLGYIQSTAINHKEIKNILKSKYKLRLNKILSTQLSGRNKIKAINTYAVPILTYSFGIIKWTDTELEALNIATRTASYKHNIHHIHSATERFTLKRKLGGRGVIDIKNLHYNQIHNLRTYFLTKATTSPLHNALINLPHSGTPLKLNNNQFDPLHKIIKDSDKIIKWKGKALHGKFPHQIEQDHIDQDASFSWLTKGNIYSETEGFLVAIQDQIIKTRNYSKYILKENIETDKCRLCHQTTETIDHITGGCSALASKEHTHRHDNIAKQIHQLLAMKHKLIETHTPYYKYKPSNVLENSSVKLYWDRDIVTDRTILSNRPDITLTIKSEKTTYLIDIAVPNTNNLIQKHNEKIQKYIPLADEIKQMWRQNTVKIVPVIISSTGVIPKTLHPALKTIDLHKNSYIQMQKSIVIDT

SEQ ID NO: 1305 - protein, 1329 aa, Lysandra bellargus
MRLRNRKILPQAGTGANSNGESRPGPSGPGSPTYSGGGTVSLNSVQSCAAADNIIPTTINTHSCPSSPTSSVSLFPSPHSSPQSYMLNNSSSSRSTSLSLMPDDATQEAIAYDPAPISDSTPSTSTSQNTNQNPVDHNIDIQPQLNITPARSVLQDMLPPTTLAGKSRQRMKWTDHINKELLRCYYIITSCESNLTAFRPSLHKKFIEVFPELSHISEQRLADQIRVIHRNNRISPPERNKIKAAIAQIINNSDIGIQNNLTQNSDLQTTPSTTLHTDNHPSTNDIIPYHSPITTTNLPINSPNIPDTFEQTITIESINTNIDTDSTETQKIENIFTEMLIKYSGTDPTLRPTIPKLHVTRNTIKTVNVLNNLIAKYLEGKEFPGLNEIHIAIYSAAMTAATLHNKIKNPPENTNTNKTIDQSNPKWQQRIENRIKNLRKEIGQLTQYVAGNLSPRKQKKVNPNNLSNAQLLDLLDNFKQKLQAQSKRLRRLKISNSRRKDNILFHSNQKIFYRNLTNENFKITQPPNIDEVKSYWENLWSKPVHHDMQSSWLDSEIQECQNLIPMPEIIISKDDVTAAIKKTLNWKAPGPDKIQNYWIKYFTATHRYIAEIFNTFIDDPRTIPSYLTQGITYLKPKDNNNTTDPTKYRPITCLPTIYKLLTSIITQKLNTHITQNAIIPEEQKGCAKGSKGCKEQLIIDAEIHNHAKQNHKNLYYSYIDYQKAFDSVPHSWLIHVLKIYKVDCKLIQFLQNLMSTWSTKLHLRTIDTTFSTSPIQIKRGIFQGDSLSPLWFCLALNPLTKILNKCHGYIIDKTNKIKLTHLLYMDDIKIYATDRQQLEQLLRLTEKFSTDIKMTFGTDKCKINCILKGKHTQTEPHNLELQGGTIDSMQEKETYKYLGYIQSTAINHKEIKNMLTSKYKLRLNKILSTQLSGRNKIKAINTYAVPILTYSFGIIKWTDTELEALNIVTRTASYKHNIHHIHSATERFTLKRKLGGRGVIDIKNLHYNQIHNLRTYFLTKANTSPLHNALINIPHSDTPLKLNNNQFDPIHKIVKDSDKIIKWKGKALHGKFPHQIEQDHIDQEASFSWLTKGNIYGETEGFLVAIQDQIIKTRNYSKYILKENIETDKCRLCHQTTETIDHITGGCSALASKEYTHRHDNLAKQIHQLLAMKYNLIETHTPYYKYKPSNVLENSSVKLYWDRDIITDRTILSNRPDITLTIKSEKTTYLIDIAVPNTNNLKQKHNEKIQKYIPLADEIKQMWRQNTVKILPIIISSTGVIPKTLHSALKTIDLHKNTYIQMQKSIVIDTCSIVRRFLNPSSSFTSHQS

SEQ ID NO: 1306 - protein, 1160 aa, Plebejus argus
MKWTDHINKELLRCYYIITSCESNLTAFRPSLHKKFIEVFPELSHNISEQRLADQIRVIHRNNRISLPERNKIKAAVAQIINNSDLDIQNNLTQNSDLQTTPSTTLHTDNHTSTNDIIPYHTPITTTNLPITSPNIPDTFEQTITIESINTNIDTDSTETQKIENIFTEMLIKYSGTDPTLRPIIPKLHITRNIIKTVNVLNNLIAKYLEGKEFPGLDEIHIAIYSAAMTAATLHNKIKDPPENTNTNKTIDHSNPKWQQRIENRIKNLRKEIGQLTQYLAGNLSPRKQQKVNPKNLSNAQLLDLLDNFKQKLQAQSKRLRRLKISNSRRKDNILFHSNQKIFYRNLTNENFKITQPPNIDEVKSYWENLWSIPVHHNMQSSWLDSETQECQNLIPMPEIIISKDDVTAAIKKTLNWKAPGPDKIQNYWIKYFTATHRYIAEIFNTFIEDPRTIPSYLTQGITYLKPKDNNNTTDPTKYRPITCLPTIYKLLTSIITQKLNTHITQNTIIPEEQKGCAKGSKGCKEQLIIDAEVHNHAKQNHKNLYYSYIDYQKAFDSVPHSWLIHVLKIYKVDCKLIQFLQNLMSTWSTKLHLRTIDTTFSTSPIQIKRGIFQGDSLSPLWFCLALNPLTKILNKCHGYIIDKTNKIKLTHLLYMDDIKIYATDRQQLEQLLRLTEKFSTDIKMTFGTDKCKINCIIKGKHTQTEPHNLELQGGTIDSMQEKETYKYLGYIQSTAINHKEIKNMLKSNYKLRLNKILSTQLSGRNKIKAINTYAVPILTYSFGIIKWTDTELEALNIATRTASYKHNIHHIHSATERVTLKRKLGGRGVIDIKNLHYNQIHNLRTYFLTKANTSPLHNALINIPHSGTPLKLNNNQFDPIHKIVKDSDKIIKWKGKALHGKFPHQIEQDHIDQEASFSWLTKGNIYGETEGFLIAIQDQIIKTRNYSKYILKENIETDKCRLCHQTTETIDHITGGCSALASKEYTHRHDNLAKQIHQLLAMKYNLIELHTPYYKYKPTNVLENSSVKLYWDRDIITDRTILSNRPDITLTIKSEKTTYLIDIAVPNTNNLKQKHNEKIQKYIPLADEIKQMWRQNTVKIVPIIISSTGVIPKTLHSALKIIDLHKNTYIQMQKSIVIDTCSIVRRFLNPSSSFTTHQS

SEQ ID NO: 1307 - protein, 1326 aa, Lysandra coridon
MRLRNRKILPQAGTGANSNGESRPGPSGPGSPTYSGGSTVSLNSVQSCAAADNIIPTTINTHSCPSSPTSSVSLFPSPHSSPQSYMLNNSSSSRSTSLSLMPDDATQEAIAYDPAPISDSTPSTSTSQNTNQNPVDHNIDIQPQLNITPARSVLQDMLPPTTLAGKSRQRMKWTDHINKELLRCYYIITSCESNLTAFRPSLHKKFIEVFPELSHISEQRLADQIRVIHRNNRISPPERNKIKAAVAQIINNSDIDIQNNLTQNSDLQTTPSTTLHTDNHPSTNYIIPYHSPITTTNLPINSPNIPDTFEQTITIESINTNIDTDSTETQKIENIFTELLIKYSGTDPTLRPIIPKLHVTRNIIKTVNVLNNLIAKYLEGKEFPGLNEIHIAIYSAAMTAATLHNKIKNPPENTNTNKTMDHSNPKWQQRIENRIKNVRKEIGQLTQYLAGNLSPRKQQKVNPKNLSNAQLLDLLDNFKQKLQAQSKRLRRLKISNSRRKDNILFHSNQKIFYRNLTNENFKITQPPNIDEVKSYWENLWSKPVHHDMQSSWLDSEIQECQNLIPMPEIIISKDDVTAAIQKTLNWKAPGPDKIQNYWIKYFTATHRYIAEIFNTFIDDPRTIPSYLTQGITYLKPKDNNNTTDPTKYRPITCLYKLLTSIITQKLNTHITQNAIIPEEQKGCAKGSKGCKEQLIIDAEIHNHAKQNHKNLYYSYIDYQKAFDSVPHSWLIHVLKIYKVDCKLIQFLQNFMSTWSTKLHLRTIDTTFSTSPIQIKRGIFQGDSLSPLWFCLALNPLTKILNKCHGYIIDKTNKIKLTHLLYMDDIKIYATDRQQLEQLLRLTEKFSTDIKMTFGTDKCKINCILKGKHTQTEPHNLELQGGTIDSMQEKETYKYLGYIQSTAINHKEIKNMLASKYKLRLNKILSTQLSGRNKIKAINTYAVPILTYSFGIIKWTDTELEALNIATRTASYKHNIHHIHSATERFTLKRKLGGRGVIDIKNLHYNQIHNLRTYFLTKANTSPLHNALIDIPHSDTPLKLNNNQFDPIHKIVKDSDKIIKWKGKALHGKFPHQIEQDHIDQEASFSWLTKGNIYGETEGFLIAIQDQIIKTRNYSKYILKENIETDKCRLCHQTTETIDHITGGCSALASKEYTHRHDNLAKQIHQLLAMKYNLIETHTPYYKYKPSNVLENSSVKLYWDRDIITDRTILSNRPDITLTIKSEKTTYLIDIAVPNTNNLKQKHNEKIQKYIPLADEIKQMWRQNTVKILPIIISSTGVIPKTLHSALKTTDLHKNTYIQMQKSIVIDTCSIVRRFLNPSSSFTSHQS

SEQ ID NO: 1308 - protein, 1329 aa, Lycaena phlaeas
MRLRNRKILPQAGTGAKSNGESRPGSSGPGSPTYSGGGTVSPNPVQSCTATDNIIPTTSNTHSYSSSPTSSTSLFSSPPSSPQSYMLNNNSSSSRSTSLSLMSDDATQEAIASDPVPISDITPPTSTSQNTDQNSVDHNIAIQPQLNITPARSVLQDMLPPTTLAGKSRQRMKWTDHINKELLRCYYIITSCESNLTAFRPLLHKKFIDVFPELGHITEQRLADQIRVIHRNNRISLPERNKIKAAVAQITNNSYLDIQNSLTQNSELQITPTITPHTDNHPSTNDIIPYHSAIITTNPPINSPNILDTLEQTITIESNNAIIDTDSTETQKIENIFTEMLIKYSGTDPTLRPIIPKLHVTRNIIKTINILNNLIAKHLAETESPGLDEIHISIYSAAITTATLHNKIKNPPETTNTNKTIDHTNPKWQKRIENRIKNLRKEIGQLTQYLAGNLSLRKQQKVNPKNLSNAQLLDLLDTLKQKLQAQSKRLRRLKISNSRRKDNILFYSNQKLFYQNLTNENFKITHPPNIDEVKSYWENLWSKPVQHNMQSSWLDSEIQECQNLIPMPEIIISKDDVTGAIKKTLNWKAPGPDKIQNYWIKYFTATHRYIAEIFNTFINDPRTIPSYLTQGITYLKPKDKNDTTDPTKYRPITCLPTIYKLLTSIITQKLNTHITRNTIIPEEQKGCAKGSRGCKEQLIIDAEVHNHAKQNHKNLYYSYIDYQKAFDSVPHSWLIHVLKIYKVDSKLIQFLQNLMSTWSTKLHLRTIDTFSTSPIKIKRGIFQGDSLSPLWFCLALNPLTKILNKCHGYLIDKTNKIKLTHLLYMDDIKIYATDRQQLEQLLKLTEKFSTDIKMTFGTDKCKINCILKGKHTQTEPHNLELQRGTIESMQEKETYKYLGYIQSTAINHKEIKNILKSKYKLRLNKILSTQLSGRNKIKAINTYAVPILTYSFGIIKWTDTELEALNIATRTASYKHNIHHIHSATERFTLKRKLGGRGVIDIKNLHYNQIHNLRTYFLTKATTSPLHNALINLPHSGTPLKLNNNQFDPLHKIIKDSDKIIKWKGKALHGKFPHQIEQDHIDQDASFSWLTKGNIYSETEGFLVAIQDQIIKTRNYSKYILKENIETDKCRLCHQTTETIDHITGGCSALASKEYTHRHDNIAKQIHQLLAMKHKLIETHTPYYKYKPSNVLENSSVKLYWDRDIVTDRTILSNRPDITLTIKSEKTTYLIDIAVPNTNNLIQKHNEKIQKYIPLADEIKQMWRQNTVKIVPVSISSTGVIPKTLHSALKTIDLHKNSYIQMQKSIVIDTCSIVRRFLNPSSSFTTSQS

SEQ ID NO: 1309 - protein, 1329 aa, Lycaena phlaeas
MRLRNRKILPQAGTGAKSNGESRPGSSGPGSPAYSGGGTVSPNPVQSCTATDNIIPTTSNTHPCSSSPTSSTSLFSSPPSSPHSYMLNNNSSSSRSTSLSLMSDDATQEAIASDPVPISDITPPTSTSQNTDQNSVDHNIAIQPQLNITPARSILQDMLPPTTLAGKSRQRMKWTDHINKELLRCYYIITSCESNLTAFRPLLHKKFIDVFPELGHITEQRLADQIRVIHRNNRISLPERNKIKAGVAQITNNSDLDIQNSLTQNSELQITPTTTPHTDNHPSTNDIIPYHSAITTTNPPINSPNILDTLEQTITIESSNEIIDTDSTETQKIENIFTEMLIKYSGTDPTLRPIIPKLHVTRNIIKTINILNNLIAKHLAEMESPGLDEIHISIYSAAITTATLHNKIKNPPETTNTNKTIDHTNPKWQQRIENRIKNLRKEIGQLTQYLAGNLSLRKQQKVNPKNLSNAQLLDLLDTFKQKLQAQSKRLRRLKISNSRRKDNILFYSNQKLFYQNLTNENFKITQPSNINEVQSYWENLWSKPVQHNMQSSWLDSEIQECQNLIPMPEIIISKDDVTGAIKKTLNWKAPGPDKIQNYWIKYFTATHRYIAEIFNTFINDPRTIPSYLTQGITYLKPKDKNDTTDPTKYRPITCLPTIYKLLTSIITQKLNTHITQNTIIPEEQKGCAKGSRGCKEQLIIDAEVHNHAKQNHKNLYYSYIDYQKAFDSVPHSWLIHVLKIYKVDSKLIQFLQNLMSTWSTKLHLRTIDTFSTSPIKIKRGIFQGDSLSPLWFCLALNPLTKILNKCHGYLINKTNKIKLTHLLYMDDIKIYATDRQQLEQLLKLTEKFSTDIKMTFGTDKCKINCILKGKHTQTEPHNLELQRGTIESMQEQETYKYLGYIQSTAINHKEIKNILKSKYKLRLNKILSTQLSGRNKIKAINTYAVPILTYSFGIIKWTDTELEALNIATRTASYKHNIHHIHSATERFTLKRKLGGRGVIDIKNLHYNQIHNLRTYFLTKATTSPLHNALINLPHSGTPLKLNNNQFDPLHKIIKDSDKIIKWKGKALHGKFPHQIEQDHIDQEASFSWLTKGNIYSETEGFLVAIQDQIIKTRNYSKYILKENIETDKCRLCHQITETIDHITGGCSALASKEYTHRHDNIAKQIHQLLAMKHKLIETHTPYYKYKPSNVLENSSVKLYWDRDIVTDRTIISNRPDITLTIKSEKSTYLIDIAVPNTNNLIQKHNEKIQKYIPLADEIKQMWRQNTVKIVPVIISSTGVIPKTLHPALKTIDLHKNSYIQMQKSIVIDTCSIVRRFLNPSSSFTTSQS

SEQ ID NO: 1310 - protein, 991 aa, Plebejus argus
MLIKYSGTDPTLRPIIPKLHITRNIIKTVNVLNNLIARYLEGKEFPGLDEIHIAIYSAAMTAATLHNKIKDPPENTNTNKTIDHSNPKWQQRIENRIKNLRKEVGQLTQYLAGNLSPRKQQKVNPKNLSNAQLLDLLDNFKQKLQAQSKRLRRLKISNSRRKDNILFHSNQKIFYRNLTNENFKITQPPNIDEVKSYWENLWSIPVHHNMQSSWLDSETQECQNLIPMPEIIISKDDVTAAIKKTLNWKAPGPDKIQNYWIKYFTATHRYIAEIFNTFIEDPRTIPSYLTQGITYLKPKDNNNTTDPTKYRPITCLPTIYKLLTSIITQKLNTHITQNTIIPEEQKGVAKGSKGCKEQLIIDAEVHNHAKQNHKNLYYSYIDYQKAFDSVPHSWLIHVLKIYKVDCKLIQFLQNLMSTWSTKLHLRTIDTTFSTSPIQIKRGIFQGDSLSPLWFCLALNPLTKILNKCHGYIIDKTNKIKLTHLLYMDDIKIYATDRQQLEQLLRLTEKFSTDIKMTFGTDKCKINCIIKGKHTQTEPHNLELQGGTIDSMQEKETYKYLGYIQSTAINHKEIKNMLKSKYKLRLNKILSTQLSGRNKIKAINTYAVPILTYSFGIIKWTDTELEALNIATRTASYKHNIHHIHSATERFTLKRKLGGREVIDIKNLHYNQIHNLRTYFLTKANTSPLHNALINIPHSGTPLKLNNNQFDPIHTIVKDSDKIIKWKGKALHGKFPHQIEQDHIDQEASFSWLTKGNIYGETEGFLIAIQDQIIKTRNYSKYILKENIETDKCRLCHQTTETIDHITGGCSALASKEYTHRHDNLAKQIHQLLAMKYNLIETHTPYYKYKPTNVLENSSVKLYWDRDIITDRTILSNRPDITLTIKSEKTTYLIDIAVPNTNNLKQKHNEKIQKYIPLADEIKQMWRQNTVKIVPIIISSTGVIPKTLHSALKTIDLHKNTYIQMQKSIVIDTCSIVRRFLNPSSSFTTHQS

SEQ ID NO: 1311 - protein, 1329 aa, Lysandra bellargus
MRLRNRKILPQAGTGANSNGESRPGPSGPGSPTYSGGGTVSLNSVQSCAAADNIIPTTINTHSCPSSPTSSVSLFPSPHSSPQSYMLNNSSSSRSTSLSLMPDDATQEAIAYDPAPISDSTPSTSTSQNTNQNPVDHNIDIQPQLNITPARSVLQDMLPPTTLAGKSRQRMKWTDHINKELLRCYYIITSCESNLTAFRPSLHKKFIEVFPELSHISEQRLADQIRVIHRNNRISPPERNKIKAAVAQIINNSDIGIQNNLTQNSDLQTTPSTTLHTDNHPSTNDIIPYHSPITTTNLPINSPNIPDTFEQTITIESINTNIDTDSTETQKIENIFTEMLIKYSGTDPTLRPTIPKLHVTRNIIKTVNVLNNLIAKYLEGKEFPGLNEIHIAIYSAAMTAATLHNKIKNPPENTNTNKTIDQSNPKWQQRIENRIKNLRKEIGQLTQYLAGNLSPRKQKKVNPNNLSNAQLLDLLDNFKQKLQAQSKRLRRLKISNSRRKDNILFHSNQKIFYRNLTNENFKITQPPNIDEVKSYWENLWSKPVHHDMQSSWLDSEIQECQNLIPMPEIIISKDDVTAAIKKTLNWKAPGPDKIQNYWIKYFTATHRYIAEIFNTFIDDPRTIPSYLTQGITYLKPKDNNNTTDPTKYRPITCLPTIYKLLTSIITQKLNTHITQNAIIPEEQKGCAKGSKGCKEQLIIDAEIHNHAKQNHKNLYYSYIDYQKAFDSVPHSWLIHVLKIYKVDCKLIQFLQNLMSTWSTKLHLRTIDTTFSTSPIQIKRGIFQGDSLSPLWFCLALNPLTKILNKCHGYIIDKTNKIKLTHLLYMDDIKIYATDRQQLEQLLRLTEKFSTDIKMTFGTDKCKINCILKGKHTQTEPHNLELQGGTIDSMQEKETYKYLGYIQSTAINHKEIKNMLTSKYKLRLNKILSTQLSGRNKIKAINTYAVPILTYSFGIIKWTDTELEALNIVTRTASYKHNIHHIHSATERFTLKRKLGGRGVIDIKNLHYNQIHNLRTYFLTKANTSPLHNALINIPHSDTPLKLNNNQFDPIHKIVKDSDKIIKWKGKALHGKFPHQIEQDHIDQEASFSWLTKGNIYGETEGFLVAIQDQIIKTRNYSKYILKENIETDKCRLCHQTTETIDHITGGCSTLASKEYTHRHDNLAKQIHQLLAMKYNLIETHTPYYKYKPSNVLENSSVKLYWDRDIITDRTILSNRPDITLTIKSEKTTYLIDIAVPNTNNLKQKHNEKIQKYIPLADEIKQMWRQNTVKILPIIISSTGVIPKTLHSALKTIDLHKNTYILMQKSIVIDTCSIVRRFLNPSSSFTSHQS

SEQ ID NO: 1312 - protein, 1329 aa, Aricia agestis
MRLRNRKILPQAGTGANSNGESRPGPSGPGSPTYSGGGTVSLNSVQSYAAADNIILTTSNTHSCPSSPTSSVNLFPSPHSSPQSYILNTSSSSRSTSLSLMSDGVTQEAIAYDPMPISDSTPSTSTLQNTHQNPVDHNIAIQPQLNITPARSVLQDMLPPTTLAGKSRQRMKWTDHINKELLRCYYIITSCESNLTAFRPSLHKKFIEVFPELSHISEQRLADQIRVIHRNNRISLPNRNKIKAAVAQIINNSDLDTQDNLTQNSDLQTTPSTTLHTDSYPSTNDAIPYHSPITTTNPPISSPNIPDIFEQTITIESINTNINTDSAEIQKIENIFTEMLIKYSGTDPTLRPIIPKLHVTRNIIKTVNVLNNLIAKYLEGKEFPGLDEIHIAIYSAAMTAATLHNKIKKPPENTNTNKTIDHSNPKWQQRIENRIKDLRKKIGQLTQYLAGNLSPRKQQKVNPKDLSNAQLLDLLDNFKQKLQAQSKRLRRLKISNSRRKDNILFHSNQKIFYQNLTNENFKITQPPNIDEVKSYWKNLWSKPVNHNMQSSWLDSEIQECQNLIPMPEIKISKNDVTVAIKKTLNWKAPGPDKIQNYWIKYFTATHRYIAEIFNTFIDDPRTIPLYLTRGITYLKPKDSNNTTDPTKYRPITCLPTIYKLLTSIITQKLNTHITQNAIIPEEQKGCAKGSKGCKEQLIIDAEVHNHAKQNHKNLYYSYIDYQKAFDSVPHSWLIHVLKMYKVDCKLIQLLQNLMSNWSTKLHLRTIDTTFSTSPIQIKRGIFQGDALSPLWFCLALNPLTKILNKCHGYIIDKTNKIKLTHLLYMDDIKIYATDRQQLEQLLRLTEKFSTDIKMTFGTDKCKINCVLNGKHTQTEPHNLELQEGTIDSMQEKDTYKYLGYIQSTAINHKEIKNMLKSKYKLRLNKILSTQLSGRNKIKAINTYAVPILTYSFGIIKWTDTELEALNIATRTASYKHNIHHIHSATERFTLKRKLGGRGVIDIKNLHYNQIHNLRTYFLTKANTSPLHNALMNIPHSGTPLKLNNNQFDPKHKIVKDSDKIIKWKGKALHGKFPHQIEQEHIDQEASFSWLTKGNIYSETEGFLIAIQDQIIKTRNYSTYILKENIETDKCRLCHQTTETIDHITGGCSALASKEYTHRHDNVAKQIHQLLAIKHNLIDTHTPYYKYKPSNILENSSVKLYWDRDIVTDRTILSNRPDIALTIKSEKTTYLIDIAVPNTNNLKQKHTEKIQKYIPLADEIKQMWRQNTVKIVPVIISSTGVIPKTLHSALKTIDLHKNSYIPMQKAIVIDTCSIVRRFLNPSSSFTSSQS

SEQ ID NO: 1313 - protein, 1329 aa, Lysandra bellargus
MRLRNRKILPQAGTGANSNGESRPGPSGPGSPTYSGGGTVSLNSVQSCAAADNIIPTTINTHSCPSSPTSSVSLFPSPHSSPQSYMLNNSSSSRSTSLSLMPDDATQEAIAYDPAPISDSTPSTSTSQNTNQNPVDHNIDIQPQLNITPARSVLQDMLPPTTLAGKSRQRMKWTDHINKELLRCYYIITSCESNLTAFRPSLHKKFIEVFPELSHISEQRLADQIRVIHRNNRISPPERNKIKAAVAQIINNSDIGIQNNLTQNSDLQTTPSTTLHTDNHPSTNDIIPYHSPITTTNLPINSPNIPDTFEQTITIESININIDTDSTETQKIENIFTEMLIKYSGTDPTLRPTIPKLHVTRNIIKTVNVLNNLIAKYLEGKEFPGLNEIHIAIYSAAMTAATLHNKIKNPPENTNTNKTIDQSNPKWQQRIENRIKNLRKEIGQLTQYLAGNLSPRKQKKVNPNNLSNAQLLDLLDNFKQKLQAQSKRLRRLKISNSRRKDNILFHSNQKIFYRNLTNENFKITQPPNIDEVKSYWENLWSKPVHHDMQSSWLDSEIQECQNLIPMPEIIISKDDVTAAIKKTLNWKAPGPDKIQNYWIKYFTATHRYIAEIFNTFIDDPRTIPSYLTQGITYLKPKDNNNTTDPTKYRPITCLPTIYKLLTSIITQKLNTHITQNAIIPEEQKGCAKGSKGCKEQLIIDAEIHNHAKQNHKNLYYSYIDYQKAFDSVPHSWLIHVLKIYKVDCKLIQFLQNLMSTWSTKLHLRTIDTTFSTSPIQIKRGIFQGDSLSPLWFCLALNPLTKILNKCHGYIIDKTNKIKLTHLLYMDDIKIYATDRQQLEQLLRLTEKFSTDIKMTFGTDKCKINCILKGKHTQTEPHNLELQGGTIDSMQEKETYKYLGYIQSTAINHKEIKNMLTSKYKLRLNKILSTQLSGRNKIKAINTYAVPILTYSFGIIKWTDTELEALNIVTRTASYKHNIHHIHSAIERFTLKRKLGGRGVIDIKNLHYNQIHNLRTYFLTKANTSPLHNALINIPHSDTPLKLNNNQFDPIHKIGKDSDKIIKWKGKALHGKFPHQIEQDHIDQEASFSWLTKGNIYGETEGFLVAIQDQIIKTRNYSKYILKENIETDKCRLCHQTTETIDHITGGCSTLASKEYTHRHDNLAKQIHQLLAMKYNLIETHTPYYKYKPSNVLENSSVKLYWDRDIITDRTILSNRPDITLTIKSEKTTYLIDIAVPNTNNLKQKHNEKIQKYIPLADEIKQMWRQNTVKILPIIISSTGVIPKTLHSALKTIDLHKNTYILMQKSIVIDTCSIVRRFLNPSSSFTSHQS

SEQ ID NO: 1314 - protein, 1329 aa, Lycaena phlaeas
MRLRNRKILPQAGTGAKSNGESRPGSSGPGSPAYSGGGTVSPNPVQSCTATDNIIPTTSNTHSCSSSPTSSTNLFSSPPSSPQSYMFNNNSSSSRSTSLSLMSDDATQEAIASDPVPISDITPPTSTSQNTDQNSVDHNIAIQPQLNITPARSVLQDMLPPTTLAGKSRQRMKWTDHINKELLRCYYIITSCESNLTAFRPLLHKKFIDVFPELGHITEQRLADQIRVIHRNNRISLPERNKIKAAVAQITNNSYLDIQNSLTQNSELQMTPSTTPHTDNHPSTNDIIPYHSAITTTNPPINSPNILDTHEQTITIEPNNAIIDTDSTETQKIENIFTEMLIKYSGTDPTLRPIIPKLHVTRYIIKTINILNNLIAKHLAEMESPGLDEIHISIYSAAITTATLHNKIKNPPETTNTNKTIDHTNPKWQQRIENRIKNLRKEIGQLTQYLAGNLSLRKQQKVNPKNLSNAQLLDLLDTFKQKLQAQSKRLRRLKISNSRRKDNILFYSNQKLFYQNLTNENFKITQPPNIDEIKSYWENLWSKPVQHNMQSSWLDSEIQECQNLIPMPEIIISKDDVTGAIKKTLNWKAPGPDKIQNYWIKYFTATHRYIAEIFNTFINDPRTIPSYLTQGITYLKLKDKNDTTDPTKYRPITCLPTIYKLLTSIITQKLNTHITRNTIIPEEQKGCAEGSRGCKEQLIIDAEVHNHAKQNHKNLYYSYIDYQKAFDSVPHSWLIHVLKIYKVDSKLIQFLQNLMSTWSTKLHLRTIDTFSTSPIKIKRGIFQGDSLSPLWFCLALNPLTKILNKCHGYLIDKTNKIKLTHLLYMDDIKIYATDRQQLEQLLKLTEKFSTDIKMTFGTDKCKINCILKGKHTQTEPHNLELQRGTIESMQEKETYKYLGYIQSTAINHKEIKNILKSKYKLRLNKILSTQLSGRNKIKAINTYAVPILTYSFGIIKWTDTELEALNIATRTASYKHNIHHIHSATERFTLKRKLGGRGVIDIKNLHYNQIHNLRTYFLTKATTSPLHNALINLPHSGTPLKLNNNQFDPLHKIIKDSDKIIKWKGKALHGKFPHQIEQDHIDQDASFSWLTKGNIYSETEGFLVAIQDQIIKTRNYSKYILKENTETDKCRLCHQTTETIDHITGGCSALASKEYTHRHDNIAKQIHQLLAMKHKLIETHTPYYKYKPSNVLENSSVKLYWDRDIVTDRTIISNRPDITLTIKSEKTTYLIDIAVPNTNNLIQKHNEKIQKYIPLADEIKQMWRQNTVKIVPVIISSTGVIPKTLHPALKTIDLHKNSYIQMQKSIVIDTCSIVRRFLNPSSSFTTSQS

SEQ ID NO: 1315 - protein, 1329 aa, Lycaena phlaeas
MRLRNRKILPQAGTGAKSNGESRPGSSGPGSPAYSGGGTVSPNPVQSCTATDNIIPTTSNTHSCSSSPTTSTSLFSSPPSSPQSYMLNNNSSSSRSTSLSLMSDDATQEAIASDPVPISDITPPTSTSQNTDQNSVDHNIAIQPQLNITPARSVLQDMLPPTTLAGKSRQRMKWTDHINKELLRCYYIITSCESNLTAFRPLLHKKFIDVFPELGHITEQRLADQIRVIHRNNRISLPERNKIKAAVAQITNNSYLDIQNSLTQNSELQITPTTTSHTDNHPSTNDIIPYHSAITTTNPPINSPNILDTHEQTITIESNNAIIDTDSTETQKIENIFTEMLIKYSGTDPTLRPIIPKLHVTRNIIKTINILNNLIAKHLAEMESPGLDEIHISIYSAAITTATLHNKIKNPPETTNTNKTIDHTNPKWQQRIENRIKNLRKEIGQLTQYLAGNLSLRKQQKVNPKNLSNAQLLDLLDTFKQKLQAQSKRLRRLKISNSRRKDNILFYSNQKLFYQNLTNENFKITQPPNIDEVKSYWENLWSKPVQHNMQSSWLDSEIQECQNLIPMPEIIISKDDVTGAIKKTLNWKAPGPDKIQNYWIKYFTATHRYIAEIFNTFINDPRTIPSYLTQGITYLKPKDKNDTNDPTKYRPITCLPTIYKLLTSIITQKLNTHITRNTIIPEEQKGCAKGSRGCKEQLIIDAEVHNHAKQNHKNLYYSYIDYQKAFDSVPHSWLIHVLKIYKVDSKLIQFLQNLMSTWSTKLHLRTIDTFSTSPIKIKRGIFQGDSLSPLWFCLALNPLTKILNKCHGYLIDKTNKIKLTHLLYMDDIKIYATDRQQLEQLLKLTEKFSTDIKMTFGTDKCKINCILKGKHTQTEPHNLELQRGTIESMQEKETYKYLGYIQSTAINHKEIKNILKSKYKLRLNKILSTQLSGRNKIKAINTYAVPILTYSFGIIKWTDTELEALNIATRTASYKHNIHHIHSATERFTLKRKLGGRGVIDIKNLHYNQIHNLRTYFLTKATTSPLHNALINLPHSGTPLKLNNNQFDPLHKIIKDSDKIIKWKGKALHGKFPHQIEQDHIDQDASFSWLTKGNIYSETEGFLVAIQDQIIKTRNYSKYILKENIETDKCRLCHQTTETIDHITGGCSALASKEYTHRHDNIAKQIHQLLAMKHKLIEAHTPYYKYKPSNVLENSSVKLYWDRDIVTDRTILSNRPDITLTIKSEKTTYLIDIAVPNTNNLIQKHNEKIQKYIPLADEIKQMWRQNTVKIVPVIISSTGVIPKTLHPALKTIDLHKNSYIQMQKSIVIDTCSIVRRFLNPSSSFTTSQS

SEQ ID NO: 1316 - protein, 1329 aa, Plebejus argus
MRLRNRKILPQAGTGANSNGESRPRPSGPGSPTYSGGGTVSLNSVQSCAAADNIIPTTSNTHSCPSSPTSSVSLFPSLHSSPQSYMLNNSSSSRSTSLSLVPDDATQEAIAYDPAPISDNTPSTSTSQNTHQDPVDHNIAIQSQLNITPSRSVLQDMLPPTTLAGKSRQRMKWTDHINKELLRCYYIITSCESNLTAFRPSLHKKFIEVFPELSHISEQRLADQIRVIHRNNRISLPERNKIKAAVAQIINNSDLDIQNNLTQNSDLQTTPSTTLHTDNHPSTNDIIPYHTPITTTNLPITSPNIPDTFEQTITIESINTNIDTDSTETQKIENIFTEMLIKYSGTDPTLRPIIPKLHITRNIIKTVNVLNNLIAKYLEGKEFPGLDEIHIAIYSAAMTAATLHNKIKDPPENTNTNKTIDHSNPKWQQRIENRIKNLRKEIGQLTQYLAGNLSPRKQQKVNPKNLSNAQLLDLLDNFKQKLQAQSKRLRRLKISNSRRKDNILFHSNQKIFYRNLTNENFKITQPPNIDEVKSYWENLWSIPVHHNMQSSWLDSETQECQNLIPMPEIIISKDDVTAAIKKTLNWKAPGPDKIQNYWIKYFTATHRYIAEIFNTFIEDPRTIPSYLTQGITYLKPKDNNNTTDPTKYRPITCLPTIYKLLTSIITQKLNTHITQNTIIPEEQKGCAKGSKGCKEQLIIDAEVHNHAKQNHKNLYYSYIDYQKAFDSVPHSWLIHVLKIYKVDCKLIQFLQNLMSTWSTKLHLRTIDTTFSTSPIQIKRGIFQGDSLSPLWFCLALNPLTKILNKCHGYIIDKTNKIKLTHLLYMDDIKIYATDRQQLEQLLRLTEKFSTDIKMTFGTDKCKINCIIKGKHTQTEPHNLELQGGTIDSMQEKETYKYLGYIQSTAINHKEIKNMLKSNYKLRLNKILSTQLSGRNKIKAINTYAVPILTYSFGIIKWTDTELEALNIATRTASYKHNIHHIHSATERVTLKRKLGGRGVIDIKNLHYNQIHNLRTYFLTKANTSPLHNALINIPHSGTPLKLNNNQFDPIHKIVKDSDKIIKWKGKALHGKFPHQIEQDHIDQEASFSWLTKGNIYGETEGFLIAIQDQIIKTRNYSKYILKENIETDKCRLCHQTTETIDHITGGCSALASKEYTHRHDNLAKQIHQLLAMKYNLIETHTPYYKYKPTNVLENSSVKLYWDRDIITDRTILSNRPDITLTIKSEKTTYLIDIAVPNTNNLKQKHNEKIQKYIPLADEIKQIWRQNTVKIVPIIISSTGVIPKTLHSALKIIDLHKNTYIQMQKSIVIDTCSIVRRFLNPSSSFTTHQS

SEQ ID NO: 1317 - protein, 1329 aa, Aricia agestis
MRLRNRKILPQAGTGANSNGESRPVPSGPGSPTYSGGGTVSLNSVQSYAAADNIILTTSNTHSCPSSPTSSVNLFPSPHLSPQSYILNTSSSSRSTSLSLMSDGVTQEAIAYDPMPISDSTPSTSTLQNTHQNPVDHNIAIQPQLNITPARSVLQDMLPPTTLAGKSRQRMKWTDHINKELLRCYYIITSCESNLTAFRPSLHKKFIEVFPELSHISEQRLADQIRVIHRNNRISLPNRNKIKAAVAQIINNSDLDTQDNLTQNSDLQTTPSTTLHTDSYPSTNDAIPYHSPITTTNPPISSPNIPDTFEQTITIESINTNINTDSAEIQKIENIFTEMLIKYSGTDPTLRPIIPKLHVTRNIIKTVNVLNNLIAKYLEGKEFPGLDEIHIAIYSAAMTAATLHNKIKKPPENTNTNKTIDHSNPKWQQRIENRIKDLRKKIGQLTQYLAGNLSPRKQQKVNPKNVSNAQLLDLLDNFKQKLQAQSKRLRRLKISNSRRKDNILFHSNQKIFYQNLTYENFKITQPPNIDEVKSYWENLWSKPVNHNMQSSWLDSEIQECQNLIPMPEIKISKNDVTVAIKKTLNWKAPGPDKIQNYWIKYFTATHRYIAEIFNTFIDDPRTIPSYLTRGITYLKPKDSNNTTDPTKYRPITCLPTIYKLLTSIITQKLNTHITQNTIIPEEQKGCAKGSKGCKEQLIIDAEVHNHAKQNHKNLYYSYIDYQKAFDSVPHSWLIHVLKIYKVDCKLIQFLQNLMSNWSTKLHLRTIDTTFSTSPIQIKRGIFQGDSLSPLWFCLALNPLTKILNKCHGYIIDKTNKIKLTHLLYMDDIKIYATDRQQLEQLLRLTEKFSTDIKMTFGTDKCKINCVLNGKHTQTEPHNLELQEGTIDSMQEKDTYKYLGYIQSTAINHKEIKNMLKSKYKLRLNKILSTQLSGRNKIKAINTYAVPILTYSFGIIKWTDTELDALNIATRTASYKHNIHHIHSATERFTLKRKLGGRGVIDIKNLHYNQIHNLRTYFLTKANTSPLHNALMNIPHSGTPLKLNNNQFDPKHKIVKDSDKIIKWKGKALHGKFPHQIEQEHIDQEASFSWLTKGNIYSETEGFLIAIQDQIIKTRNYSTYILKENIETDKCRLCHQTTETIDHITGGCSALASKEYTHRHDNVAKQIHQLLAIKHNLIDTHTPYYKYKPSNILENSSVKLYWDRDIVTDRTILSNRPDIALTIKSEKTTFLIDIAVPNTNNLKQKHTEKIQKYIPLADEIKQMWRQNTVKIVPVIISSTGVIPKTLHSALKTIDLHKNSYIPMQKAIVIDTCSIVRRFLNPSSSFTSSQS

SEQ ID NO: 1318 - protein, 1329 aa, Lycaena phlaeas
MRLRNRKILPQAGTGAKSNGESRPGSSGPGSPAYSGGGTVSPNPVQSCTATDNIIPTTSNTHSYSSSPTSSTSLFSSPPSSPQSYMLNNNSSSLRSTSLSLMSDDATQEAIASDPVPISDITPPTSTSQNTDQNSVDHNIAIQPQLNITPARSVLQDMLPPTTLAGKSRQRMKWTDHINKELLRCYYIITSCESNLTAFRPLLHKKFIDVFPELGHITEQRLADQIRVIHRNNRISLPERNKIKAAVAQITNNSYLGIQNSLTQNSELQITPTITPHTDNHPSTNDIIPHHSAITTTNPPINSPNIVDTLEQTITIESNNAIIDTDSTETQKIENIFTEMLIKYSGTDPTLRPIIPKLHVTRNIIKTINILNNLIAKHLAEMESPGLDEIHISIYSAAITTATLHNKIKNPPENTNTNKTIDHTNPKWQQRIENRIKNLRKEIGQLTQYLAGNLSLRKQQKVNPKNLSNAQLLDLLDTFKQKLQAQSKRLRRLKISNSRRKDNILFYSNQKLFYENLTNENFKITQPPNIDEVKSYWENLWSKPVQHNMQSSWLDSEIQECQNLIPMPEIIISKDDVTGAIKKTLNWKAPGPDKIQNYWIKYFTATHRYIAEIFNTFINDPRTIPSYLTQGITYLKPKDKNDTTDPTKYRPITCLPTIYKLLTSIITQKLNTHITRNTIIPEEQKGCAKGSRGCKEQLIIDAEVHNHAKQNHKNLYYSYIDYQKAFDSVPHSWLIHVLKIYKVDSKLIQFLQNLMSTWSTRLHLRTIDTFRTSPIKIKRGIFQGDSLSPLWFCLALNPLTKILNKCHGYLIDKTNKIELTHLLYMDDIKIYATDRQQLEQLLKLTEKFSTDIKMTFGTDKCKINCILKGKHTQTEPHNLELQRGTIESMQEKETYKYLGYIQSTAINHKEIKNILKSKYKLRLNKILSTQLSGRNKIKAINTYAVPILTYSFGIIKWTDTELEALNIATRTASYKHNIHHIHSATERFTLKRKLGGRGVIDIKNLHYNQIHNLRTYFLTKATTSPLHNALINLPHSGTPLKLNNNQFDPLHKIIKDSDKIIKWKGKALHGKFPHQIEQDHIDQDASFSWLTKGNIYSETEGFLVAIQDQIIKTRNYSKYILKENIETDKCRLCHQTTETIDHITGGCSALASKEYTHRHDNIAKQIHQLLAMKHKLIETHTPYYKYKPSNVLENSSVKLYWDRDIVTDRTILSNRPDITLTIKSEKTTYLIDIAVPNTNNLIQKHNEKIQKYIPLADEIKQMWRQNTVKIVPVIISSTGIIPKTLHPALKTIDLHKNSYIQMQKSIVIDTCSIVRRFLNPSSSFTTSQS

SEQ ID NO: 1319 - protein, 1328 aa, Plebejus idas
MRLRNRYIPQAGTGAKCNGESRPGPSGPGSPSYSGGGNVSLHSAQASTAAENIVPTTSNTHSHSTSPTSSISLFPSPHSSPRSYMFDKSSSSSRSTSQSPMSYVVTREATATYPVPIVDNTQSTSTLQTNERHPVDHNTSQSHLTNTPTRSVLEEMLPPTTLAGKCRQRMKWTVEINRELLRCYYIVTSCESNLTAFRPLLHQKFINDFPELSHLSEQRLADQIRVIHRNNRIAPHIREQIKKSVAETSQITETFVEPNSQNNADLQLSTCSSILQTDDQFVTNIISPHYSMLSSHEPIILPNSSQTIETQINATPRPPTNINPIETEKIENVFQEMLIKYTGMDPNLRPMIPKLQITHNVIKTVNALNHAIGKYLEEKEEPGLEEVHSIIYCGAMTTASLHTKTVKPKEKETRKTIDSVNPKWQIRIENRIKQLRKEIGQLTQYLKGNVNTRKQQKINPKSLPENQLSDNLDNLKQKLKAQSKRLRRLKISNARRKDNIQFNNNQKLFYQNLNSENIKVTQPPDINDVQEYWKNLWSKPVQHNSDCSWIESEEQDYQNIQQMPDITVDRDDVTRAIKKTLNWKAPGPDKIQNYWLKYFTSTHSHIANIFNSFIHTPKTIPLFFTQGITYLKPKDKDDTANPAKYRPITCLPTIYKLFTSIITQKLNTHITQNNIIPEEQKGCAKGSMGCKEQLIIDAEIHNNAKQNRNNLYFAYIDYQKAFDSIPHSWLIQVLKIYQVNNKLIQLLQYLMSTWSTQLILRSTNTQLSTPPIKIKRGIFQGDSLSPLWFCLALNPLSKILNKSSYGYTIDRANNIKLTHLLYMDDIKIYATDRLQLDYLLKLTERFSIDIKMAFGIDKCKINCVIKGKHQQINPHNLELQEDVIIDSMQAHDTYKYLGYIQNTAINHKDIKNTLKLKYKLRLNKILSTQLSGRNIVKAINTYAIPLLTYSFGIIKWSDRELEALNTATRTASYKHNIHHIHSAVERFTLKRKLGGRGCIDIKNLCYSQIENLRTYFQAKAQTSHLHKALIQLTRSGTPLQLNNSNFNPKYKITKDCDKIAKWKGKALHGKFPHQLEQDHIDQTASFSWLTRGNIYSETEGFLVAIQDQIIKTRNYSKYILKENIETDKCRLCHQTTETIDHITGGCSSLANKEYTHRHNNVAKHIHQLLALKYKLIDTHTPYYKYKPCNVLENSTAKLYWDRDIITDRTILSNRPDICLTIKSQKVTYLIDIAVPNTNNLKQKHNEKIQKYIPLADEIKQMWRQDTVKIIPIVISSTGVIPKTLIAALKSLDLNKNIYIQLQKSIVIDTCSIVRRFLNPSSSFTTSQS

SEQ ID NO: 1320 - protein, 1335 aa, Glaucopsyche alexis
MRLRNRNILPQAGTGAKSNGESRPGLSGPGCPSYSGGGTVSHPTAQSSTAAENTNIQTISNTYSYPSSPTSSVSLFPSLHSSPQSFILNNLFSSRSTTLSPLSDDVTQEAIATNPVPIPDISPSTRNSVYINPNIVDHNTHTQPHLTNTPVRSVLQEMLPPTTLAGKSRQRMKWTDQNINRELLRCYYIVTSCESNLTAFRPSLHKKFTESYPELSHISEQRLADQIRVIHRNNRIPSHERDKIKNTVAHTFDYFNDQNNTICSIDTQLSPCDILTIPHNATNDPNLQHSTIQPTNNNQPITLSNSSETVENLIVPETNNAEILATDAHQTQNHKIRQVFTEMLIKYADTDPTLRPVIPKLQITRNIIKTVNSLNKLIGEHLEAKETPDLTEIHSAIYCAAISTTTLHTKLNNPPEKDISNKTGDPKMPKWQLRIENRVKKLRKEIGQLTQYLKGNLSQTKQRKLNPNNLTENQIVELLDTLKQKLQAQSKRLRRLKISNSRRTDNLFFTNNQKLFYQNLNSENIKIIQPPSTDTIKDYWENLWSKPAHHNVHASWLDTEISECHNINPMSEVIIDDDDVTYAIKKTLNWKAPGPDKIQNYWIKYFTSTHHYIAKAFNSALKDPKLVPLFMMQGITYLKPKDKNDTKNPTKYRPITCLPTLYKLLTSIITQKLNTHITDNKIIPEEQKGCAKGSMGCKEQLIIDAQIHNQTKKDHKNLYYAYIDYQKAFDSVPHSWLIHVLKIYKIHNTLIHFLQYIMHNWSTKLNLRTVSTTVSTSPIKIKRGIFQGDSLSPLWFCLALNPLSKTLNRSNLGYIIDKVNKIKITHLLYMDDIKLFAPDRQQLEQLLKLTENFSADIYMTFGTDKCKINCILKGKHTHTEPLNLELQEGTIDSMQAKDTYKYLGYIQNTAIDHKEIKNTLKNKYKQRLNKILKTQLSGQYKIKAVNTYAIPILTYSFGIIRWSDTDLETLNTATRTACYKHNIHHIHSAVERFTIKRKQGGRGFIDIKNLHYTQIDNLRNYFKTKANTSPLHKAIVNLPHSGTPLQLNNDRFNPQNKIINDETKIEKWKSKALHGKFPYQLSQDHIDQAASFSWLTKGNIYSETEGFLIAIQDQIIKTRNYSKFVLKEAIETDKCRLCHQTTETIDHITGGCSALANKEYTHRHDNVAKHIHQLIAIKFNLIDTHTPYYKYKPSNVLENDSVKLYWDRDIVTDRTILSNRPDITLTIKSEKTTYLIDIAVPNTNNLKQKHTEKIQKYIPLADEIKQMWHQNTVKIIPIVISSTGVIPKTLAVALKSLNLHKNTYIQLQKSIVIDTCSIVRRFLNSSSSFPTTHTN

SEQ ID NO: 1321 - protein, 1334 aa, Plebejus argus
MRLRNRNILPQAGTGAKSNGESRPGLSGPGCPSYSGGGTVSHPTAQSSTAAENTNLQTTSNTHPYPSSPTSSVSLFPSLHSSPQSFILNNSFSSRSTTLSPLSDDVTQEAIATNPVPIPDISPSTRNSEYINPNIVDHNTLTQPHLTNTPVRSVLQEMLPPTTLAGKSRQRMKWTDQINRELLRCYYIVTSCESNLTAFRSSLHKKFTESYPELSHISEQRLADQIRVIHRNNRIPNHERDKIKNTVAHTFDCSNDQNNTICNIDTQLSPCDILTIPHNATDDLTLQHSTIQATNNNQPITLSNSSENVENLIVPETNNAEILTTDADQTQNNKISQVFTEMLIKYADTDPTLRPVIPKLQITRNIIKTVNSLNKLIGEHLEAKESPDLTEIHSAIYCAAISTTTLHTKLNNHPEKDISNKTGDPKIPKWQLRIENRVTKLRKEIGQLTQYLKGNLSHTKERKLNPKNLTENQIVELLDTLKQKLQAQSKRLRRLKISNSRRTDNLFFTNNQKLFYQNLNSENIKITQPPSKDAIKDYWENLWSKPANQNVHASWLDTEISECYNINPMPEVIIDDNDVTYAIKKTLNWKAPGPDKIQNYWIKYFTSTHHYIAKAFNSALMDPKLVPLFMMQGITYLKPKDKNDTKNPTKYRPITCLPTLYKLLTSIITQKLNTHITNNKIIPEEQKGCAKGSMGCKEQLIIDAQIHNQTKRDHKNLYYAYIDYQKAFDSVPHSWLIHVLKIYKIHNSLIHFLQYIMHNWSTKLNLRTVSTIVSTSLIKIKRGIFQGDSLSPLWFCLALNPLSKTLNRSNLGYIIDKANKIKITHLLYMDDIKLFAPDRQQLEQLLKLTEKFSADINMTFGTDKCKINCILKGKHTHTEPLNLELQEGTIDSMQAKDTYKYLGYIQNTAIDHKEIKNTLKNKYKQRLNKILKTQLSGRNKIKAVNTYAIPILTYSFGIIRWSDTDLEALNTATRTASYKHNIHHIHSAVERFTIKRKHGGRGFIDIKNLHYTQIDNLRTYFRTKANTSPLHKAIISLSHSGTLLQLNNDHFDPKNKIIKDVNKIEKWKSKALHGKFPYQLSQDHIDQDASFSWLTKGNIYSETEGFLIAIQDQIIKTRNYSKFILKESIETDKCRLCHQTTETIDHITGGCSALANKEYTHRHDNVAKHIHQLIATKFNLIDTRTPYYKYKPSNVLENDSVKLYWDRDIVTDRTILSNRPDITLTIKSEKTTYLIDVAVPNTNNLKQKHTEKIQKYIPLADEIKQMWHQNTVKIIPIIISSTGVIPKTLAVALKSLDLHKNTYIQLQKSIVIDTCSIVRRFLNSSSSFPTTHTS

SEQ ID NO: 1322 - protein, 1334 aa, Cyaniris semiargus
MRLRNRNILPQAGTGAKSNGESRPGLSGPGCPSYSGAGTVSHPTAQSSTAAENTNLQTTSNTHPYPSSPTSSVSLFPSLHSSPQSFILNNSFSSRSTTLSPLSDDVTQEAIATNPVPIPDISPSTRNSEYINPNIVDHNTLTQPHLTNTPVRSVLQEMLPPTTLAGKSRQRMKWTDQINRELLRCYYIVTSCESNLTAFRSSLHKKFTESYPELSHISEQRLADQIRVIHRNNRIPSHERDKIKNTVAHTFDCSNDQNNTICNIDTQLSPCDILTIPHNATDDLTLQHSTIQATNNNQPITLSNSSENVENLIVPETNNAEILTTDADQTQNNKISQVFTEMLIKYADTDPTLRPVIPKLQITRNIIKTVNSLNKLIGEHLEAKESPDLTEIHSAIYCAAISTTTLHTKLNNHPEKDISNKTGDPKIPKWQLRIENRVTKLRKEIGQLTQYLKGNLSHTKERKLNPKNLTENQIVELLDTLKQKLQAQSKRLRRLKISNSRRTDNLFFTNNQKLFYQNLNSENIKITQPPSKDAIKDYWENLWSKPANHNVHASWLDTEISECYNINPMPEVIIDDNDVTYAIKKTLNWKAPGPDKIQNYWIKYFTSTHHYIAKAFNSALMDPKLVPLFMMQGITYLKPKDKNDTKNPTKYRPITCLPTLYKLLTSIITQKLNTHITNNKIIPEEQKGCAKGSMGCKEQLIIDAQIHNQTKRDHKNLYYAYIDYQKAFDSVPHSWLIHVLKIYKIHNSLIHFLQYIMHNWSTKLNLRTVSTIVSTSLIKIKRGIFQGDSLSPLWFCLALNPLSKTLNRSNLGYIIDKANKIKITHLLYMDDIKLFAPDRQQLEQLLKSTEKFSADINMTFGTDKCKINCILKGKHTHTEPLNLELQEGTIDSMQAKDTYKYLGYIQNTAIDHKEIKNTLKNKYKQRLNKILKTQLSGRNKIKAVNTYAIPILTYSFGIIRWSDTDLEALNTATRTASYKHNIHHIHSAVERFTIKRKHGGRGFIDIKNLHYTQIDNLRTYFRTKANTSPLHKAIISLSHSGTPLQLNNDHFDPKNKIIKDVNKIEKWKSKALHGKFPYQLSQDHIDQDASFSWLTKGNIYSETEGFLIAIQDQIIKTRNYSKFILKESIETDKCRLCHQTTETIDHITGGCSALANKEYTHRHDNVAKHIHQLIATKFNLIDTRTPYYKYKPSNVLENDSVKLYWDRDIVTDRTILSNRPDITLTIKSEKTTYLIDVAVPNTNNLKQKHTEKIQKYIPLADEIKQMWHQNTVKIIPIIISSTGVIPKTLAVALKSLDLHKNTYIQLQKSIVIDTCSIVRRFLNSSSSFPTTHTS

SEQ ID NO: 1323 - protein, 1334 aa, Plebejus argus
MRLRNRNILPQAGTGAKSNGESRPGLSGPGCPSYSGGGTVSQPTAQSSTAAENTNLQTTSNTHPYPSSPTSSVSLFPSLHSSPQSFILNNSFSSRSTTLSPLSDDVTQEAIATNPVPIPDISPSTRNSEYINPNIVDHNTLTQPHLTNTPVRSVLQEMLPPTTLAGKSRQRMKWTDQINRELLRCYYIATSCESNLTAFRSSLHKKFTESYPELSHISEQRLADQIRVIHRNNRIPSHERDKIKNTVAHTFDCSNDQNNTICNIDTQLSPCDILTIPHNATDDLTLQHSTIQTTNNNQPITLSNSSENVENLIVPETNNAEILTTDADQTQNNKISQVFTEMLIKYADTDPTLRPVIPKLQITRNIIKTVNSLNKLIGEHLEAKESPDLTEIHSAIYCAAISTTTLHTKLNNHPEKDISNKTGDPKIPKWQLRIENRVTKLRKEIGQLTQYLKGNLSHTKQRKLNPKNLTENQIVELLDTLKQKLQAQSKRLRRLKISNSRRTDNLFFTNNQKLFYQNLNSENIKITQPPSTDAIKDYWENLWSKPANHNVHASWLDTEISECYNINPMPEVIIDDNDVTYAIKKTLNWKAPGPDKIQNYWIKYFTSTHHYIAKAFNSALMDPKLVPLFMMQGITYLKPKDKNDTKNPSKYRPITCLPTLYKLLTSIITQKLNTHITNNKIIPEEQKGCAKGSMGCKEQLIIDAQIHNQTKRDHKNLYYAYIDYQKAFDSVPHSWLIHVLKIYKIHNSLIHFLQYIMHNWSTKLNLRTVRTIVSTSPIKIKRGIFQGDSLSPLWFCLALNPLSKTLNRSNLGYIIDKANKIKITHLLYMDDIKLFAPDRQQLEQLLKLTEKFSADINMTFGTDKCKINCILKGKHTHTEPLNLELQEGTIDSMQAKDTYKYLGYIQNTAIDHKKIKNTLKNKYKQRLNKILKTQLSGRNKIKAVNTYAIPILTYSFGIIRWSDTDLEALNTATRTASYKHNIHHIHSAVERFTIKRKHGGRGFIDIKNLHYTQIDNLRTYFRTKANTSPLHKAIISLSHSGTPLQLNNDHFDPKNKIIKDVNKIEKWKSKALHGKFPYQLSQDHIDQDASFSWLTKGNIYSETEGFLIAIQDQIIKTRNYSKFILKESIETDKCRLCHQTTETIDHITGGCSALANKEYTHRHDNVAKHIHQLIATKFNLIDTHTPYYKYKPSNVLENDCVKLYWDRDIVTDRTILSNRPDITLTIKSEKTTYLIDVAVPNTNNLKQKHTEKIQKYIPLADEIKQMWHQNTVKIIPIIISSTGVIPKTLAVALKSLDLHKNTYIQLQKSIVIDTCSIVRRFLNSSSSFPTTHTS

SEQ ID NO: 1324 - protein, 1332 aa, Aricia agestis
MRLRNRNILPQAGTGAKSNGESRPGPSGPGCPSYSGGGTVSHPTAQSSTAAENTNFQTISNTYSYPSSPTSSVSLFPSLHSSPQSFMLNNSFSSRSTTLSPLSEDVTQEAIATNPVPIPDISPSTRKNSENINPNTVDHNTLTQPHIINTPVRSVLQEMLPPTTLAGKSRQRMKWTDQINKELLRCYYIVTSCEANLTAFRPSLHKKFTESYPELRHISEQRLADQIRVIHRNNRIPSHERDKIKNTVAHSFDCSNDQNNTICSIDTQLSPCDILTISHNATDDPTLQHSTIQPTNNNQPIILSNSSETVENAIIPQTDILTTDADQTQNNKISQVFTEMLLNYADTDPTLRPAIPKIQITRNIIKTVNLLNKLIGEHLEAKETPDIAEIHSAIYCAAITTTTLHTKLNNPPEKDIANKTRDPKNPKWQLRIENRVKKLRKEIGQLTQYLKGNLSHTKQRKLNPNNLTDDQIVELLDTLKQKLQAQSKKLRRLKISNSRRTDNLLFTNNQKLFYQNLNTENIKITQPPSTDALKDYWENLWSKPAHHNLHASWLDTEINECHNINPMPEIIIDDNDVTYAIKKTLNWKAPGPDKIQNYWIKYFTSTHHYIAKAFNSALQDPKLVPLFMMQGITYLKPKDKNDTKNPTKYRPITCLPTLYKLLTSIITQKLNTHITDNKIIPEEQKGCAKGSMGCKEQLIIDAQIHNQTKKDHKNLYYAYIDYQKAFDSVPHSWLIHVLQIYKINNTLIHFLQYIMHKWSTKLNLRTVNTTVSTSPIKIKRGIFQGDSLSPLWFCLALNPLSKTLNRSNLGYIIDKANKIKITHLLYMDDIKLFAPDRQQLEHLLKLTEKFSADIYMTFGTDKCKINCILKGKHTHTEPLNLELQEGTIDSMQAKDTYKYLGYIQNTAIDHKEIKNTLKIKYKQRLNKILKTQLSGRNKIKAVNTYAIPILTYSFGIIRWSDTDLEALNTATRTACYKHNIHHIHSAVERFTIKRKQGGRGFIDIKNLHYTQIDNLRKYFKTKANTSPLHKAIVSLPHSGTPLQFNNDQFDPQNKIIKIDNKIEKWKSKALHGKFPYQLSQDHIDQAASFCWLTKGNIYSETEGFLIAIQDQIIKTRNYSKFILKEFVETDKCRLCHQTTETIDHITGGCSSLANKEYTHRHDNVAKHIHQLIAIKFNLIDTHTPYYKYKPSNVLENDSVKLYWDRDIVTDRTILSNRPDMTLTIKSEKTTYLIDVAVPNTNNLKQKHTEKIQKYIPLADEIKQMWHQNTVKIIPIVISSTGVIPKTLAAALKSLDLHKNTYIQLQKSIVIDTCSIVRRFLNSSSSFPSTHTN

SEQ ID NO: 1325 - protein, 1334 aa, Cyaniris semiargus
MRLRNRNILPQAGTGAKSNGESRPGLSGPGCPSYSGGGTVSHPTAQSSTAAENTNLQTTSNTHPYPSSPTSSVSLFPSLHSSPQSFILNNSFSSRSTTLSPLSDDVTQEAIATNPVPIPDISPSTRNSEYINPNIVDHNTLTQPHLTNTPVRSVLQEMLPPTTLAGKSRQRMKWTDQINRELLRCYYIVTSCESNLTAFRSSLHKKFTESYPELSHISEQRLADQIRVIHRNNRIPSHERDKIKNTVAHTFDCSNDLNNTICNIDTQLSPCDILTIPHNATDDLTLQHSTIQATNNNQPITLSNSSENVENLIVPETNNAEILTTDADQTQNNKISQVFTEMLIKYADTDPTLRPVIPKLQITRNIIKTVNSLNKLIGEHLEAKESPDLTEIHSAIYCAAISTTTLHTKLNNHPEKDISNKTGDPKIPKWQLRIENRVTKLRKEIGQLTQYLKGNLSHTKERKLNPKNLTEKQIVELLDTLKQKLQAQSKRLRRLKISNSRRTDNLFFTNNQKLFYQNLNSENIKITQPPSKDAIKDYWENLWSKPANHNVHASWLDTEISECYNINPMPEVIIDDNDVTYAIKKTLNWKAPGPDKIQNYWIKYFTSTHHYIAKAFNSALMDPKLVPLFMMQGITYLKPKDKNDTKNPTKYRPITCLPTLYKLLTSIITQKLNTHITNNKIIPEEQKGCAKGSMGCKEQLIIDAQIHNQTKRDHKNLYYAYIDYQKAFDSVPHSWLIHVLKIYKIHNSLIHFLQYIMHNWSTKLNLRTVSTIVSTSLIKIKRGIFQGDSLSPLWFCLALNPLSKTLNRSNLGYIIDKANKIKITHLLYMDDIKLFAPDRQQLEQLLKLTEKFSADINMTFGTDKCKINCILKGKHTHTEPLNLELQEGTIDSMQAKDTYKYLGYIQNTAIDHKEIKNTLKNKYKQRLNKILKTQLSGRNKIKAVNTYAIPILTYSFGIIRWSDTDLEALNTATRTASYKHNIHHIHSAVERFTIKRKHGGRGFIDIKNLHYTQIDNLRTYFRTKANTSPLHKAIISLSHSGTPLQLNNDHFDPKNKIIKDVNKIEKWKSKALHGKFPYQLSQDHIDQDASFSWLTKGNIYSETEGFLIAIQDQIIKTRNYSKCILKESIETDKCRLCHQTTETIDHITGGCSALANKEYTHRHDNVAKHIHQLIATKFNLIDTRTPYYKYKPSNVLENNSVKLYWDRDIVTDRTILSNRPDITLTIKSEKTTYLIDVAVPNTNNLKQKHTEKIQKYIPLADEIKQMWHQNTVKIIPIIISSTGVIPKTLAVALKSLDLHKNTYIQLQKSIVIDTCSIVRRFLNSSSSFPTTHTS

SEQ ID NO: 1326 - protein, 1334 aa, Glaucopsyche alexis
MRLRNRNILPQAGTGAKSNGESRPGLSGPGCPSYSGGDTVSHPIAQSSTAAENTNIQTISNTYSYPSSPTSSVSLFPSLQSSPQSFILNNSFSSRSTTLSPLSDDVTQEAIATNPVPIPDISPSTRNSEYINPNIVDHNTHTQPHLTNTPVRSVLQEMLPPTTLAGKSRQRMKWTDQINRELLRCYYIVTSCESNLTAFRPSLHKKFTESYPELSHISEQRLADQIRVIHRNNRIPSHERDKIKNTVARTFDYSNDQNNTICSIDTQLSPCNILTIPHNATNDPNLQHSTIQPTNNNQPITLSNSSTTVENLIVPETNNAEILTTDADQTQNHKIRQVFTESVIKYADTDPTLRPVIPKLQITRNIIKTVNSLNKLIGEHLEAKETPDLTEIHSAIYCAAISTTTLHTKLNNPPEKDISNKTGDPKMPKWQLRIENRVKKLRKEIGQLTQYLKGNLSHTKQRKLNPNNLTENQIVELLDTLKQKLQAQSKRLRRLKISNSRRTDNLFFTNNQKLFYQNLNSENIKIIQPPSTDTIKDYWENLWSKPAHHNVHASWLDTEISECHNINPMSEVIIDDNDVTYAIKKTLNWKAPGPDKIQNYWIKYFTSTHHYIAKAFNSALKDPKLVPLFMMQGITYLKPKDKNDTKNPTKYRPITCLPTLYKLLTSIITQKLNTHITDNKIIPEEQKGCAKGSMGCKEQLIIDAQIHNQTKKDHKNLYYAYIDYQKAFDSVPHSWLIHVLKIYKIHNTLIHFLQYIMHNWSTKLNLRTVSTTVSTSPIKIKRGIFQGDSLSPLWFCLALNPLSKTLNRSNLGYIIDKVNKIKITHLLYMDDIKLFAPDRQQLEQLLKLTEKFSADIYMTFGTDKCKINCILKGKHTHTEPLNLELQEGTIDSMQAKDTYKYLGYIQNTAIDHKEIKNTLKNKYKQRLNKILKTQLSGQNKIKAVNTYAIPILTYSFGIIRWSDTDLETLNTTTRTACYKHNIHHIHSAVERFTIKRKQGGRGFIDIKNLHYTQIDNLRNYFKTKANTSPLHKAIVNLPHSGTPLQLNNDRFKPKNKIINDENKIEKWKSKALHGKFPYQLSQDHIDQAASFSWLTKGNIYSETEGFLIAIQDQIIKTRNYSKFILKEAIETDKCRLCHQTTETIDHITGGCSALANKEYTHRHDNVAKHIHQLIAIKFNLIDTHTPYYKYKPSNVLENDSVKLYWDRDIVTDRTILSNRPDITLTIKSEKTTYLIDIAVPNTNNLKQKHTEKIQKYIPLADEIKQMWHQNTVKIIPIVISSTGVIPKTLAVALKSLNLHKNTYIQLQKSIVIDTCSIVRRFLNSSSSFPTTHTN

SEQ ID NO: 1327 - protein, 1334 aa, Glaucopsyche alexis
MRLRNRNILPQAGTGAKSNGESRPGLSGPGCPSYSGGGTVSHPTAQSSTAAENTNIQTISNTYSYPSSPTSSVSLFPSLHSSPQSFILNNSFSSRSTTLSPLSDDVTQEAIATNPVPIPDISPSTINSEYINPNIVDHNTHTQPHLTNTPVRSVLQEMLPPTTLAGKSRQRMKWTDQINRELLRCYYIVTSCESNLTAFRPSLHKKFTESYPELSHISEQRLADQIRVIHRNNRIPSHERDKIKNTVAHTFDYSNDQNNTICSIDTQLSPCDILTIPHNATNDPNLQHSTIQPTNNNQPITLSNSSETVENLIVPETNNAEILATDADQTQNHKIRQVFTEMLIKYADTDPTLRPVIPKLQITRNIIKTVNSLNKLIGEHLLAKETPDLTEIHSAIYCAAISTTTLHTKLNNPPEKDISNKTGDPKMPKWQLRIENRVKKLRKEIGQLTQYLKGNLSQTKQRKLNPNNLSENQIVELLDTLKQKLQAQSKRLRRLKISNSRRTDNLFFTNNQKLFYQNLNSENIKIIQPPSTDTIKDYWENLWSKPAHHNVHASWLDTEISECHNINPMSEVIIDDDDVTYAIKKTLNWKAPGPDKIQNYWIKYFTSTHHYIAKAFNSALKDPKLVPLFMMQGITYLKPKDKNDTKNPTKYRPITCLPTLYKLLTSIITQKLNTHITDNKIIPEEQKGCAKGSMGCKEQLIIDAQIHNQTKKDHKNLYYAYIDYQKAFDSVPHSWLIHVLKIYKIHNTLIHFLQYIMHNWSTKLNLRTVSTTVSTSPIKIKRGIFQGDSLSPLWFCLALNPLSKTLNRSNLGYIIDKVNKIKITHLLYMDDIKLFAPDRQQLEQLLKLTENFSADIYMTFGTDKCKINCILKGKHTHTEPLNLELQEGTIDSMQAKDTYKYLGYIQNTAIDHKEIKNTLKNKYKQRLNKILKTQLSGQNKIKALNTYAIPILTYSFGIIRWSDTDLETLNTATRTACYKHNIHHIHSAVERFTIKRKQGGRGFIDIKNLHYTQIDNLRNYFKTKANTSPLHKAIVNLPHSGTPLQLNNDRFNPKNKIINDENKIEKWKSKALHGKFPYQLSQDHIDQSASFSWLTKGNIYSETEGFLIAIQDQIIKTRNYSKFVLKEAIETDKCRLCHQTTETIDHITGGCSALANKEYTHRHDNVAKHIHQLIAIKFNLIDTHTPYYKYKPSNVLENDSVKLYWDRDIVTDRTILSNRPDITLTIKSEKTTYLIDIAVPNTNNLKQKHTEKIQKYIPLADEIKQMWHQNTVKIIPIVISSTGVIPKTLAVALKSLNLHKNTYIQLQKSIVIDTCSIVRRFLNSSSSFPTTHTN

SEQ ID NO: 1328 - protein, 1332 aa, Aricia agestis
MRLRNRNILPQAGTGAKSNGESRPGPSGPGCPSYSGGGTVSHPTAQSSTAAENTNFQTISNTYSYPSSPTSSVSLFPSLHSSPQSFMLNNSFSSRSTTLSPLSEDVTQEAIATNPVPIPDISPSTRNNSEYINPNTVDHNTLTQPHIINTPVRSVLQEMLPPTTLAGKSRQRMKWTDQINKELLRCYYIVTSCEANLTAFRPSLHKKFTECYPELRHISEQRLADQIRVIHRNNRIPSHERDKIKNTVAHSFDCSNDQNNTICSIDTQLSPCDILTISHNATDDPTLQHSTIQPTNNNQPIILSNSSETVENAIIPQTDILTTDADQTQNNKISQVFTEMLLNYADTDPTLRPAIPKIQITRNIIKTVNLLNKLIGEHLEAKETPDIAEIHSAIYCAAITTTTLHTKLNNPPEKDIANKTRDPKNPKWQLRIENRVKKLRKEIGQLTQYLKGNLSHTKQRKLNPNNLTDDQIVELLDTLKQKLQAQSKRLRRLKISNSRRTDNLLFTNNQKLFYQNLNTENIKITQPPSTDALKDYWENLWSKPAHHNLHASWLDTEISECHNINPMPEIIIDDNDVTYAIKKTLNWKAPGPDKIQNYWIKYFTSTHHYIAKAFNSALQDPKLVPLFMMQGITYLKPKDKNDTKNPTKYRPITCLPTLYKLLTSIITQKLNTHITDNKIIPEEQKGCAKGSMGCKEQLIIDAQIHNQTKKDHKNLYYAYIDYQKAFDSVPHSWLIHVLQIYKINNTLIHFLQYIMHKWSTKLNLRTVNTTVSTSPIKIKRGIFQGDSLSPLWFCLALNPLSKTLNRSNLGYIIDKANKIKITHLLYMDDIKLFAPDRQQLEHLLKLTEKFSADIYMTFGTDKCKINCILKGKHTHTEPLNLELQEGTIDSMQAKDTYKYLGYIQNTAIDHKEIKNTLKIKYKQRLNKILKTQLSGRNKIKAVNTYAIPILTYSFGIIRWSDTDLEALNTATRTACYKHNIHHIHSAVERFTIKRKQGGRGFIDIKNLHYTQIDNLRKYFKTKANTSPLHKAIVSLPHSGTPLQFNNDQFDPQNKIIKIDNKIEKWKSKALHGKFPYQLSQDHIDQAASFCWLTKGNIYSETEGFLIAIQDQIIKTRNYSKFILKEFVETDKCRLCHQTTETIDHITGGCSSLANKEYTHRHDNVAKHIHQLIAIKFNLIDTHTPYYKYKPSNVLENDSVKLYWDRDIVTDRTILSNRPDMTLTIKSEKTTYLIDVAVPNTNNLKQKHTEKIQKYIPLADEIKQMWHQNTVKIIPIVISSTGVIPKTLAAALKSLDLHKNTYIQLQKSIVIDTCSIVRRFLNSSSSFPSTHTN

SEQ ID NO: 1329 - protein, 1332 aa, Aricia agestis
MRLRNRNILPQAGTGAKSNGESRPGPSGPGCPSYSGGGTVSHPTAQSSTAAENTNFQTISNTYSYPSSPTSSVSLFPSLHSSPQSFMLNNSFSSRSTTLSPLSEDVTQEAIATNPVPIPDISPSTRNNSEYINPNTVDHNTLTQPHIINTPVRSVLQEMLPPTTLAGKSRQRMKWTDQINKELLRCYYIVTSCEANLTAFRPSLHKKFTESYPELRHISEQRLADQIRVIHRNNRIPSHERDKIKNTVAHSFDCSNDQNNTICSIDTQLSPCDILTISHNATDDPTLQHSTIQPTNNNQPIILSNSSETVENAIIPQTDILTTDADQTQNNKISQVFTEMLLNYADTDPTLRPAIPKIQITRNIIKTVNLLNKLIGEHLEAKETPDIAEIHSAIYCAAITTTTLHTKLNNPPEKDIANKTRDPKNPKWQLRIENRVKKLRKEIGQLTQYLKGNLSHTKQRKLNPNNLTDDQIVELLDTLKQKLQAQSKRLRRLKISNSRRTDNLLFTNNQKLFYQNLNTENIKITQPPSTDALKDYWENLWSKPAHHNLHASWLDTEISECHNINPMPEIIIDDNDVTYAIKKTLNWKAPGPDKIQNYWIKYFTSTHHYIAKAFNSALQDPKLVPLFMMQGITYLKPKDKNDTKNPTKYRPITCLPTLYKLLTSIITQKLNTHITDNKIIPEEQKGCAKGSMGCKEQLIIDAQIHNQTKKDHKNLYYAYIDYQKAFDSVPHSWLIHVLQIYKINNTLIHFLQYIMHKWSTKLNLRTVNTTVSTSPIKIKRGIFQGDSLSPLWFCLALNPLSKTLNRSNLGYIIDKANKIKITHLLYMDDIKLFAPDRQQLEHLLKLTEKFSADIYMTFGTDKCKINCILKGKHTHTEPLNLELQEGTIDSMQAKDTYKYLGYIQNTAIDHKEIKNTLKIKYKQRLNKILKTQLSGRNKIKAVNTYAIPILTYSFGIIRWSDTDLEALNTATRTACYKHNIHHIHSAVERFTIKRKQGGRGFIDIKNLHYTQIDNLRKYFKTKANTSPLHKAIVSLPHSGTPLQFNNDQFDPQNKIIKIDNKIEKWKSKALHGKFPYQLSQDHIDQAASFCWLTKGNIYSETEGFLIAIQDQIIKTRNYSKFILKEFVETDKCRLCHQTTETIDHITGGCSSLANKEYTHRHDNVAKHIHQLIAIKFNLIDTHTPYYKYKPSNVLENDSVKLYWDRDIVTDRTILSNRPDMTLTIKSEKTTYLIDVAVPNTNNLKQKHTEKIQKYIPLADEIKQMWHQNTVKIIPIVISSTGVIPKTLAAALKSLDLHKNTYIQLQKSIVIDTCSIVRRFLNSSSSFPSTHTN

SEQ ID NO: 1330 - protein, 1314 aa, Aricia agestis
MENPAPGLRVRAVPRILGGGTVSHPTAQSSTAAENTNFQTISNTYSYPSSPTSSVSLFPSLHSSPQSFMLNNSFSSRSTTLSPLSEDVTQEAIATNPVPIPDISPSTRNNSEYINPNTVDHNTLTQPHIINTPVRSVFQEMLPPTTLAGKSRQRMKWTDQINKELLRCYYIVTSCEANLTAFRPSLHKKFTESYPELRHISEQRLADQIRVIHRNNRIPSHERDKIKNTVAHSFDCSNDQNNTICSIDTQLSPCDILTISHNATDDPTLQHSTIQPTNNNQPIILSNSSETVENAIIPQTDILTTDADQTQNNKTSQVFTEMLLNYADTDPTLRPAIPKIQITRNIIKTVNLLNKLIGEYLEAKETPDIAEIHSAIYCAAITTTTLHNKLNNPPEKDIANKTRDPKNPKWQLRIENRVKKLRKEIGQLTQYLKGNLSHTKQRKLNPNNLTDDQIVELLDTLKQKLQAQSKRLRRLKISNSRRTDNLLFTNNQKLFYQNLNTENIKITQPPSTDALKDYWENLWSKPAHHNLHASWLDTEISECHNINPMPEIIIDDNDVTYAIKKTLNWKAPGPDKIQNYWIKYFTSTHHYIAKAFNSALQDPKLVPLFMMQGITYLKPKDKNDTKNPTKYRPITCLPTLYKLLTSIITQKLNTHITDNKIIPEEQKGCAKGSMGCKEQLIIDAQIHNQTKKDHKNLYYAYIDYQKAFDSVPHSWLIHVLQIYKINNTLIHFLQYIMHKWSTKLNLRTVNTTVSTSPIKIKRGIFQGDSLSPLWFCLALNPLSKTLNRSNLGYIIDKANKIKITHLLYMDDIKLFAPDRQQLEHLLKLTEKFSADIYMTFGTDKCKINCILKGKHTHTEPLNLELQEGTIDSMQAKDTYKYLGYIQNTAIDHKEIKNTLKIKYKQRLNKILKTQLSGRNKIKAVNTYAIPILTYSFGIIRWSDTDLEALNTATRTACYKHNIHHIHSAVERFTIKRKQGGRGFIDIKNLHYTQIDNLRKYFKTKANTSPLHKAIVSLPHSGTPLQFNNDQFDPQNKIIKIDNKIEKWKSKALHGKFPYQLSQDHIDQAASFCWLTKGNIYSETEGFLIAIQDQIIKTRNYSKFILKEFVETDKCRLCHQTTETIDHITEGCSSLANKEYTHRHDNVAKHIHQLIAIKFNLIDTHTPYYKYKPSKVLENDSVKLYWDRDIVTDRTILSNRPDMTLTIKSEKTTYLIDVAVPNTNNLKQKHTEKIQKYIPLADEIKQMWHQNTVKIIPIVISSTGVIPKTLAAALKSLDLHKNTYIQLQKSIVIDTCSIVRRFLNSSSSFPSTHTN

SEQ ID NO: 1331 - protein, 1334 aa, Cyaniris semiargus
MRLRNRNILPQAGTGAKSNGESRPGLSGPGCPSYSGGGTVSHPTAQSSTAAENTNLQTTSNTHPYPSSPTSSVSLFPSLHSSPQSFILNNSFSSRSTTLSPLSDDVTQEAIATNPVPIPDISPSTRNSEYINPNIVDHNTLTQPHLTNTPVRSVLQEMLPPTTLAGKSRQRMKWTDQINRELLRCYYIVTSCESNLTAFRSSLHKKFTESYPELSHISEQRLADQIRVIHRNNRIPSHERDKIKNTVAHTFDCSNDQNNTICNIDTQLSPCDILTIPHNATDDLTLQHSTIQATNNNQPITLSNSSENVENLIVPETNNAEILTTDADQTQNNKISQVFTEMLIKYADTDPTLRPVIPKLQITRNIIKTVNSLNKLIGEHLDAKESPDLTEIHSAIYCAAISTTTLHTKLNKHPEKDISNKTGDPKIPKWQLRIENRVTKLRKEIGQLTQYLKGNLSHTKERKLNPKNLTENQIVELLDTLKQKLQAQSKRLRRLKISNSRRTDNLFFTNNQKLFYQNLNSENIKITQPPSKDAIKDYWENLWSKPANHNVHASWLDTEISECYNINPMPEVIIDDNDVTYAIKKTLNWKAPGPDKIQNYWIKYFTSTHHYIAKAFNSALMDPKLVPLFMMQGITYLKPKDKNDTKNPTKYRPITCLPTLYKLLTSIITQKLNTHITNNKIIPEEQKGCAKGSMGCKEQLIIDAQIHNQTKRDHKNLYYAYIDYQKAFDSVPHSWLIHVLKIYKIHNSLIHFLQYIMHNWSTKLNLRTVSTIVSTSLIKIKRGIFQGDSLSPLWFCLALNPLSKTLNRSNLGYIIDKANKIKITHLLYMDDIKLFAPDRQQLEQLLKLTEKFSADINMTFGTDKCKINCILKGKHTHTEPLNLELQEGTIDSMQAKDTYKYLGYIQNTAIDHKEIKNTLKNKYKQRLNKILKTQLSGRNKIKAVNTYAIPILTYSFGIIRWSDTDLEALNTATRTASYKHNIHHIHSAVERFTIKRKHGGRGFIDIKNLHYTQIDNLRTYFRTKANTSPLHKAIISLSHSGTPLQLNNDHFDPKNKIIKDVNKIEKWKSKALHGKFPYQLSQDHIDQDASFSWLTKGNIYSETEGFLIAIQDQIIKTRNYSKFILKESIETDKCRLCHQTTETIDHITGGCSALANKEYTHRHDNVAKHIHQLIATKFNLIDTRTPYYKYKPSNVLENDSVKLYWDRDIVTDRTILSNRPDITLTIKSEKTTYLIDVAVPNTNNLKQKHTEKIQKYIPLADEIKQMWHQNTVKIIPIIISSTGVIPKTLAVALKSLDLHKNTYIQLQKSIVIDTCSIVRRFLNSSSSFPTTHTS

SEQ ID NO: 1332 - protein, 1332 aa, Aricia agestis
MRLRNRNILPQAGTGAKSNGESRPGPLGPGCPSYSGGGTVSHPTAQSSTAAENTNFQTISNTYSYPSSPTSSVSLFPSLHSSPQSFMLNNSFSSRSTTLSPLSEDVTQEAIATNPVPIPDISPSTRNNSENINPNTVDHNTLTQPHIINTPVRSVLQEMLPPTTLAGKSRQRMKWTDQINKELLRCYYIVTSCEANLTAFRPSLHKKFTESYPELRHISEQRLADQIRVIHRNNRIPSHERDKIKNTVAHSFDCSNDQNNTICSIDTQLSPCDILTISHNATDDPTLQHPTIQPTNNNQPIILSNSSETVENAIIPQTDILTTDADQTQNNKISQVFTEMLLNYADTDPTLRPAIPKIQITRNIIKTVNLLNKLIGEHLEAKETPDIAEIHSAIYCAAITTTTLHTKLNNPPEKDIANKTRDPKNPKWQLRIENRVKKLRKEIGQLTQYLKGNLSHTKQRKLNPNNLTDDQIVELLDTLKQKLQAQSKRLRRLKISNSRRTDNLLFINNQKLFYQNLNTENIKITQPPSTDALKDYWENLWSKPAHHNLHASWLDTEINECHNINPMPEIIIDDNDVTYAIKKTLNWKAPGPDKIQNYWIKYFTSTHHYIAKAFNSALQDPKLVPLFMMQGITYLKPKDKNDTKNPTKYRPITCLPTLYKLLTSIITQKLNTHITDNKIIPEEQKGCAKGSMGCKEQLIIDAQIHNQTKKDHKNLYYAYIDYQKAFDSVPHSWLIHVLQIYKINNTLIHFLQYIMHKWSTKLNLRTVNTTVSTSPIKIKRGIFQGDSLSPLWFCLALNPLSKTLNRSNLGYIIDKANKIKITHLLYMDDIKLFAPDRQQLEHLLKLTEKFSADIYMTFGTDKCKINCILKGKHTHTEPLNLELQEGTIDSMQAKDTYKYLGYIQNTAIDHKEIKNTLKIKYKQRLNKILKTQLSGRNKIKAVNTYAIPILTYSFGIIRWSDTDLEALNTATRTACYKHNIHHIHSAVERFTIKRKQGGRGFIDIKNLHYTQIDNLRKYFKTKANTSPLHKAIVSLPHSGTPLQFNNDQFDPQNKIIKIDNKIEKWKSKALHGKFPYQLSQDHIDQAASFCWLTKGNIYSETEGFLIAIQDQIIKTRNYSKFILKEFVETDKCRLCHQTTETIDHITGGCSSLANKEYTHRHDNVAKHIHQLIAIKFNLIDTHTPYYKYKPSNVLENDSVKLYWDRDIVTDRTILSNRPDMTLTIKSEKTTYLIDVAVPNTNNLKQKHTEKIQKYIPLADEIKQMWHQNTVKIIPIVISSTGVIPKTLAAALKSLDLHKNTYIQLQKSIVIDTCSIVRRFLNSSSSFPSTHTN

SEQ ID NO: 1333 - protein, 1342 aa, Cyaniris semiargus
MYHSIPLQIIFELERVQRKFNIIIIIIIIIIIIIIIIIIIIIIIIIIIIIIIIITSTAAENTNLQTTSNTHPYPSSPTSSVSLFPSLHSSPQSFILNNSFSSRSTTLSPLSDDVTQEAIATNPVPIPDISPSTRNSEYINPNIVDHNTLTQSHLTNTPVRSVLQEMLPPTTLAGKSRQRMKWTDQINRELLRCYYIVTSCESNLTAFRSSLHKKFTESYPELSHISEQRLADQIRVIHRNNRIPSHERDKIKNTVAHTFDCSNDQNNTICNIDTQLSPCDILTIPHNATDDLTLQHSTIQATNNNQPITLSNSSENVENLIVPETNNAEILTTDADQTQNNKISQVFTEMLIKYADTDPTLRPVIPKLQITRNIIKTVNSLNKLIGEHLEAKESPDLTEIHSAIYCAAISTTTLHTKLNNHPEKDISNKTGDPKIPKWQLRIENRVTKLRKEIGQLTQYLKGNLSHTKERKLNPKNLTENQIVELLDTLKQKLQAQSKRLRRLKISNSRRTDNLFFTNNQKLFYQNLNSENIKITQPPSKDAIKDYWENLWSKPANHNVHASWLDTEISECYNINPMPEVIIDDNDVTYAIKKTLNWKAPGPDKIQNYWIKYFTSTHHYIAKAFNSALMDPKLVPLFMMQGITYLKPKDKNDTKNPTKYRPITCLPTLYKLLTSIITQKLNTHITNNKIIPEEQKGCAKGSMGCKEQLIIDAQIHNQTKRDHKNLYYAYIDYQKAFDSVPHSLLIHVLKIYKIHNSLIHFLQYIMHNWSTKLNLRTVSTIVSTSLIKIKRGIFQGDSLSPLWFCLALNPLSKTLNRSNLGYIIDKANKIKITHLLYMDDIKLFAPDRQQLEQLLKLTEKFSADINMTFGTDKCKINCILKGKHTHTEPLNLELQEGTIDSMQAKDTYKYLGYIQNTAIDHKEIKNTLKNKYKQRLNKILKTQLSGRNKIKAVNTYAIPILTYSFGIIRWSDTDLEALNTATRTASYKHNIHHIHSAVERFTIKRKHGGRGFIDIKNLHYTQIDNLRTYFRTKANTSPLHKAIISLSHSGTPLQLNNDHFDPKNKIIKDVNKIEKWKSKALHGKFPYQLSQDHIDQDASFSWLTKGNIYSETEGFLIAIQDQIIKTRNYSKFILKESIETDKCRLCHQTTETIDHITGGCSALANKEYTHRHDNVAKHIHQLIATKFNLIDTRTPYYKYKPSNVLENDSVKLYWDRDIVTDRTILSNRPDITLTIKSEKTTYLIDVAVPNTNNLKQKHTEKIQKYIPLADEIKQMWHQNTVKIIPIIISSTGVIPKTLAVALKSLDLHKNTYIQLQKSIVIDTCSIVRRFLNSSSSFPTTHTS

SEQ ID NO: 1334 - protein, 1332 aa, Aricia agestis
MRLRNRNILPQAGTGAKSNGESRPGPLGPGCPSYSGGGTVSHPTAQSSTAAENTNFQTISNTYSYPSSPTSSVSLFPSLHSSPQSFMLNNSFSSRSTTLSPLSEDVTQEAIATNPVPIPDISPSTRNKSENINPNTVDHNTLTQPHIINTPVRSVLQEMLPPTTLAGKSRQRMKWTDQINKELLRCYYIVTSCEANLTAFRPSLHKKFTESYPELRHISEQRLADQIRVIHRNNRIPSHERDKIKNTVAHSFDCSNDQNNTICSIDTQLSPCDILTISHNATDDPTLQHPTIQPTNNNQPIILSNSSETVENAIIPQTDILTTDADQTQNNKISQVFTEMLLNYADTDPTLRPAIPKIQITRNIIKTVNLLNKLIGEHLEAKETPDIAEIHSAIYCAAITTTTLHTKLNNPPEKDIANKTRDPKNPKWQLRIENRVKKLRKEIGQLTQYLKGNLSHTKQRKLNPNNLTDDQIVELLDTLKQKLQAQSKRLRRLKISNSRRTDNLLFTNNQKLFYQNLNTENIKITQPPSTDALKDYWENLWSKPAHHNLHASWLDTEINECHNINPMPEIIIDDNDVTYAIKKTLNWKAPGPDKIQNYWIKYFTSTHHYIAKAFNSALQDPKLVPLFMMQGITYLKPKDKNDTKNPTKYRPITCLPTLYKLLTSIITQKLNTHITDNKIIPEEQKGCAKGSMGCKEQLIIDAQIHNQTKKDHKNLYYAYIDYQKAFDSVPHSWLIHVLQIYKINNTLIHFLQYIMHKWSTKLNLRTVNTTVSTSPIKIKRGIFQGDSLSPLWFCLALNPLSKTLNRSNLGYIIDKANKIKITHLLYMDDIKLFAPDRQQLEHLLKLTEKFSADIYMTFGTDKCKINCILKGKHTHTEPLNLELQEGTIDSMQAKDTYKYLGYIQNTAIDHKEIKNTLKIKYKQRLNKILKTQLSGRNKIKAVNTYAIPILTYSFGIIRWSDTDLEALNTATRTACYKHNIHHIHSAVERFTIKRKQGGRGFIDIKNLHYTQIDNLRKYFKTKANTSPLHKAIVSLPHSGTPLQFNNDQFDPQNKIIKIDNKIEKWKSKALHGKFPYQLSQDHIDQAASFCWLTKGNIYSETEGFLIAIQDQIIKTRNYSKFILKEFVETDKCRLCHQTTETIDHITGGCSSLANKEYTHRHDNVAKHIHQLIAIKFNLIDTHTPYYKYKPSNVLENDSVKLYWDRDIVTDRTILSNRPDMTLTIKSEKTTYLIDVAVPNTNNLKQKHTEKIQKYIPLADEIKQMWHQNTVKIIPIVISSTGVIPKTLAAALKSLDLHKNTYIQLQKSIVIDTCSIVRRFLNSSSSFPSTHTN

SEQ ID NO: 1335 - protein, 1299 aa, Blastobasis lacticolella
MRRSIRIKNKNSAQCSTAAENGSAGNSSPISSTRSLFSTPSSSPKSFQNPTSSRSTTASPMSYDVTQEAPANYPESIYDIINAARNNANVESNYGAETDTYNINTNTPARSVLQEMLPATTLAGRSRQRMKWTDLINRELLRCYYTVTQCETNLTAYRPLLHKMFIETFPELHHLSEQRLADQIRVIHRNHRISLAERERIKQLVSLSVTEEIADTVHDTSLIDTLSPPIDSEVTTGNYATHNVSVNVEQYATSTQQTVTIEDLDTYTQTTEPESLHINFNTIEDTFTEMLIKYSHTDATLRPAIPKLQITRKSIKTVNTVNDILHKHLENRETVDIDNIHEVIYCAAMTVTTLHAKPKNKVNSNVHTANSTESSNSNKDKKQQWEKRLENKITILRKEIGQLIQYLNGNLTQRKQRKINPNNQSKDEIVNQLDTYKQKLQAYSKRLRRYKLSNQRKSDNNLFRTNQKLFYRNLNTENIHISQPPNIKDVQDFWENIWSKPVEHNRNTPWSRIEEQDASNIEPMAEVFISKDDVTQAIMKTLNWKAPGPDKIQNYWIKYFTSTHEYIANAFNHLLHNPQDTPSFFTQGITYLKPKDDDTTNPAKYRPITCLPTIYKLLTSIISHKLNHHIAHNNIIPEEQKGCSKGSMGCKEQLVIDTEIHNQVKQKKRNLYYAYIDYQKAFDSVPHSWLIEVLKMYKTDNGLIQFLQYTMANWTTTLNIHTNNKTLNTEHIKISRGIFQGDSLSPIWFCLALNPLSKILNGTDYGYNIDRENTKLTHLLYMDDIKLYAANRQQLDHLLKLTEDFSRDIKMTFGTDKCRINSIIKGQHKDTEPYDLEQQLGKIDNMEPRDTYKYLGYLQSTSINHTEIKSGLKTKYKQRLTKILKTKLSARNKTKAVNTYAIPVLTYSFGIIKWSDTELEALNTLTRTTCNKHNMHHIHSAVQRFTLKRKLGGRGFIDIKNLHYTQIDNLRTYFQTKANQSTLHKAIVNITTSGTPLQLNNSQFDPKQKILQDNQKIENWKKKAIHGKYPHHLDQDHVNRTASCTWLTKGNLFSETEGFLIAIQDQIIKTRNYSKYILKEAITTDKCRLCHQTTETIDHITGGCRILANKEYTHRHDNVAKHIHQQLALKYNLLETYTPYYKYKPKKVLENNTAKLYWDRDIITDCTVLSNRPDITLTIKSIKTTYLIDVSVPNTHNLKQKHTEKIQKYIQLADEIKQMWHQETVRIIPIIISSTGVVPTSLSAALKTLQLPDTTYIPLQKSIVIDTCSIVRRFLNPTSLSYAITAENNDVPSTLTLLS

SEQ ID NO: 1336 - protein, 1325 aa, Lysandra coridon
MRLRNRKILPQAGTGANSNGESRPGPSGPGSPTYSGGGTVSLNSVQSCAAADNIIPTTINTHSCPSSPTSSVSLFPSPHSSPQSYMLNNSSSSRSTSLSLMPDDATQEAIAYDPAPISDSTPSTSTSQNTNQNPVDHNIDIQPQLNITPARSVLQDMLPPTTLAGKSRQRMKWTDHINKELLRCYYIITSCESNLTAFRPSLHKKFIEVFPELSHISEQRLADQIRVIHRNNRISPPERNKIKAAVAQIINNSDIGIQNNLTQNSDLQTTPSTTLHTDNHPSTNDIIPYHSPITTTNLPINSPNIPDTFEQTITIESINTNIDTDSTETQKIENIFTEMLIKYSGTDPTLRPIIPKLHVTRNIIKTVNVLNNLIAKYLEGKEFPGLNEIHIAIYSAAMTAATLHNKIKNPPENTNTNKTIDQSNPKWQQRIENRIKNLRKEIGQLTQYLAGNLSPRKQQKVNPNNLSNAQLLDLLDNLKQKLQAQSKRLRRLKISNSRRKDNILFHSNQKIFYRNLTNENFKITQPPNIDEVKSYWENLWSKPVHHDMQSSWLDSEIQECQNLIPMPEIIISKDDVTAAIKKTLNWKAPGPDKIQNYWIKYFTATHRYIAEIFNTFIDDPRTIPSYLTQGITYLKPKDNNNTTEPTKYRPITCLPTIYKLLTSIITQKLNTHITQNAIIPEEQKGCAKGSKGCKEQLIIDAEIHNHAKQNHKNLYYSYIDYQKAFDSVPHSWLIHVLKIYKVDCKLIQFLQNLMSTWSTKLHLRTIDTTFSTSPIQIKRGIFQGDSLSPLWFCLALNPLTKILNKCHGYIIDKINKIKLTHLLYMDDIKIYATDRQQLEQLLRLTEKFSTDIKMTFGTDKCKINCILKGKHTQTEPHNLELQGGTIDSMQEKETYKYLGYIQSTAINHKEIKNMLTSKYKLRLNKILSTQLSGRNKIKAINTYAVPILTYSFGIIKWTDTELEALNIATRTASYKHNIHHIHSATERFTLKRKLGGRGVIDIKNLHYNQIHNLRTYFLTKANTSPLHNALINIPHSDTPLKLNDPIHKIVKDSDKIIKWKGKALHGKFPHQIEQDHIDQEASFSWLTKGNIYGETEGFLVAIQDQIIKTRNYSKYILKENIETDKCRLCHQTTETIDHITGGCSALASKEYTHRHDNLAKQIHQLLAMKYNLIETHTPYYKYKPSNVLENSSVKLYWDRDIITDRTILSNRPDITLTIKSEKTTYLIDIAVPNTNNLKQKHNEKIQKYIPLADEIKQMWRQNTVKILPIIISSTGVIPKTLHSALKTIDLHKNTYIQMQKSIVIDTCSIVRRFLNPSSSFTSHQS

SEQ ID NO: 1337 - protein, 1339 aa, Lysandra bellargus
MCLYFKTYDMRLRNRYIPQAGTGAKCNGESRPGPSGPGSPSYSGGGNVSLHSAQASTAAENNIVPTTRNTHSHSTSPTSSISLFPSPHSSPRSYMFDKSSSSPRSTSQSPMSYVVTREATATYPVPIADNTQSTSTLQSNELYPVDHNTSQSHLTNTPTRSVLQEMLPPTTLAGKCRQRMKWTDEINKELLRCYYIVTSCESNLTAFRPLLHQKFIDNFPELSHLSEQRLADQIRVIHRNNRIAPHIREQIKKSVAEIAEAFVESIGQNDADLQLSTCSSNLQTDDQIVTNIIPPHHSMLTSHEPIIQPNSSQTVETQIKAILRPPTNINPIETEKIENVLQEMLIKYSGMDPNLRPMIPKLQITHNVIKTVNVLNHAIGKYLEEKEEPNLEEVHSVIYCGAMTTASLHTKTVNHKEKNNTIDYVNPKWQIRIENRIKQLRKEIGQLTQYLKGNINPRKQQKINPKSLPKNQLTDHLDNLKQKLKAQSKRLRRLKISNARRKDNIQFNNNQKLFYQNLNSETIKVTQPPDINDVQEYWENLWSIPVQHNSDCSWIESEEQDCQNINQMPDITVDRNDVTRAIKKTLNWKAPGSDKIQNYWLKYFTSTHRHIANIFNSLINTPETIPSFFTQGITYLKPKDKDDTANPTKYRPITCLPTVYKLFTSIITQKLNAHITQNKIIPEEQKGCAKGSMGCKEQLIIDAEIHNNAKQNRNNLYFAYIDYQKAFDSIPHSWLIKVLKIYRVNNKLIQLLQYLMSTWSTQLFLRTTNTQFSTPPIKIKRGIFQGDSLSPLWFCLALNPLSKILNKSSYGYTIDRTNNIKLTHLLYMDDIKIYATDRQQLDYLLKLTERFSIDIKMAFGIDKCRINCVIKGQHQQINPHNLELQEDIIDSMQAHDTYKYLGYIQNTTINHKDIKNTLKSKYKLRLNKILSTQLSGRNKVKAINTYAIPILTYSFGIIKWSDTELEALNTTTRTASYKHNIHHIHSAVERFTLKRKLGGRGCIDIKNLCYSQIENLRTYFQVKAQTSHLHKAITQLTHSGTPLQLNNSNFNPKYKITNDCDKIAKWKGKALHGKFPHQLEQDHIDQTASFSWLTRGNIYSETEGFLVAIQDQIIKTRNYSKYILKENIETDKCRLCHQTTETIDHITGGCSSLANKEYTHRHNNVAKHIHQLLALKYKLIDTHTPYYKYKPCNVLENSTAKLYWDRDIITDRTILSNRPDICLTIKSQTVTYLIDIAVPNTNNLKQKHNEKIQKYIPLADEIKQMWRQDTVKIIPIVISSTGVIPKTLIAALKSLDLNKNIYIHLQKSIVIDTCSIVRRFLNPSSSFSTPQSLLFPHTN

SEQ ID NO: 1338 - protein, 1339 aa, Lysandra bellargus
MCLYFKTYDMRLRNRYIPQAGTGAKCNGESRPGPSGPGSPSYSGGGNVSLHSAQASTAAENNIVPTTRNTHSHSTSPTSSISLFPSPHSSPRSCMFDKSSSSSRSTSQSPMSYVVTREATATYPVPIADNTQSTSTLQSNELYPVDHNTSQSHLTNTPTRSVLQEMLPPTTLAGKCRQRMKWTDEINKELLRCYYIVTSCESNLTAFRPLLHQKFIDNFPELSHLSEQRLADQIRVIHRNNRIAPHIREQIKKSVAEIAEAFVESIGQNDADLQLSTCSSNLQTDDQIVTNIIPPHHSMLSSHEPTIQPNSSQTVETQINAILRPPTNINPIETEKIENVFQEMLIKYSGMDPNLRPMIPKLQITHNVIKTVNVLNHAIGKYLEEKEEPNLEEVHSVIYCGAMTTASLHTKTVNHKEKNNTIDYVNPKWQIRIENRIKQLRKEIGQLTQYLKGNINPRKQQKINPKSLPKNQLTDHLDNLKQKLKAQSKRLRRLKISNARRKDNIQFNNNQKLFYQNLNSETIKVTQPPDINDVQEYWENLWSIPVQHNSDCSWIESEEQDCQNINQMPDITVDRDDVTRAIKKTLNWKAPGSDKIQNYWLKYFTSTHRHIANIFNSLINTPETIPLFFTQGITYLKPKDKDDTANPTKYRPITCLPTVYKLFTSIITQKLNAHITQNKIIPEEQKGCAKGSMGCKEQLVIDAEIHNNAKQNRNNLYFAYIDYQKAFDSIPHSWLIKVLKIYRVNNKLIQLLQYLMSTWSTQLFLRTTNTQFSTPPIKIKRGIFQGDSLSPLWFCLALNPLSKILNKSSYGYTIDRTNNIKLTHLLYMDDIKIYATDRQQLDYLLKLTERFSIDIKMAFGIDKCRINCVIKGQHQQINPHNLELQEDIIDSMQAHDTYKYLGYIQNTTINHKDIKNTLKSKYKLRLNKILSTRLSGRNKVKAINTYAIPILTYSFGIIKWSDTELEALNTTTRTASYKHNIHHIHSAVERFTLKRKLGGRGCIDIKNLCYSQIENLRTYFQVKAQTSHLHKAITQLTHSGTPLQLNNSNFNPKYKIINDCDKIAKWKGKSLHGKFPHQLEQDHIDKTASFSWLTRGNIYSETEGFLVAIQDQIIKTRNYSKYILKENIETDKCRLCHQTTETIDHITGGCSSLANKEYTHRHNNVAKHIHQLLALKYKLIDTHTPYYKYKPCDVLENSTAKLYWDRDIITDRTILSNRPDICLTIKSQKVTYLIDIAVPNTNNLKQKHNEKIQKYIPLADEIKQMWRQDTVKIIPIVISSTGVIPKTLIAALKSLDLNKNIYIHLQKSIVIDTCSIVRRFLNPSSYFSTPQSLLFPHTN

SEQ ID NO: 1339 - protein, 1324 aa, Aricia agestis
MRLRNRYIPQAGTGAKRNGESRPGPSGPGSPSYSGGGNVSLHSAQASTAAENIVPTTSNTHSHSTSPTSSISLFPSPHSSPRSYMFDKSSSSSRSTSQSPMSYVVTREATAYYPVPIVDNTQSTSTLQTNERHPVDHNTSQSHLTNTPTRSVLQEMLPPTTLAGKCRQRMKWTHEINRELLRCYYIVTSCESNLTAFRPLLHQKFIDNFPELSHLSEQRLADQIRVIHRNNRIAPHIREQIKKSVAEITETFAESNGQNDADLQLSTCSSNLQTDDQFITNIIPPHHSMLSSHEPIIPPNSSQTIETQINATPRSPTNINPIETEKIENVFQEMLIKYNVMDPNLRPMIPKLQITHNVIKTVNVLNHAIGKYLEEKEEPNLEEVHSIIYCGAMTTASLHTKTVNYKEKEKINTIDTVNPKWQIRIENRIKQLRKEIGQLTQYLKGNINPRKQQKINPKSLPENQLTDHLDNLKQKLKAQSKRLRRLKISNARRKDNIQFNNNQKMFYQNLNSETIKVTQSPDINDVQEYWENLWSIPVQHNSDCSWIESEEQDYQNINQMPDITVDRDDVTRAIKKTLNWKAPGPDKIQNYWLKYFTSTHRHIANIFNSFIHTPETIPLFFTQGITYLKPKDKDDTANPTKYRPITCLPTVYKLFTSIITQKLNAHITQNKIIPEEQKGCAKGSMGCKEQLVIDAEIHNNAKQNRNNLYFAYIDYQKAFDSIPHSWLIKVLKIYQVNNKLIQLLQYLMSTWSTQLFLRTTNAQLSTPPIKIKRGIFQGDSLSPLWFCLALNPLSKILNKSSYGYTIDRTNNIKLTHLLYMDDIKIYATDRQQLDYLLKLTERFSIDIKMAFGIDKCRINCVIKGQHQEINPHNLELQEDIIDSMQAHDTYKYLGYIQNTAINHKDIKNTLKAKYKLRLNKILSTQLSGRNKVKAINTYAIPILTYSFGIIKWSDTELEALNTATRTASYKHNIHHIHSAVERFTLKRKLGGRGCIDIKNLCYSQIENLRTYFKVKAQTSHLHKALTQLTNSGTPLQLNNSNFNPKYKITNDCDKIAKWKGKALHGKFPHQLEQDHIDQTASFSWLTRGNIYSETEGFLVAIQDQVIKTRNYSKYILKENIETDKCRLCHQTTETIDHITGGCCSLANKEYTHRHNNVAKHIHQLLALKYKLIDTHTPYYKYKPCNVLENSTAKLYWDRDIITDRTILSNRPDICLTIKSQKVTYLIDIAVPNTNNLKQKHNEKIQKYIPLADEIKQMWRQDTVKIIPIVISSTGVIPKTLIAALKSLDLNKNLYIHLQKSIVIDTCSIVRRFLNPSSSFTTSQS

SEQ ID NO: 1340 - protein, 1322 aa, Cyclargus thomasi
MRLRNRFIPQAGTGAKRNGESRPGPSGPGSPSYSGGDNVSLRSAQSSTAAENITLAKNTTHSYPISPTSSISMFSTPRSYMFDESSSSSRATSQSPRSGVVAQEASATYLMPIPDFVLSTSSSQNMHEMHSVEHHTPEPHLINIPVTGVLQDMLPPTTLAGKRRQRMKWTDEINRELLRCYYVITSCESNLTAFRPLLHQKFIEKFPELSHLSEQRLADQIRVIHRNNRVAPHIREQIKKSVAEVTEFFVESQTENSTQFENVPLSACLNNLQTDNESAANISSQQYSISSCEQMTLPNTSHTTETQINATQRSPASINPIETAEIENVFRETLIKYSDLDPNLRPIIPKFQITRNVIKTVNVLNQTIEKYLREKTEPSLEEVHNVIYCGAVTTVILHAQTVKTKITETKRTDEGTPKWQVRIQNRIKQLRKEIGQLTQYLKGNISPRKQQKLNPKNLPGNQLIDHLDNLKQKLKAQSKRLRRLKISNARRKDNMQFNSNQKLFYQNINSETIKVTQPPEINEVKEYWENLWSIPVQHNSECSWIQSEEQNYQNISPMPDITVDREDVARTIRKTLNWKAPGPDKIQNYWLKYFTSTHYFIANIFNSFLNTPESIPLFITQGITYLKPKDKDDTVNPSKYRPITCLPTVYKLFTSIITQKLNDHITKNNIIPEEQKGCTKGSMGCKEQLVIDAEIHNDAKRNRNNLYFAYIDYQKAFDSIPHSWLIEVLKIYKVNTKLIQLLQYLMSTWSTQLILRTTKAQLSTPPIKIKRGIFQGDSLSPLWFCLALNPLSKILNKTSYGYTINKTNNTKLTHLLYMDDIKIYATDRQQLQLLLKLIEIFNTDIKMAFGIDKCRINCIIKGQHQETNPHNLELQEAVIDSMQANDTYKYLGYIQNTIISHKDIKNTLKTKYKLRLNKILATQLSGRNKIKAINTYAIPILTYSFGIIKWSDTDLEALNTVTRTTCYKHNIHHIHAAVERFTLKRKLGGRGCIDIKNLCYSQIENLRKYFQAKAQNSHIHKAITQFTYSGTPLQLNNNNFNPKYKIIKDCDKIAKWKGKALHGKLPYQLEQDHIDQTASFSWLTRGNIYSETEGFLVAIQDQIIKTRNYSKYILKENIETDRCRLCHQTSETIDHITGGCSSLANKEYTHRHNNVAKHIHQSLALKYKLIDAHTPYYKYKPCNVLENNTAKLYWDRDIVTDRTILSNRPDICLTIKSEKITFLIDVAVPNTNNLKQKHNEKIQKYIPLADEIKQMWRQDTVKIIPIVISSTGVIPKTLTAALKSLDLNKNIYIQLQKSIVIDTCSIVRRFLNPSSSFTTSQS

SEQ ID NO: 1341 - protein, 1360 aa, Apostictopterus fuliginosus
MRLRNRQLPQAGTREGESRPGPSGSGCPSYSGGGNASHTAQFHTVAVDNPTPHTTGTSSPISSTQSLFPSPGSSPHSYEHSSSRSSTVTPMSCDVAQEALANFPGPITDNPYPTRALQNDKTYSVDHTHTPPLNIHTPTRSVLQDMLPATTLAGKRRQRMKWTDEINTELLRCYYIVTHNETNLTNWRPQLHQQFIESIPELSHLSEQRLADQIRTIHKNNRIPLTKRKVIKQSVSLVIHTQIDSNQYMDTANTENNHQSNTITNTHQSSPLTPTHPQNLHHTLYITQQANTLLQVHDNTEHIEIQDSETIDNPQDRVDYEKIRNTFTEMLIKYSGTDPTLRPTIPKIHISRKFIKTLHTTNEIIYNQLLNKEVINLEEIHDIIYCAAQTVTIIHNKSFEVRNTNNTNDTNTIINHKKPQWEKRIETKITVLRKEIGQLIQYLNGNLTHKKMQKVNPNNRNKDELTELLDKNKQKLQAYSKRLRRYKVSNERKSHNKLFCSNQKQFYQKLNSEQIRIAVPPNIDDVQNYWKHLWSKPVEHNTHTSWTEIEEQETANISPMPEIKIDKNDVTQAIKKTLNWKAPGPDKIQNYWIKYLTATHEPIANAFNHLMHHPQETPSFLTEGVTYLKPKDNDTTNPAKYRPITCLPTIYKLLTSIISHKLNTHITQNDIIPEEQKGCSKGSKGCKEQLVIDTEIHNQVKQKHRNLFYSYIDYQKAFDSVPHSWLIYILKLYKVDNRLIQFLQHAMTNWTTKLHLRTFNTTLYTQGIKIKRGIFQGDSLSPLWFCLALNPLSKILNKTGYGYVIDKNTKLTHLLYMDDIKLYATNREQLDQLLKHTEKFSTDIKMSFGTSKCKINSIIKGQHKETNAFDLTIQGGKIDSMEAADTYKYLGYQQSTSINHTDIKNTLKTKYKQRLHKILKTQLSAKNKIKAVNTYAVPILTYSFGVIKWSDTELEALNTSTRTACNKHNIHHIHSAIQRFTLKRKLGGRGVIDIKNLHYTQIDKLRTYFLTKANLSSLHKAIVNIPHSGTPLQLNNNLFEPKLKIVKDEQKIENWKKKALHGRYPHELDQDHIDRDASCTWLTKGNIFGETEGFLIAIQDKIIKTRNYSKYILKEKIQTDKCRLCHQTTETIEHITGGCPVLANKEYTHRHDNVAKHIHQQLALKFKLLKSYTPYYQYKPKNVIENNTARLYWDRDIITDRTILSNRPDITLTLKSSKTTYLIDIAVPNTHNLKQKHTEKVQKYMSLADEIKQMWHQESVKIVPIIISSTGVIPKTLKSALKLLNLHENTYIPMQKSIVIDTCSIVRRFLNPITLSLQDEQHTNAHTQNLPTLAITNIHNTSNTCDTANTQITYSNHTNT

SEQ ID NO: 1342 - protein, 1327 aa, Plebejus argus
MRLRNRKILPQAGTGANSNGESRPGPAGPGSPTYSGGGTVSLNSVQSCTAADNAIPTTSNTHSCPSSPTSSVSLFPSPHSSPQSFMLNNSFSSRSTTLSPMSDNVTQEAIAFNPVPILDITPSTSHSQYINPNTVDHNTLMQPHLTNTPVRSVLQDMLPPTTLAGKSRQRMKWTDQINRELLRCYYIVTSCESNLTAFRPSLHKKFSETFPELSHISEQRLADQIRVIHRNKRIPIPERTKIKISVANTLDYPDGQNNNRQTNSLLTHRPTNQHQTDDPIVYSIQPANHQPISLPNSFENVEYTIAQDNNDANTPPVNADETLTRNIEQAFTEMLIKYAETDPTLRPVIPKLQITRHIIKTVNILNKLLGKYLEEKVTPGLDDIHNAIYCAAITATTLHTKPNNLPEKRTIDKTIEQKYPKWQLRIEHRVTKLRQQIGQFTQYLKGNLSHKKRQKINPNNLTDSQMMDLLDNLKQKLQAQSKRLRRLKISNARRKDNKLFINNQKIFYQNLNSENIAITQPPNIDELNDYWETLWSKPVHHNEQASWLMTEINECQNIIPMPEIVIDVNDVTNAIKKTLNWKAPGPDKIQNYWIKYFTTTHHYIAKTFNSAIQDPKTIPLFMTQGITYLKPKDKNDTKTPSKYRPITCLPTLYKLLTSIITQKLNTHIIKNKIIPEEQKGCTKGSMGCKEQLVIDTQIHNQAKQDHKNLYYSYIDYQKAFDSVPHSWLIQVLQIYKVNNNLIQFLKHLMLTWSTKLNLKTTETTLSTSPIKIKRGIFQGDSLSPLWFCLALNPLSKILNRSNYGYTIDKVNKIKITHLLYMDDIKIYAIDRQQLEHLLKLTEKFSTDIHMTFGIDKCKINSIRKGKHIHTQPLDLELQIGKIDSMQAKDTYKYLGYIQNTALDHKKIKNTLKNKYKQRLNKILKTQLSGRNKIKAINTYAIPILTYSFGIIRWSDTELEALNTATRTASYKHNIHHIHSAVERFTIKRAQGGRGVIDIKNLHYSQIDNLRKYFKTKAITSPLHKAIVSLPHSGTPLQLNNDQFDPINKITKDIQKIEKWKSKALHGKFPYQLNQDHIDQAASFTWLTKGNIYSETEGFLVAIQDQIIKTRNYSKFILKEPIETDKCRLCHQMTETIDHITGGCSALANKEYTHRHDNVAKHIHQLIAIKFNLIDTHTPYYKYKPCNVLENDSVKLYWDRDIITDRTILSNRPDITLTIKAEKTTYLVDVAVPNTNNLQQKHNEKIQKYIPLADEIKQMWHQNTVKIVPIVISSTGVIPKTLAVALKSLDLHKNTYIQLQKSIVIDTCSIVRRFLNSSSSFPTPAHSN

SEQ ID NO: 1343 - protein, 1240 aa, Lysandra bellargus
MLSNSCSSRSTTLSPMSGDVTQDAIASNPVPIPDITPSTSHSQYSNPNTVDHNTLIQPHLTNTQVRSVLQDMLPPTTLTGKSRQRMKWTDQINRELLRCYYIVTSCESNLTGFRPSLHKKFAEIFPELSHLSEQRLADQIRVIHRNKRIPSPERTKIKIAVANTLDYSDGQNNNRQTNSLPTHRLTSQHQTDDPIVYSIQPANHQPISLSNSFETIEYTITQENNEANTSPAVTADETVTRNIELAFTEMLIKYAEIDPTLRPVIPKLQITRHIIKTVNILNKLLGKHLEEKETFGLEDIHKAIYCAAITATTLHTKPNNLPEKRTIDQKYPKWQLRIEHRVIKLRQQIGQFTQYLQGNLSNKKRQKINPNNLTDSQVTDLLDNLKQKLQAQSKRLRRLKISNARRKDNKLFTSNQKIFYQNLNFENITITQPPNIDELNDYWETLWSKPVHHNEQASWLVTEINECQNIIPMPEIVIDVNDVTNAIKKTLNWKTPGPDKIQNYWIKYFTTTHHYIAKAFNSAIQDPKTIPLFMTQGITYLKPKDKNDTKTPSKYRPITCLPTLYKLLTSIITQKLNTHIIKNKIIPEEQKGCTKGSMGCKEQLIIDTQIHNQAKQDHRNLYYSYIDYQKAFDSVPHSWLIQVLQIYYKVNNNLIQFLKHLMLTWSTKLNLKTTETTLSTSPIKIKRGIFQGDSLSPLWFCLALNPLSKILNRSNYGYTIDKVNKIKITHLLYMDDIKIYAIDRQQLEHLLKLTEIFSTDIHMSFGTDKCKINSILKGKHIHTEPLDLELQIGKVDSMQAKDTYKYLGYIQNTALDHKKIKKTLKNKYKHRLNKILKTQLSGRNKIKAINTYAIPILTYSFGIIRWSDTELEALNTATRTASYKNNIHHIHSAVERFTIKRAQGGRGVIDIKNLHYSQIDNLRKYFKTKATTSPLHKAIVSLPYSGTPLQLNNDQFDPINKITKDIQKIENWKSKALHGKFPYQLNQDHIDQAASFTWLTKGNIYSETEGFLVAIQDQIIKTRNHSKFILKEPIETDKCRLCHQITETIDHITGGCSALANKEYTHRHDIVAKHIHQLIAIKFNLIDIHTPYYKYKPCKVLENDTVKLYWDRDIITDRTILSNRPDITLTIKSEKTTYLIDVAVPNTNNLQQKHNEKIQKYIPLADEIKQMWHQNTVKIVPIVISSTGVIPKTLAVALKSLDLHKNTYIQLQKSIVIDTCSIVRRFLNSSSSFPTYSHSN

SEQ ID NO: 1344 - protein, 1344 aa, Aricia agestis
MRLRNRNIPQAGTGATSNGESRPGPPGPGCPSYSGGGNVSLLNAQSSTAADNSIIPTPNNTHSYPSSPSSSISLFPSPHSSPKSYMLHNTSSSSSRSTTFSLMSEDVTREAVATYPVPISDITPSTSTLRNTGQQPVDHNTSQAHLINTPVRSVLQDMLPPTTLAGKRRQRMKWTNQINRELLRCYYEVTSCESNLTAFRPLLYQKFIETFPELRHLTEQRIADQIRVIHKNNRIAAHEREVIKQAVADSAQTSDIFSAQNSTQDTDIISSSPVNTQTEYSQSNTNPFTPHHSYSTQTSPHLLNTIGSYNIAENAITQEINASNTSLTDLNLIESRKIENVFKEMVIKYTDTDPSFRPIIPKLQITRNVIKTITVLNNIIAKYLEEKVTPDIVDIQSAIYCGAIAATTLHIKLRKTNTNISTDKTIDHNKPKWQVRIENRIKKLRKEIGQLTQYLRGNLNTRNQQKLNPFNYSTDQLADKLDNLKQKLQANSKRLRRFKISNERRRHNMLFNNNQKIFYQNLNGDSIKITQPPDLDKVKSYWENLWSKPVLHDTQSPWIDAETEDCQNIDIMPDIVIDREDVTYAVKKSLNWKAPGPDKIHNYWIKYFTSTHYYIANTFNLLIQDPQRIPSFLTQGITYLKPKDDDTSNPSKYRPITCLPTLYKLLTSIITQKLSTHITRNNIIPEEQKGCAKGSMGCKEQVIIDSHIHNQAKQNYRNLYYSYIDYQKAFDSVPHSWLLQVLKIYKVDIKLIHFLQHVMTTWSTKLNIRTMNGEFNTSLIQINRGIFQGDSLSPLWFCLALNPLSKILNNSGYGYQINKANNIKISHLLYMDDIKIYASNRQQLENLIRLTEKFSIDIKMTFGIDKCKINCIVKGKHTQTESLNLEIQNGMINSMQAKDTYKYLGFLQSTAINHKDIKNSLKSKYKQRLHKILTTQLSARNKVKAINTYAIPILTYSFGIIKWSDTELDALNTTTRTLSYKNNIHHIHSAVERFTLKRKLGGRGVIDIKNLHYNQIDNMRSYFLNKAQTSQLHDAIVRLPHKSTPLQLSNTQFNPTLKIIKDSDKIQKWKSKALHGKYPHHLEQEYVDQAASCAWLCKGNLYSETEGFLIAIQDQIIKTRNYSKFILKESIDTDKCRLCHISAETIDHITGGCSTLANKEYTHRHDNAAKHIHQLLAIKYKLIDAHTPYYKYKPRNVLENSTAKLYWDRDIITDRTILSNRPDITLTIKAEKTTYLIDIAVPNTNNLQQKHNEKIQKYIPLADEIKQMWHQKVVKIIPIIISSTGIIPKTLAASLESLDLHKNTYIKIQKSIIIDTCSLVRRFLNPSSSFPSAQSSQRNTSSLT

SEQ ID NO: 1345 - protein, 1329 aa, Lysandra coridon
MRLRNRNILPQAGTGAKSNGESRPGPSGPGCPSYSGGGTVSHPTAQSSTAAENNNYQTISNTYTYPSSPTSSVSLFPSLHSSPQSFMLSNSCSSRSTTLSPMSGDVTQDAIASNPVPIPDITPSTSHSQYSNPNTVDHNTLIQPHLTNTQVRSVLQDMLPPTTLAGKSRQRMKWTDQINRELLRCYYIVTSCESNLTGFRPSLHKKFAEIFPELSHLSEQRLADQIRVIHRNKRIPSPERTKIKIAVANTLDYSDGQNNNRQTNSLPTHRLTSQHQTDDPIVYSIQPANHQPISLSNSFETIEYTITQENNEANTSPAVTADETVTRNIELAFTEMLIKYAEIDPTLRPVIPKLQITRHIIKTVNILNKLLGKHLEEKETFGLEDIHKAIYCAAITATTLHTKPNNLPEKRTIDKTIDQKYPKWQLRIEHRVTKLRQQIGQFTQYLQGNLSNKKRQKINPNNLTDSQVTDLLDNLKQKLQAQSKRLRRLKISNARRKDNKLFTSNQKIFYQNLNFENITITQPPNIDELNDYWETLWSKPVHHNEQASWLVTEINECQNIIPMPEIVIDVNDVTNAIKKTLNWKAPGPDKIQNYWIKYFTTTHHYIAKAFNSAIQDPKTIPLFMTQGITYLKPKDKNDTKTPSKYRPITCLPTLYKLLTSIITQKLNTHIIKNKIIPEEQKGCTKGSMGCKEQLIIDTQIHNQAKQDHRNLYYSYIDYQKAFDSVPHSWLIQVLQIYKVNNNLIQFLKHLMLTWSTKLNLKTTETTLSTSPIKIKRGIFQGDSLSPLWFCLALNPLSKILNRSNYGYTIDKVNKIKITHLLYMDDIKIYAIDRQQLEHLLKLTEIFSTDIHMSFGTDKCKINSILKGKHIHTEPLDLELQIGKIDSMQAKDTYKYLGYIQNTALDHKKIKKTLKNKYKHRLNKILKTQLSGRNKIKAINTYAIPILTYSFGIIRWSDTELEALNTATRTASYKNNIHHIHSAVERFTIKRAQGGRGVIDIKNLHYSQIDNLRKYFKTKATTSPLHQAIVSLPYSGTPLQLNNDQFDPINKITKDIQKIEKWKSKALHGKFPYQLNQDHIDQAASFTWLTKGNIYSETEGFLVAIQDQIIKTRNYSKFILKEPIETDKCRLCHQITETIDHITGGCSALANKEYTHRHDNVAKHIHQLIAIKFNLIDTHTPYYKYKPCKVLENDTVKLYWDRDIITDRTILSNRPDITLTIKSEKTTYLIDVAVPNTNNLQQKHNEKIQKYIPLADEIKQMWHQNTVKIVPIVISSTGVIPKTLAVALKSLDLHKNTYIQLQKSIVIDTCSIVRRFLNSSSSFPTYSHSN

SEQ ID NO: 1346 - protein, 993 aa, Celastrina argiolus
MMVKYSGTDPTLRPTIPKLQTTRNVIKTVNILNSLMANYLEEKETHSLDEIHTTIYSAAITVATLHSKIVNPSENKNTDKIIAHNTPKWQTRIENRIKKLRKEVGQLTQYLKGNLTIKKQRKLNPNNLTNVQIVDLLDKLKQKLQAQSKRLRRLKISNARRKDNTLFNSNQKIFYQNLTSENFKITNPPNIDEVNNYWEELWSKPVHHNTQSSWLSTEIEESQTLNIMPEIIIDKDDVTYAIKNTLNWKAPGPEKIQNYWIKYFTATHRHIADVFNSFIQYPQTIPPFFTQGITYLKPKDKNDTTNPTKYRPITCLPTIYKLLTSIITQKLSTHITQNNIIPEEQKGCTKGSMGCKEQLIIDAEIHNQVKQNRKNLYYSYIDYQKAFDSVPHSWLLHILKIYKVDCKLIQFLQSLMCTWSTKLNLKTIDSTFCTSPIKIKRGIFQGDSLSPLWFCLALNPLSKILNKACHGYVIDKTKNIKITHLLYMDDIKLYATDRQQLEKLLQLTEQFSTDIKMTFGIEKCKINCITKGQHTQTESLNLELQTGIIDSMQAKDTYKYLGYIQSTAINHKEIKNTLKSKYKERLNKILSTQLSGRNKIKAINTFAVPILTYSFGIIKWTDTELEALNTATRTSSYKHNIHHIHSAVERFTLKRKLGGRGAMDIKNLHYNQIDNLRKYFLNKANTSELHNAIINIPHSGTPLHLNNNQFDPRHKILSDNNKITKWKSKALHGKFPHQVQQEHIDQEASFSWLTKGNIFSETEGFIIAIQDQIIKTRNYSKYILKENIATDKCRLCHQTTETIDHVTGGCSALASKEYTYRHNNVAKHIHQLLATKYKLIETPTPYYKYKPSSVLENSSVKLYWDRDIVTDRTILSNRPDITLTIKPAKITYLIDIAVPNTNNLKQKHSEKIQKYIPLADEIKQMWRQESVKIIPIIISSTGVIPKTLTAALKTIDLHKNTYIQMQKSVVIDTSSIVRRFMNPSSSFTNSPQS

SEQ ID NO: 1347 - protein, 1330 aa, Celastrina argiolus
MRLRNRNIPQAGTGAKSDGESRPGPSGSGCSSYSGGSTVSPHAAQSSTAADNIIKRTSNTNSCPTSPASSISLFPSPHSSPQSYMLNNSSSTRSTSFSSMSDVVAQEANASNPVPILDIISSTSTSQNTDLNFVDHNILRQPHLSNTPVRSVLQDMLPSTTLAGKSRQRMKWTDQINIELLRCYYLVTSCESNITAFRPLLHNKFIETFPELSHISEQRLSDQIRVIHRNNRISPQERNRIKILVAQELNNNNSQNNNIQNTDLQVNPCNIHIDSQPSTDNLISCRSSILTSGESFYISNFSDTPEQATTSEPNTTNIPNVVLDSTENQKIENIFTEMIFKYSGTDPTLRPTIPKLQTTRNVIKTVNILNSLMANYLEEKETHSLDEIHTTIYSAAITVATLHSKIVNPSENKNTDKIIAHNTPKWQTRIENRIKKLRKEVGQLTQYLKGNLTIKKQRKLNPNNLTNVQIVDLLDKLKQKLQAQSKRLRRLKISNARRKDNTLFNSNQKIFYQNLTSENFKITNPPNIDEVNNYWEELWSKPVHHNTQSSWLSTEIEESQTLNIMPEIIIDKDDVTYAIKNTLNWKAPGPEKIQNYWIKYFTATHRHIADVFNSFIQYPQTIPPFFTQGITYLKPKDKNDTTNPTKYRPITCLPTIYKLLTSIITQKLSAHITQNNIIPEEQKGCTKGSMGCKEQLIIDAEIHNKVKQNSKNLYYSYIDYQKAFDSVPHSWLLHILKIYKVDCKLIQFLQSLMCTWSTKLNLKTIDTTFCTSPIKIKRGIFQGDSLSPLWFCLALNPLSKILNKACHGYVIDKTKNIKITHLLYMDDIKLYATDRQQLEKLLQLTEQFSTDIKMTFGIEKCKINCITKGQHTQTESLNLELQTGIIDSMQAKDTYKYLGYIQSTAINHKEIKNTLKSKYKERLNKILSTQLSGRNKIKAINTFAVPILTYSFGIIKWTDTELEALNTATRTSSYKHNIHHIHSAVERFTLKRKLGGRGAMDIKNLHYNQIDNLRKYFLNKANTSELHNAIINIPHSGTPLHLNNNQFDPRHKILSDNNKITKWKSKALHGKFPHQVQQEHIDQEASFSWLTKGNIFSETEGFIIAIQDQIIKTRNYSKYILKENIATDKCRLCHQTTETIDHVTGGCSALASKEYTYRHNNVAKHIHQLLATKYKLIETPTPYYKYKPSSVLENSSVKLYWDRDIVTDRTILSNRPDITLTIKPEKITYLIDIAVPNTNNLKQKHSEKIQKYIPLADEIKQMWRQESVKIIPIIISSTGVIPKTLTAALKTIDLHKNTYIQMQKSVVIDTSSIVRRFMNPSSSFTNSPQS

SEQ ID NO: 1348 - protein, 933 aa, Lysandra bellargus
MTTTTLHSKITNTAKDKETGKATNTNNPKWQGRIESRIKEIRKEIGQITQYLNGNLSLRKQQKLNPRNLTKTQLTDLLDNLKQKLQAQSKRLRRLKISNARRKDNSLFTTNQKLFFQKLNTENIVIKEPPDINEIKNYWENLWSKPVQHNTNSSWINTEANDNQNISPMSDFTVDRDDVTSAIKKTLNWKAPGPDKIQNYWLKYFTTTHIHIANIFNSFIKDPQSIPSFMTQGITYLKAKDKDNTTDPTKYRPITCLPTLYKLLTSIITQKLNLHITQNKIILEEQKGCTKGSMGCKEQLVIDAEVHNQAKQNNKNIYFAYIDYQKAFDSVPHSWLLQVLEIYQVNNKLIHLLKYLMSIWSTKLHLKTTNATLSTSTIKIKRGIFQGDSLSPLWFCLALNPLSKILNKSGHGYTIDKLSNVKLTHLLYMDDIKIYASDRQQLDHLLKLTEIFSADIKMTFGIDKCKINCLIKGRHQQTNPYNLELQEDAIDSMQAKDTYKHLGYIQSTTVNHKDIKNILKTKYKQRLNKILHTQLSGRNKIKAINTYAIPILTYSFGIIKWTDTELEALNTAIRTASYKHNIHHIHSAVERFTLKRKLGGRGCIDIKNLCYRQIENLRTYFQTKSRTSHLHNALVNLAHSGTPLQLNNSQFDPNHKIIKDSDKIAKWKSKAVHGKFPHLLDQDHIDQVASSSWLTKGNIYSETEGFLFAIQDQIIKTRNYSKYILKENIDTDKCRLCHQTTETIDHITGGCNSLANKDYTHRHDNVAKFIHQLLAIKYKLIDIHTPYYKYKPTNVLENNIAKLYWDRDIITDRTIPSNRPDITLTIKAKKTTYLIDIAVPNSNNLKQKHNEKIQKYIPLADEIKQMWRQETVKIIPIILSSTGVIPKTLFTALKTLDLNKNTYIHIQKSVVIDTCSIVRRFLNPSSSFTSSQA

SEQ ID NO: 1349 - protein, 993 aa, Celastrina argiolus
MMVKYSGTDPTLRPTIPKLQTTRNVIKTVNILNSLMANYLEEKETHSLDEIHTTIYSAAITVATLHSKIVNPSENKNTDKIIAHNTPKWQTRIENRIKKLRKEVGQLTQYLKGNLTIKKQRKLNPNNLTNVQIVDLLDKLKQKLQAQSKRLRRLKISNARRKDNTLFNSNQKIFYQNLTSENFKITNPPNIDEVNNYWEELWSKPVHHNTQSSWLSTDIEESQTLNIMPEIIIDKDDVTYAIKNTLNWKAPGPEKIQNYWIKYFTATHRHIADVFNSFIQYPQTIPPFFTQGITYLKPKDKNDTTNPTKYRPITCLPTIYKLLTSIITQKLSAHITQNNIIPEEQKGCTKGSMGCKEQLIIDAEIHNQVKQNRKNLYYSYIDYQKAFDSVPHSWLLHILKIYKVDCKLIQFLQSLMCTWSTKLNLKTIDTTFCTSPIKIKRGIFQGDSLSPLWFCLALNPLSKILNKACHGYVIDKTKNIKITHLLYMDDIKLYATDRQQLEKLLQLTEQFSTDIKMTFGIEKCKINCITKGQHTQTESLNLELQTGIIDSMQAKDTYKYLGYIQSTAINHKEIKNTLKSKYKERLNKILSTQLSGRNKIKAINTYAVPILTYSFGIIKWTDTELEALNTATRTSSYKHNIHHIHSAVERFTLKRKLGGRGAMDIKNLHYNQIDNLRKYFLNKANTSELHNAIINIPHSGTPLHLNNNQFDPRHKILSDNNKITKWKSKALHGKFPHQVQQEHIDQEASFSWLTKGNIFSETEGFIIAIQDQIIKTRNYSKYILKENIETDKCRLCHQTTETIDHVTGGCSALASKEYTYRHNNVAKHIHQLLATKYKLIETPTPYYKYKPSSVLENSSVKLYWDRDIVTDRTILSNRPDITLTIKPEKITYLIDIAVPNTNNLKQKHSEKIQKYIPLADEIKQMWRQEFVKIIPIIISSTGVIPKTLTAALKTIDLHKNTYIQMQKSVVIDTCSIVRRFMNPSSSFTNSPQS

SEQ ID NO: 1350 - protein, 1081 aa, Lysandra bellargus
MTQADRSNDIIQESVLNQNTCNLQANHQSRVNIPAPQQPSTLTSHQLNTPAISPDTIEYTNTLDTERTNEQPTYPNTIEAQEIEKVFTEMLIKYTDTDPTLRPTIPKLQVTRNVIKTVNQLNLIIGKYLDEKEALCLDEIQTTIYCAAMTTTTLHSKITNTVKDKETGKATNTNNPKWQGRIESRIKGIRKEIGQITQYLNGNLSLRKQQKLNPRNLTKTQLTDLLDNLKQKLQAQSKRLRRLKISNARRKDNSLFTTNQKLFFQKLNTENIVIKEPPDINEIKNYWENLWSKPVQHNTNSSWINTEANDNQNISPMSDFTVDRDDVTSAIKKTLNWKAPGPDKIQNYWLKYFTTTHIHIANIFNSFIKDPQSILSFMTQGITYLKAKDKDNTTDPTKYRPITCLPTLYKLLTSIITQKLNLHITQNKIIPEEQKGCTKGSMGCKEQLVIDAEVHNQAKQNNKNIYFAYIDYQKAFDSVPHSWLLQVLEIYQVNNKLIHLLKYLMSIWSTKLHLKTTNATLSTSTIKIKRGIFQGDSLSPLWFCLALNPLSKILNKSGHGYTIDKLSNVKLTHLLYMDDIKIYASDRQQLDHLLKLTEIFSADIKMTFGIDKCKINCLIKGRHQQTNPYNLELQEDAIDSMQAKDIYKYLGYIQSTTVNHKDIKNILKSKYKQRLNKILHTQLSGRNKIKAINTYAIPIRTYSFGIIKWTNTELEALNTAIRTASYKHNIHHIHSAVERFTLKRKLGGRGCIDIKNLCYRQIENLRTYFQTKSRTSHLHNALVNLAHSGTPLQLNNSQFDPNHKIIKDSDKIAKWKSKAVHGKFPHLLDQDHIDQVASSSWLTKGNIYSETEGFLFAIQDQIIKTRNYSKYILKENIDTDKCRLCHQTTETIDHITGGCNSLANKDYTHRHDNVAKFIHQLLAIKYKLIDIHTPYYKYKPSNVLENNIAKLYWDRDIITDRTILSNRPDITLTIKAKKTTYLIDIAVPNSNNLKQKHNEKIQKYIPLADEIKQMWRQETVKIIPIILSSTGVIPKTLFTALKTLDLNKNTYIHIQKSVVIDTCSIVRRFLNPSSSFTSSQA

SEQ ID NO: 1351 - protein, 1329 aa, Celastrina argiolus
MRLRNRNIPQAGTGASDGESRPGPSGSGCSSYSGGSTVSPHAAQSSTAADNIIKRTSNTNSCPTSPASSISLFPSPHSSPQSYMLNNSSSTRSTSFSSMSDVVAQEANASNPVPILDIIPSTSTSQNTDLNFVDHNILRQPHLSNTPVRSVFQDMLPSTTLAGKSRQRMKWTDQINIELLRCYYLVTSCESNITAFRPLLHNKFIETFPELSHISEQRLSDQIRVIHRNNRISPQERNRIKILVAQELNNNNSQNNNIQNTDLQVNPCNIHIDSQPSTDNLISCRSSILTSGESFYISNFSDTPEQATTSEPNTTNIPNVVLDSTENQKIENIFTEMMVKYSGTDPTLRPTIPKLQTTRNVIKTVNILNSLMANYLEEKETHSLDEIHTTIYSAAITVATLHSKIVNPSENKNTDKIIAHNTPKWQTRIENRIKKLRKEVGPLTQYLKGNLTIKKQRKLNPNNLTNVQIVDLLDKLKQKLQAQSKRLRRLKISNARRKDNTLFNSNQKIFYQNLTSENFKITNPPNIDEVNNYWEELWSKPVHHNTQSSWLSTEIEESQTLNIMPEIIIDKDDVTYAIKNTLNWKAPGPEKIQNYWIKYFTATHRHIADVFNSFIQYPQTIPPFFTQGITYLKPKDKNDTTNPTKYRPITCLPTIYKLLTSIITQKLSAHITQNNIIPEEQKGCTKGSMGCKEQLIIDAEIHNQVKQNRKNLYYSYIDYQKAFDSVPHSWLLHILKIYKVDCKLIQFLQSLMCTWSTKLNLKTIDSTFCTSPIKIKRGIFQGDSLSPLWFCLALNPLSKILNKACHGYVIDKTKNIKITHLLYMDDIKLYATDRQQLEKLLQLTEQFSTDIKMTFGIEKCKINCITKGQHTQTESLNLELQTGIIDSMQAKDTYKYLGYIQSTAINHKEIMNTLKSKYKERLNKILSTQLSGRNKIKAINTFAVPILTYSFGIIKWTDTELEALNTATRTSSYKHNIHHIHSAVERFTLKRKLGGRGAMDIKNLHYNQIDNLRKYFLNKANTSELHNAIINIPHSGTPLHLNNNQFDPRHKILSDNNKITKWKSKALHGKFPHQVQQEHIDQEASFSWLTKGNIFSETEGFIIAIQDQIIKTRNYSKYILKENIATDKCRLCHQTTETIDHVTGGCSALASKEYTYRHNNVAKHIHQLLATKYKLIETPTPYYKYKPSSVLENSSVKLYWDRDIVTDRTILSNRPDITLTIKPEKITYLIDIAVPNTNNLKQKHSEKIQKYIPLADEIKQMWRQESVKIIPIIISSTGVIPKTLTAALKTIDLHKNTYIQMQKSVVIDTSSIVRRFMNPSSSFTNSPQS

SEQ ID NO: 1352 - protein, 1330 aa, Celastrina argiolus
MRLRNRNIPQAGTGAKSDGESRPGPSGSGCSSYSGGSTVSPHAAQSSTAADNIIKRTSNTNSCPTSPASSISLFPSPHSSPQSYMLNNSSSTRSTSFSSMSDVVAQEANASNPVPILDIISSTSTSQNTDLNFVDHNILRQPHLSNTPVRSVLQDMLPSTTLAGKSRQRMKWTDQINIELLRCYYLVTSCESNITAFRPLLHNKFIETFPELSHISEQRLSDQIRVIHRNNRISPQERNRIKILVAQELNNNNSQNNNIQNTDLQVNPCNIHIDSQPSTDNLISCRSSILTSGESFYISNFSDTPEQATTSEPNTTNIPNVVLDSTENQKIENIFTEMMVKYSGTDPTLRPTIPKLQTTRNVIKTVNILNSLMANYLEEKETHSLDEIHTTIYSAAITVATLHSKIVNPSENKNTDKIIAHNTPKWQTRIENRIKKLRKEVGQLTQYLKGNLTIKKQRKLNPNNLTNVQIVDLLDKLKQKLQAQSKRLRRLKISNARRKDNTLFNSNQKIFYQNLTSENFKITNPPNIDEVNNYWEELWSKPVHHNTQSSWLSTEIEESQTLNIMPEIIIDKDDVTYAIKNTLNWKAPGPEKIQNYWIKYFTATHRHIADVFNSFIQYPQTIPPFFTQGITYLKPKDKNDTTNPTKYRPITCLPTIYKLLTSIITQKLSAHITQNNIIPEEQKGCTKGSMGCKEQLIIDAEIHNQVKQNRKNLYYSYIDYQKAFDSVPHSWLLHILKIYKVDCKLIQFLQSLMCTWSTKLNLKTIDTTFCTSPIKIKRGIFQGDSLSPLWFCLALNPLSKILNKACHGYVIDKTKNIKITHLLYMDDIKLYATDRQQLEKLLQLTEQFSTDIKMTFGIEKCKINCITKGQHTQTESLNLELQTGIIDSMQAKDTYKYLGYIQSTAINHKEIKNTLKSKYKERLNKILSTQLSGRNKIKAINTFAVPILTYSFGIIKWTDTELEALNTATRTSSYKHNIHHIHSAVERFTLKRKLGGRGAMDIKNLHYNQIDNLRKYFLNKANTSELHNAIINIPHSGTPLHLNNNQFDPRHKILSDNNKITKWKSKALHGKFPHQVQQEHIDQEASFSWLTKGNIFSETEGFIIAIQDQIIKTRNYSKYILKENIATDKCRLCHQTTETIDHVTGGCSALASKEYTYRHNNVAKHIHQLLATKYKLIETPTPYYKYKPSSVLENSSVKLYWDRDIVTDRTILSNRPDITLTIKPEKITYLIDIAVPNTNNLKQKHSEKIQKYIPLADEIKQMWRQESVKIIPIIISSTGVIPKTLTAALKTIDLHKNTYIQMQKSVVIDTSSIVRRFMNPSSSFTNSPQS

SEQ ID NO: 1353 - protein, 1328 aa, Lysandra coridon
MRLRNRNIPQAGTGAKSNGESRPEPSGPGCPSYSGGDTVSHLSAQSNTAADKATTTTINSYSYPTSPTSSISLFSSPQSSPRSYIVNINSSTSRSTTLSPVSDDATREANATYPVPIPDITSSTSFLVNNVLHPVDHNTSQSHLINTPARSVLQEMLPATTLTGKCRQRMKWTDHINKELLRCYYIVTSCESNLTAFRPLLRQKFIETFPELSHISEQRLSDQIRVIHKNNRLSAQVREQIKQSVAEMTQADRSNDIIQESVLNQNTCNLQANHQSRVNIPAPQQPSTLISHQLNTPAISPDTIEYTNTLDTERTNEQPTYPNTIEAQEIEKVFTEMLIKYTDTDPTLRPTIRKLQVTRNVIKTVNQLNLIIGKYLDEKEALCLDEIQTTIYCAAMTTTTLHSKITNTVKDKETGKATNTNNPKWQGRIESRIKEIRKEIGQITQYLNGNLSLRKQQKLNPRNLTKTQLTDLLDNLKQKLQAQSKRLRRLKISNARRKDNSLFTTNQKIFFQKLNTENIVIKEPPDINEIKNYWENLWSKPVQHNTNSSWINTEAKDNQNISPMSDFTVDRDDVTSAIKKTLNWKAPGPDKIQNYWLKYFTTTHIHIANIFNSFIKDPQSIPSFMTQGITYLKAKDKDNTTDPTKYRPITCLPTLYKLLTSIITQKLNLHITQNKIIPEEQKGCTKGSMGCKEQLVIDAEVHNQAKQNNKNIYFAYIDYQKAFDSVPHSWLLQVLEIYQVNNKLIHLLKYLMSIWSTKLHLKTTNATLSTSTIKIKRGIFQGDSLSPLWFCLALNPLSKILNKSGHGYTIDKISNVKLTHLLYMDDIKIYASDRQQLDHLLKLTEIFSADIKMTFGIDKCKINCLIKGRHQQTNPYNLELQEDAIDSMQAKDTYKYLGYIQSTTVNHKDIKNILKTKYKQRLNKILHTQLSGRNKIKAINTYAIPILTYSFGIIKWTDTELEALNTATRTASYKHNIHHIHSAVERFTLKRKLGGRGCIDIKNLCYRQIENLRTYFQTKSRTSHLHNALVNLAHSGTPLQLNNSQFDPNHKIIKDSDKIAKWKSKAVHGKFPHLLDQDHIDQVASSSWLTKGNIYSETEGFLFAIQDQIIKTRNYSKYILKENIDTDKCRLCHQTTETIDHITGGCNSLANKDYTHRHDNVAKFIHQLLAIKYKLIDIHTPYYKYKPSNVLENNIAKLYWDRDIITDRTILSNRPDITLTIKAKKTTYLIDIAVPNSNNLKQKHNEKIQKYIPLADEIKQMWRQETVKIIPIILSSTGVIPKTLFTALKTLDLNKNTYIHIQKSVVIDTCSIVRRFLNPSSSFTSSQS

SEQ ID NO: 1354 - protein, 1328 aa, Lysandra bellargus
MRLRNRNIPQAGTGAKCNGESRPEPSGPGCPSYSGGDTVSHLSAQSNTAADKATTTTINSYSYPTSPTSSISLFSSPQSSPRSYIVNINSSTSRSTTLSPVSDDATREANATYPVPIPDITSSTSFLVNNVLHPVDHNTSQSHLINTPARSVLQEMLPATTLTGKCRQRMKWTDHINKELLRCYYIVTSCESNLAAFRPLLRQKFIETFPELSHISEQRLSDQIRVIHKNNRLSAQVREQIKQSVAEMTQADRSNDIIQESVLNQNTCNLQANHQSRVNIPAPQQPSTLTSHQLNTPAISPDTIEYTNTLDTERTNEQPTFPNTIEAQEIEKVFTEMLIKYTDTDPTLRPTIPKLQVTRNIIKTVNQLNLIIGKYLDEKEALCLDEIQTTIYCAAMTTTTLHSKITNTVKDKETGKATNTNNPKWQGRTESRIKEIRKEIGQITQYLNGNLSLRKQQKLNPRNLTKTQLTDLLDNLKQKLQAQSKRLHRLKISNARRKDNSLFTTNQKLFFQKLNTENIVIKEPPDINEIKNYWENLWSKPVQHNTNSSWINTEANDNQNISPMSDFTVDRDDVTSAIKKTLNWKAPGPDKIQNYWLKYFTTTHIHIANIFNSFIKDPQSIPSFMTQGITYLKAKDKDNTTDPTKYRPITCLPTLYKLLTSIITQKLNLHITQNKIIPEEQKGCTKGSMGCKEQLVIDAEVHNQAKQNNKNIYFAYIDYQKAFDSVPHSWLLQVLEIYQVNNKLIHLLKYLMSIWSTKLHLKTTNATLSTSTIKIKRGIFQGDSLSPLWFCLALNPLSKILNKSGHGYTIDKLSNVKLTHLLYMDDIKIYASDRQQLDHLLKLTEIFSADIKMTFGIDKCKINCLIKGRHQQTNPYNLELQEDAIDSMQAKDTYKYLGYIQSTTVNHKDIKNILKTKYKQRLNKILHTQLSGRNKIKAINTYAIPILTYSFGIIKWTDTELEALNTATRTASYKHNIHHIHSAVGRFTLKRKLGGRGCIDIKNLCYRQIENLRTYFQTKSRTSHLHNALVNLAHSGTPLQLNNSQFDPNHKIIKDSDKIAKWKSKAVHGKFPHLLDQDHIDQVASSSWLTKGNIYSETEGFLFAIQDQIIKTRNYSKYILKENIDTDKCRLCHQTTETIDHITGGCNSLANKDYTHRHDNVAKFIHQLLAIKYKLIDIHTPYYKYKPSNVLENNIAKLYWDRDIITDRTILSNRPDITLTIKAKKTTYLIDIAVPNSNNLKQKHNEKIQKYIPLADEIKQMWRQETVKIIPIILSSTGVIPKTLFTALKTLDLNKNTYIHIQKSVVIDTCSIVRRFLNPSSSFTSSQA

SEQ ID NO: 1355 - protein, 1330 aa, Celastrina argiolus
MRLRNRNIPQAGTGAKSDGESRPGPSGSGCSSYSGGSTVSPHAAQSSTAADNIIKRTSNTNSCPTSPASSISLFPSPHSSPQSYMLNNSSSTRSTSFSSMSDVVAQEANASNPVPILDIIPSTSTSQNTDLNFVDHNILRQPHLSNTPVRSVLQDMLPSTTLAGKSRQRMKWTDQINIELLRCYYLVTSCESNITAFRPLLHNKFIETFPELSHISEQRLSDQIRVIHRNNRISPQERNRIKILVSQELNNNNSQNNNIQNTDLQLNPCNIHIDSQPSTDNLISCRSSILTSGESFYISNFSDTPEQATTSEPNTTNIPNVVLDSTENQKIENIFTEMMVKYSGTDPTLRPIIPKLQTTRNVIKTVNILNSLMAKYLEEKETHSLDEIHTTIYSAAITVATLHSKIVNPSENKNTDKIIAHNTPKWQTRIENRIKKLRKEVGQLTQYLKGNLTIKKQRKLNPNNLTNVQIVDLLDKLKQKLQAQSKRLRRLKISNARRKDNTLFNSNQKIFYQNLTSENFKITNPPNIDEVNNYWEELWSKPVHHNTQSSWLSTEIEESQTLNIMPEIIIDKDDVTYAIKNTLNWKAPGPEKIQNYWIKYFTATHRHIADVFNSFIQYPQTIPPFFTQGITYLKPKDKNDTTNPTKYRPITCLPTIYKLLTSIITQKLSAHITQNNIIPEEQKGCTKGSMGCKEQLIIDAEIHNQVKQNRKNLYYSYIDYQKAFDSVPHSWLLHILKIYKVDCKLIQFLQSLMCTWSTKLNLKTIDTTFCTSPIKIKRGIFQGDSLSPLWFCLALNPLSKILNKACHGYVIDKTKNIKITHLLYMDDIKLYATDRQQLEKLLQLTEQFSTDIKMTFGIEKCKINCITKGQHTQTESLNLELQTGIIDSMQAKDTYKYLGYIQSTAINHKEIKNTLKSKYKERLNKILSTQLSGRNKIKAINTYAVPILTYSFGIIKWTDTELEALNTATRTSSYKHNIHHIHSAVERFTLKRKLGGRGAMDIKNLHYNQIDNLRKYFLNKANTSELHNAIINIPHSGTPLHLNNNQFDPRHKILSDNNKITKWKSKALHGKFPHQVQQEHIDQEASFSWLTKGNIFSETEGFIIAIQDQIIKTRNYSKYILKENIETDKCRLCHQTTETIDHVTGGCSALASKEYTYRHNNVAKHIHQLLATKYKLIETPTPYYKYKPSSVLENSSVKLYWDRDIVTDRTILSNRPDITLTIKPEKITYLIDIAVPNTNNLKQKHSEKIQKYIPLADEIKQMWRQESVKIIPIIISSTGVIPKTLTAALKTIDLHKNTYIQMQKSVVIDTSSIVRRFMNPSSSFTNSPQS

SEQ ID NO: 1356 - protein, 1242 aa, Conopomorpha cramerella
MSVDVAQEASAYTPVPIADIINPTLDDCSTYNSVDTNTPIQHSQNTIHPTRSVLQEMLPTTTLAGKSRQRMKWTDEINRQLLRCYYTVTHGETDLTAWRPLLHRQFTEIYPELNHLPEQRLSDQIRVIHRNNRIPLTERESIKQSTLHSLYNTSQFHNNHIEPLLENTNISSNSTHLQNTEHDIQNTDTQNIQTNHITTDDYDILQTPSEQTIDTSEIDPNYIQNIEDTFLGQLTKYSDTDPNLRPAIAKLHTTKQMIKLVNITNIMVDQHLKSIGNVTLEEIHLAIYCAALTVSIILNRSDKTKTSNIRTIKNTSQANNNTLQPNYHTQNKKKQPPWERRIENNITTLRKEIGQLTQYVKGNLAPKNQQKINPNNKTPQEIVDLLDNKKQKVQSLSKRLRRYRISNKRKSDNIIFSNNQKKFYNNLNSDHIQITHPPDMNEVKQFWESIWSTPIEHEPHTTWTSITEEEQHIEPMASIIIDKEDVTQAAKRTHNWKAPGPDKIQNYWLKYLTSTHRHLAKAFNHIIQYPQDTPLFLTEGRTFLKPKDTDTTNPSKYRPITCLSTTYKLLTSVITHKLTNHITHNKIIPEEQKGCSKGSRGCKEQLVIDTEIHNQIKTKRKNLFYSYIDYKKAFDSIPHSWLIHVLEIYKIDNTIIQILKHTMSSWTTKLNLNTDKTTLSTTHIKIARGIFQGDSLSPLWFCLALNPLSRILNRTGHGHAIDSNTKLTHLLYMDDIKLYATNRQQLNELLTLTEQFSSDIKMTFGIDKCKINSIIKGHHKETEPYNLDIQLGAIDRMGPNETYKYLGYLQNTTINHTEIKKTLKAKYKLRLSQILKTQLSARNKTKAINTYAIPILTYSFGIIRWSETELEALNTTTRTMSNKHNIHHIHSAVQRFTLNRKLGGRGFIDIKNLHYTQIDNLRSYFLTKAENSPIHKAIVHLPHTGSPLHFNNIQFNPKDKMQTNEHKLQQWKSKALHGKYPHQITQPHIDQTASCTWLTKGNLYAETEGFMIAIQDQIIKTRNYSKYILKETIETDKCRLCHQTTESIDHITGGCNFLASKEYTHRHNNVAKHIHQQLALKHKLLTTYTPYYQYKPSNVLENDNAKLYWDRDIITDRTILSNRPDITLILKNTNTTYLIDIAIPNTNNIQKKHSEKIQKYIPLADEIKQMWHQDHVKIIPIILSATGVIPKTLKTALNILQLPDTTFIPLQKSVILDTCSIVRRFLNPTSLPLHTHTHTTLP

SEQ ID NO: 1357 - protein, 1317 aa, Pholisora mejicanus
MRLRSRKIPQAGTREGESRPGSSGSGCPTYSGEGNASHKTTQPQTVVVEKPHNTSGTISPISSTHSLFQSPISSPQSYEFELSSSRSTNITPLSCVAAEEAHAILPLPNNDNTNPTRALENNIDNRVSHNTQISSPHINTPERSVLREMLPATTLAGKSRQRMKWTNEINRELLRCYYIVTELETNLTAWRPLLHQKFVANIPELNHLSEQRLADQVRVIHRNNRIPVSEREEIKQSVSLLLLPHSPIQIREANNTITQTNIEDTQTINNHEIQSNTQFSNTILLNEPSINTEHFEVQNPISNDTPEPLDYEKVENLFKEMLIKYTGTDPTLRPTIPKLQITRHTIKTVNTTNEIIGKHLQIKDTITLEEIHETIYCAARTITAIHNKSAQKFENTTENNTKVRHNKTKWEERLENKIMMLRKEIGQLTQYLKGNLTQKKERKLNPNNRSTQEITDQLDNYKQKLQAQCKRLRRYKISNQRKSHNKLFNNNQKLFYQTLNEEHIKIAEPPEKDDIEKYWKNLWSKPVQHNINSSWTTIEKQEISNIDPMPELKIEKEDVSTAIKKTLNWKAPGPDKIQNYWIKYLSSTHEHISNAFNHLIHNPHETPSFLTRGITYLKPKDNDTTNPAKYRPITCLPTIYKLLTGIITNKLNTHITRNQIIQEEQKGCRKDSKGCKEQLIIDSEIHTQVKNKHTNLFYSYIDYQKAFDSVPHSWLIEILKIYKVDNKLVQFLQHSMKNWSTKLQLHTNRISLVTQAIKISRGIFQGDSLSPLWFCLALNPLSRILNNSESGYMLDRENNIKITHLLYMDDIKLYAANRQQLEHLLRLTENFSTDIKMSFGINKCKINSIIKGQYKQTDAFDLNIQGKIDSMEPKETYKYLGYQQSTSINHTDIKNTLKTKYKQRLQKILNTQLSARNKVKAINTYAIPILTYSFGVIKWSDTELEALNTLTRTTSYKHNIHHIHSAVQRFTLKRKLGGRGFIDIKNLHYNQINNLRTYFIQKSKENGIFKAILNQHKSGTPLQLNNSEFDPTLKIQTDEQKIDNWKKKALHGKYPHQLEHEHIDRSASCSWLTKGNIFGETEGFLIAIQDQVIKTRNYSKYILKETIETDKCRLCHQTSETIDHITGGCNVLANKEYTHRHDNVAKHIHQTLALKYKLLDSYTPYYKYKPKNVIENSTAKLYWDRDIITDRTILSNRPDITLTLKSSKTTYLIDVAVPNTHNLKQKHTEKVQKYIPLADEIKQMWHQETVKIVPIIISSTGVIPKTLKMAFKLLDIHENTYIPLQKSIIIDTCSIVRRFLNPSSLTLQQEKQYTTDS

SEQ ID NO: 1358 - protein, 1308 aa, Pythonides amaryllis
MTAQSTVAVNNNNTPSHSIPCSSSPISSTHSLFQSPPSSPHSYEIHTTSSRSTTSTPLSCDVAQEAYANPPTPISDNTNHTRVLQTFIDNRVHEHTPSLTSNINTPARCVLQDMLPATTLAGKSRQRMKWTDQINKDLLRCYYIVTHNETNLTAWRALLHKKFVEMIPELSHLSEQRLADQIRVIHRNNRIQASEREAIKASVFSTILNSQSITYQNTNQNNTLNQVTISDTQSVSQHQNSHNTSSTTQQTDSRSQTCEGYVQYEHFQTQNPDARNTLVLADYKTLENTFTEMLLKYTGTDPTLRPIIPRLQTTRNCIKTVNIVNKIIDEHIRKKEHLLIEEIHEIIYCAAQTVTTHTTTKLKPNTDNNNGNTYKQNKPRWERRLQNKITLLRKNIGQLTQYVKGNLTYKKQQKINPNNKSKNEIIEQLDINKQKLQAYSKRLRRYKISNQRKSHNKLFNINQKRFYQNLNTEHIQIKQVPEKEDLHTYWKNLLSNPVEHNTHGNWKDIEDQETKNINPMREIIIDKNDITQAIGKTLNWKAPGPDKIQNYWLKYLSSTHEHISKAFNHLIHNPQDTPSFLTHGITYLKPKDDDTNNPAKYRPITCLPTIYKLLSSIITHKLNTHITQNQIIPEEQKGCRKGSKGCKEQVIIDTEVHNQVKQKHRNLFYAYIDYQKAFDSVPHSWLIHILKIYKVSNNLITFLQYTMKNWTTKISLNTNKTSLCTQPIKIARGIFQGDSLSPLWFCLALNPLSRILSSTGYGYIVDRDTKISHLLYMDDIKLYAANRQQLDYLLTLTEKFSTDIKMTFGTGKCKINSIIRGQHKETDQFDLLVQGGKIDSMEPNETYKYLGFQQATSINHTDIKNTLKAKYKQRLNQVLNTQLSARNKTKAINTYAVPILTYSFGIIKWSDTELEALNTTTRTLSNKHNIHHIHSAVQRFTLKRKLGGRGVIDIKNLHYSQVDNLRTYFLTKATENSLFKAIVNLRQTGTPLQLNNDQFDPKKKILKDDQKINDWKMKALHGRYPYQLEQDHIDRNASLSWLTKGNIFGETEGFIVAIQDQIIKTRNYSKFILKQAIETDKCRLCHQHTETVDHITGGCSLLANKEYTHRHDNVAKHIHQQLALKHKLLESYTPYYKYKPKNVLENNCVKLYWDRDIITDRTILSNRPDITLTLKTTKITYLIDIAVPNTHNLQQKHIEKIQKYIPLADEIKQMWHQESVRIVPIIISSTGIIPKTLKNALNLLNLHENTYIPLQKSIIIDTCSIVRRFLNPTSLTLQQNEQHTDHNIHNIYIQANNNTQIYINHIPS

SEQ ID NO: 1359 - protein, 992 aa, Plebejus argus
MVIKYIDTDPSHRPIIPKIQITRSVIKTITVLNNIIAKYLEEKVAPDIVDIQSAIYCAAIAATTLHAKLRKTNPNKSTNKTTDHNEPKWQVRIENRIKKLRKEIGQLTQYLKGNLNTRNQQKLNLYNYSTDQLADKLDNLKQKLQANSKRLRRLKISNERRRHNMLFNNNQKIFYQNLNADNIKITQPPDLEEVKSYWENLWSKPVLHDAQSPRIDAETEECQNINIMPDIVIHREDVIHAVKKSLNWKAPGPDKIHNYWIKYFTSTHYYIANTFNLMIQDPQRIPPFLTQGITYLKPKDNDTANPSKYRPITCLPTLYKLLTSIITQKLNTHITQNNIIPEEQKGCAKGSMGCKEQVIIDSEIHNQAKQNHKNLYYSYIDYQKAFDSIPHSWLLQVLKIYKVNSKLINFLQYVMTTWSTKLNIRTINAEFNTSLIQIKRGIFQGDSLSPLWFCLALNPLSKILNKSGYGYQINKTNNIKITHLLYMDDIKLYASNRQQLENLIRLTEQFSIDIKMTFGIEKCKINCIVKGKHTQTEPLNLENMQSGIINSMQAKDTYKYLGFLQSTAINHKDIKNSLKSKYKQRLHKILATQLSARNKVKAINTYAVPILTYSFGIIKWSDTELDSLNTTTRTLSYKHNIHHIHSAVERFTLKRKLGGRGVIDIKNLHYNQINNMRSYFLNKAQTSQLHDTIVRLPHKGTPLQLSNSQFNPTLKILKDSDKIQKWKSKALHGKYPHHLQQEHVDQAASCAWLCKGNLYSETEGFLIAIQDQIIKTRNYSKFILKESIDTDKCRLCHISTETIDHITGGCSFLANKEYAHRHDNAAKHIHQLLAIKYKLIDSHTPYYKYKPHNVLENSTVKLYWDRDIVTDRTILSNRPDITLTIKAEKTTYLIDIAVPNNNNLQLKHNEKIQKYIPLADEIKQMWHQDVVKIIPIIISSTGVIPKTLAASLKTLDLHKNTYIQIQKSIIIDTCSLVRRFLNPSSSFPSVQS

SEQ ID NO: 1360 - protein, 1191 aa, Cycloglypha thrasibulus
MLPATTLAGKSRQRMKWSDSINRELLRSYYIVTHNETDLTAWRPLLREHFIANFPELHHISEQRLADQIRVIHRNNRIPITERENLKLLASSQLTTTSSQDSDINYTQSITHTASTTTNPPININTLHQEVTSQNTLTLEPTQVDVNWEHAHTQIFETINNSQYSLNYQDIENTFTEMLIKYTGTDPTLRPAIPKLQISRKTIKTVTTANEIINKYLQNKEIISLVEIVDIIYCAAKTVTLVHTKHPEKKLNAVEDEHSKKFNIHRKPQWESRIDKKISSLRKEIGQLTQYLNGNLTHKKKEKIDKNFTSRDKIIEQLDTDKQKLLAYSKRLRRYKISNQRKSHNKLFNANQKLFYQKLDTTCINITQPPHIDDIQNYWKNIWSKPLQHNTNKLWEDIEKQETENITPMPVIHVDKDDISQAIRKTLNWKAPGPDKIQNYWIKYFTATHTHIANIFNKLIQNPHETPSFLTQGVTYLKPKDNDTTNPAKYRPITCLPTIYKLLTSIITQKLNTHVTLNKIIPEEQKGCSKGSRGCKEQLVIDTEIHNQVKQKHRNLFYSYIDYQKAFDSIPHSWLIYILKIYKVDKILIEFLQHLMNNWNTKINLRTSDNVIFTPSIKILRGIFQGDSLSPLWFCFVLFCFVLFCLALNPLSKILNKTNYGYIIDRENNIKLSHLLYMDDIKIYAANRQELDHLLKITENFSNDIKMALGTDKCKINSIVKGQYSETDGFALNKQGGTIDGMDPTETYKYLGFYQSSSLNHTDIKNTLKSKYKQRLNKILNTQLSARNKSKAVNTYAIPVLTYSFGIIKWSDTELEALNTVTRTVSNKHNIHHIHSSIHRFTLQRKFGGRGFTDIKNLHYTQVDNLRTYFLTKAQVSSLHKAIVNIPQSGTPLQLNNKQFNPKLKILTDDQKLENWKKKALHGKYPNILQQEHVDRDASCTWLTKGNIFSETEGFLIAIQDQIIKTRNYSKFILKEAIESDKCRLCNQGPENIDHITGGCNVLANKEYTHRHDNVAKHIHQQLALKHKLLNSYTPYYQYKPKNVIENNIAKLYWDRDIVTDRTVLSNRPDIILSLKHSKTTYLIDISVPNTHNLKQKHTEKIQKYINLADEIKQMWHQESVRIVPIIISSTGVVPKTLKSALKLIDLHENTYIPLQKSIVIDTCSIVRRFLNPTTLTLHNNSHPDPNPHPF

SEQ ID NO: 1361 - protein, 1350 aa, Achlyodes mithridates
MRLRSRQIPQAGTRKGESRPGPSGSGSPSYSGGGNVSHKTAQSQTAAVHTSLTHIDSNPSSPTSSEYSLFPSPTSSPNSYEFVNSPSSSTTTTPLSDDVAREAHANSPMPTTDITNPTRTLQNKSDNRVNQITNSLPSNINTPVRSVLQEMLPATTLAGKGRQRMKWTDQINKELLRCYYIVTQVETNLTAWRSQLHQKFTESIPELSHLSEQRLADQIRVIYRNNRISAPDRENIKQSVSLLYFTSNNSNHTIDTNNTLQTNNHQLSNTHTLNETLTDNAIFTPDSNNYQIIETLNTQHDTPMTQVNLTLQAGDTCNSVEHYETQNPETLNTPIGQIDYKKIENTFNEMLIKYNGMDPTRRPTIPKLQTTRSAIKTVNTINEIIDKHLANKGTVPLEEIHEVIYCAAQTISIIHCKHNTQNKPEHKISNSNYSITKPQWEKRIEHKINTLRKDIGQLTQYIKGNLTQKKQLKINPHNRSIVEVTEQLDTYKQKLQAYSKRLRRYKISNERKSHNKLFNTNQKRFYQNLNTENIIVTQPPNKDELHNYWQNIWSKPVQHNTHAAWTQIEEQETASIDPMPEVTIDKEDVSQALRKTLNWKAPGPDKIQNYWIKYLSATHGHIATSFNHLIHNPQDTPSFLTQGITYLKPKDNDTTNPAKYRPITCLPTIYKLLTSIISDKLNVHITKNHIISEEQKGCRKGSKGCKEQLIIDAEIHNQIKQKHRNLFFSYIAFDSVPHSWLIQILQIYKVDNKLIEFLHHTIQNWNTKLNLCTNKTLLDSQTIKISRGIFQGDSLSPLWFCLALNPLSRILNKTGHGYVIDKDNNVKITHLLYMDDIKLYAANRQELDKLLTHTEKFSTDIKMTFGVNKCKINSIIKGQYRETAPFNLMIQGGKIDSMEPTETYKYLGYQQSTAISHTNIKNTLKTKFKQRLHKVLNTQLSARNKIKAINTYAIPILTYSFGIIKWSDTELDALNTVTRTLSHKHNIHHIHSAVQRFTLKRKVGGRGVIDIKNLHYTQIDNLRTYFLLKSKENSLFKSIVSLPYAGTSLQLNNSQYDPKLTIVSDESKIDTWKKKALHGKYPHQLQQDHVDLNASCSWLTKGNIFGETEGFIIAIQDQIIKTRNYSKFILKEAIETDKCRLCHQATETIDHITGGCNVLANKEYTYRHDNVGKHIHQQLALKYKLVESYTPYYQYKPKKVLENKTAKLYWDRDIITDRTILSNRPDITLTLKTSKTTFLIDISVPNTHNLKQKHSEKIQKYLPLADEIKQMWHQETVRIVPIIISSTGIVPKTLKTALKLLNLHESNYIPLQKSIIIDTCSIVRRFLNPSTLTLLEDQQYNDNNTTTQHN

SEQ ID NO: 1362 - protein, 1284 aa, Conopomorpha cramerella
MFVWPGPANIIKPTMSRERKKNDYNNNTVDVVHEASGSSPVPTTDSTHTTLRNQNTNNSVDTNTHSHHSHTTHPTRSVLQEMLPATTLAGKSRQRMKWTEDINQQLLRCYYIVTHGETDLTAYRPLLHRKFTETFPELSHLPEQRLADQIRVIHKNNRIPTAEREMIKQSVLHTLYNIEQSQVIEEQQIVNTDSHNASELINPRTNELNTDTEPVNIHVTSVSEPAINIEYDLSQSSCIPPIKRNENDTLINSYLQEIFTEQIAKYDGTDPNLRPIIPKLRITRHMIKLVNEINIIVGQYIGLLSTPMLEDIHLGIYCAALTVTIFLATENKLEKSATHRNANITHKKHETTSTKQQQNSRKQPFWEQRIANRITALRKEIGQMTQYLKGNLEPKKQHKLNLHNYNHTEMIDQLDLKKQKLQSLSKRLRRYKISNKRRTDNILFSSNQKIFYRKLNSDHITVTQPPDTIDLKQFWESMWSASVEHEIHAPWVEIEQQEMLNIELMESTVINKEDVTNAIKQTLNWKAPGPDKIQNYWIKYLTSTHQYLANSFNHILLHPQDTPLFLTEGKTYLKPKDADTTNPSKYRPITCLSTTYKLLTSIIANKLTSHITHNSIIPEEQKGCCKGSRGCKEQLVIDTEVHNQVKIKQRNLHYSYIDYRKAFDSVPHSWLLQILQIYKIDNTIIDVLRHTMTNWTTKLNITTDKTTLTTTNIKISRGIFQGDSLSPLWFCLALNPLSRILNKTGLGHVIDRVHNTKLTHLLYMDDIKLYAANRQELDTLLQLTEQFSSDIKMNFGTDKCKINSIVKGRHKETTPYDLRTQGGCIDSMEPREAYKYLGYLQNTTINHTEIKNTLKNKYKQRLTQILKTQLSARNKTKAINTYAIPILTYSFGVIRWSDTELEALNTTTRTMCNKYNIHHIHSAVQRFILNRKMGGRGFIDIKNLHYRQVDNLRSYFLTKAEESPLHKAIVNMTQTNNTPLQLINTQYKPTDKIQTDEYKIEKWKSKALHGKYPHQLAQSHVDQTASCTWLTKGNIFAETEGFMIAIQDQIIKTRNYSKYILKENIETDKCRLCHQTTETIDHITGGCSFLANKEYTYRHNDVAKYIHQQLALKYKLLTNYTPYYTYKPNNVLENSTAKLYWDRDIITDRTILSNRPDITLILKHTNTTYLIDVAVSNTHNLQQKHAEKIQKYIPLADEIKQMWHQEQVKIIPIIISSTGVIPKTLKQALHTLQLPANTYIPLQKSVILNTCSIVRRFLNPTLLPLQTQDAPNPQTQRGTSNTQH

SEQ ID NO: 1363 - protein, 1271 aa, Conopomorpha cramerella
MTRFFRTHSPLDLSCQQIRDLKYLDNNNNNNNDSTQSTLIYQNTNNSVDTNTHSHHSHTTHPTRSVLQEMLPATTLAGKSRQRMKWTEDINRQLLRCYYIVTHGETDLTAYRPLLHRKFTEIFPELCHLPEQRLADQIRVIHKNNRIPIDERETIKQSVLHSLYNIEQTQVLEEQFSIANTDSNNTSVSMNSLANVESLNHNTTVHTTPVSQVVNMEYDLLQPSCTPLVERNETDTSINIKLEETFIEQITKYNGTDPNLRPIIPKLRTTRYMIKLVNEINVIVGQYIRNISNPMLEDIHLAIYCAALTVTINLPNGKKIENSATNRNNNTTRKNRDTTSTNQQQNNKKQPFWERRITNRINTLRKEIGQFTQYLKGNLSSKNQHKLNPHNYNQTEIIDNLDLKKQKLKSLSKRLRRYKISNKRKTDNILFNNNQKIFYRKLNADHISITQPPDNIELKQFWESIWSTSVDHEIHTPWVQIEEQEMQDIEPMDGIVIMEEDVTKAIKHALNWKAPGPDKIQNYWIKYLTSTHKHLANSFNHILLYPHDTPLFLTEGTTYLKPKDTDTTNPSKYRPITCLSTTYKLLTSIIANKLTTHITNNSIIPEEQKGCCKGSRGCKEQLVIDTEIHNQVKIKQRNLHYSYIDYRKAFDSVPHSWLLHILQIYKIDNIIIDFLRHTMTNWTTKLNITTDKTTLTTTHIKITRGIFQGDSLSPLWFCLALNPLSRILNKTGLGHIIDRENNTKLTHLLYMDDIKLYAANRQELDTLLQLTEQFSSDIKMSFGTDKCKINSIVKGRHKETIPYHLNIQRGTIDSMEPREAYKYLGYLQKTTINHTETKNTLKIKYKQRLNQILKTQLSARNKTKAINTYAIPILTYSFGIIRWSDTELEALNITTRSMCNKHNIHHIHSAVQRFTLNRKLGGRGVIDIKNLHYKQVDNLRSYFLRKAEESPLHKAIVNMTHTVNTPLQLNNTQYKPTDKIQTDEYKIEKWKSKALHGKYPHQLAQNHVDQTASCTWLTKGNLYAETEGFMVAIQDQMIKTRNYSKYILKESIETDKCRLCHQTTETIDHITGGCSFLANKEYTHRHNDVAKYIHQQLALKYKLLTAYAPYYTYKPNNVLENDTVKLYWDRDIITDRTILSNRPDITLTVKHTNTTYLIDVAIPNTHNLQHKHTEKIQKYIPLADEIKQMWHQEQVKIIPIIISSTGIIPKTLKSALHTLQLPENTYIPLQKTVILNTCSIVRRFLNPTSLPLQTQVAPNPQTQHGTSNIQH

SEQ ID NO: 1364 - protein, 1350 aa, Conopomorpha cramerella
MRLRNGRRLPQAGTSNGESRPELSSSGSPSCSGGDTVSQNSAQLSTVAEFDSQVVNTLSPTSSTHSLFRSPSSSRHSYSNYSSPSRSSTLSPLSVDVVHEASGSSPVPTTDSTHTTLRNQNTNNSVDTNTHSHHSHTTHPTRSVLQEMLPATTLAGKSRQRMKWTEDINQQLLRCYYIVTHGETDLTAYRPLLHRKFTETFPELSHLPEQRLADQIRVIHKNNRIPTAERDMIKQSVLHTLYNIEQSQVIEEQQIVNTDSHNASELINSRTNELNTDTEPVNIHVTPVSEPAINIEYDLSQSSCIPPIERSENDTLINSYLQEIFTEQIAKYDGTDPNLRPIIPKLRITRHMIKLVNEINIIVGQYIGLLSTPMLEDIHLGIYCAALTVTIFLATENKLEKSATHRNANITHKKHETTSTKQQQNSRKQPFWEQRIANRITALRKEIGQMTQYLKGNLEPKKQHKLNLHNYNHTEMIDQLDLKKQKLQSLSKRLRRYKISNKRRTDNILFSSNQKIFYRKLNSDHITVTQPPDTIDLKQFWESMWSASVEHEIHAPWVEIEQQEMMNIELMESTVINKEDVTNAIKQTLNWKAPGPDKIQNYWIKYLTSTHQYLANSFNHILLHPQDTPLFLTEGKTYLKPKDADTTNPSKYRPITCLSTTYKLLTSIIANKLTSHITHNSIIPEEQKGCCKGSRGCKEQLVIDTEVHNQVKIKQRNLHYSYIDYRKAFDSVPHSWLLQILQIYKIDNTIIDFLRHTMTNWTTKLNITTVKTTLTTTNIKISRGIFQGDSLSPLWFCLALNPLSRILNKTGLGHVIDRVHNTKLTHLLYMDDIKLYAANRQELDTLLQLTEQFSSDIKMNFGTDKCKINSIVKGRHKETTPYDLRTQGGCIDSMEPREAYKYLGYLQNTTINHTEIKNTLKNKYKQRLTQILKTQLSARNKTKAINTYAIPILTYSFGVIRWSDTELEALNTTTRTMCNKYNIHHIHSAVQRFILNRKMGGRGFTDIKNLHYRQVDNLRSYFLTKAEESPLHKAIVNMTQTNNTPLQLNNTQYKPTDKIQTDEYKIEKWKSKALHGKYPHQLAQNHVDQTASCTWLTKGNIFAETEGFMIAIQDQIIKTRNYSKYILKENIETDKCRLCHQTTETIDHITGGCSFLANKEYTHRHNDVAKYIHQQLALKYKLLTNCTPYYTYKPNNVLENSTAKLYWDRDIITDRTILSNRPDITLILKHTNTTYLIDVAVPNTHNLQQKHAEKIQKYIPLADEIKQMWHQEQVKIIPIIISSTGVIPKTLKQALHTLQLPANTYIPLQKSVILNTCSIVRRFLNPTSLPLQTQDAPNPQTQRGTSNTQH

SEQ ID NO: 1365 - protein, 1296 aa, Blastobasis adustella
MRRSIRIKNKNAAQPTTVAATSSSSPTRNSTASSPISSTRSIFQSPSSSPHSYQHHYGSSSRSITVSPVSFDVAHDAFANSHVPTVDITNPTLISHTNSLNCVDHNTQTSLTITNTPGRSVLQEMLPATTIAGKSRQRMKWTNEINIELLRCYYIVTICETDLTAWRPLLRQNFIEQFPELSHLTEQRLSDQIRVIHRNNRIPALERERLKQSVSTTLTNNPIDESVNNVREPHISNTPTQYDIEQTITTPTQSIPYTQQTPNDKETHQSNTPIQVTQQTQDTETGPVTEPIDYEQIENIFTEMLIKYSGTDPTLRPTIPKQQTTRKFIKTVNIVNDIVEKHLQNKEAVSLEVIHEIIYCAAMTVTTLHVKKPKKVVENAPPTSNTIKVKQNKPHWELRLENKINLLRKSIGQLTQYLNGNLTQKKQQRLNPNNKCSQEMVDQLDKNKQKLQAQAKRLSRYKKSNRRKSDNILFNTNQKVFYQKLNSENITVTQYPEVTDVQNYWENIWSVPVQHNEHSSWAEAEAQEMETINPMPEITIDRDDVTQAIKRTLNWKAPGPDKIQNYWIKYLTSTHTHIANALNHVIHNPQDMPTFITQGITYLEPKDNETTNPAKYRPITCLPTIYKLLTSIISHKINSHISINKIIPEEQKGCNKGSMGCKEQLIIDAEIHNQVKQKRRNLYFSYIDYQKAFDSVPHSWLLHVLKMYKLDNSLIQFLQHTMTTWTTKLNLRTNNTTLTTAPIKIARGIFQGDSLSPLWFCLALNPLSRILNNTPYGYTIDRENSIKITHLLYMDDIKLYASNKQELDRLLKLTEKFSTDIKMTFGTNKCKINSITKGQHSRTDPFELEIQGGIINSMEPRDTYKYLGYQQSTSINHTDLKNALKTKYKQRLNQILSTQLSARNKVKAVNTYAIPILTYSFGIIKWSDTELNALNTLTRTTSNKHNIHHIHSAVQRFTLKRKLGGRGFIDIKNLHYSQIGNLRSYFIRKSHDSTLHKAIVSLPHPGTPLQLNNNLFDPTTKIIRDEQKIQTWKEKALHGKYPHQLEQDYIDRTASSTWLTKGNIFGETEGFLVAIQDQTIKTRNYSKYILKEQIETDKCRLCHQHTENIDHITGGCSILANKEYTHRHDNVAKHIHQQLALKHKLIETLTPYYTYKPKNVLENDKAKLYWDRDITLTLKSTKTTYLIDISVPNTHNLKQKHAEKIQKYIPLADEIKQMWHQDAVRVIPIVISSTGVIPKALHAALKILDLHEKIYIPLQKSIVIDTCSIVRRFLNPTSLTLHNIPDTTDTQNTRIT

SEQ ID NO: 1366 - protein, 1373 aa, Emesis liodes
MRLRNRKLPQAGTHLGESRPEPSGSGCPTYSGGGNVSLMPAQSNAVADNNPSPTHNSRSSSPISSTHSLFQSPSSSPHSFQLQYATSSRSTTISPMSCDVAQEALANSLVPTPDITNPTLTLQTNLENGVDHITHPPSPNINTPARSVLQEMLPATTLAGKSRQRMKWTKEINTELLRSYYIVTACETDLTAWRPRLHQNFISKIPELHHITEQRLSDQIRVIHRNNRIPAHEREYIKQSISTTLSTTSNYSVLNTPVSEDQNISNTPVHTSHIQISISDAAPLTPNTQDTLDTQLTNTLTPQPIEYSEHIQTHNTEPTNKPVEPINYELIENTFTEMLIKYTGTDPTLRPTIPKQQVDRKFIKTINTLNEVVEKYLQNEDLIKFEGIHEVIYCAAITVTKLHTKTAGKILEKTTHLTHKRTCTQSKPQWQKRIENKITALRKEIGQLTQYINGNLTQKKQQKINPKNKSRQEMIEQLDTNKQKLQAQAKRLNRYKKSNQRKSDNILFNNNQKIFFQKLNSDIKTVTEHPDVSEIQNYWESIWSKPVQHNTHAPWTEIEEQEMDKICPMPEITIVKDDVTQAIKKTLNWKAPGPDKIHNYWIKYLTSTHEYIAHALNHLIQNPQDVPPFLTQGVTYLKPKDNNDTTNPTKYRPITCLPTMYKLLTSIIAHKINTHISINAIIPEEQKGCSKGSKGCKEQLIIDAEINNQIKQKHRNLHYSYIDYQKAFDSVPHSWLIHVLKIYKIDNILIQFLQHTMSKWTTKLNLKTNTTILSTSPIKIARGIFQGDSLSPLWFCLALNPLSRILNNTTYGYIIDRDNNIKLTHLLYMDDIKLYAGNKQELDHLLRLTERFSTDIKMTFGTDKCKINSIIKGQQSRTDPFNLELQGGTIVSMEPRESYKYLGYLQTTSINHTDIKNILKTKYKQRLNKILSTQLSARNKVKAVNTYAIPILTYSFGVIKWSDTELSALNTTTRTTSHKHNIHHIHSAVQRFTLKRKLGGRGFIDIKNLHYTQIDNLRSYFIRKANDSPLHKAIVNLPHSGTPLQFNNNQFDPKSKILRDEQKIENWKNKALHGKYPHQLEQDHIDYTASSTWLTQGNIFGETEGFLVAIQDQVIKTRNYSKYILKEAIETDKCRLCHQYTEHIDHITGGCTVLANKEYTHRHDNVAKHIHQQLALKHKLLEVHTPYYKYKPKNVLENNKVKLYWDRDIVTDRTILSNRPDITLTIKSTKTTYIIDIAVPNTHNLKQKYTEKLQKYIPLADEIKQMWHQETVRIIPIVISSTGVIPKTLHTAIKILDLHEKTYIPLQKSIVIDTCSIVRRFLNPTTLTLQSNQDTATTLTSSHTHNIRHTSQEIRADTHTAQNIQNLVTLSSY

SEQ ID NO: 1367 - protein, 1331 aa, Celastrina argiolus
MRLRNRNIPQAGTGATSNGESRPGPSGLGCPSYSGGDTVSPLPAQSSTAADTIFITTSNTYSYPTSPTSSISLFSSLQSSPKSYMLDNNSPSSRSTTLSPMSDDVTREANATYPVPIPDITPSTSTLQNNQLHPVDHNIQQSHIINTPARSVLQDMLPATTLAGKCRQRMKWTDQINRELLRCYYIVTSCESNLTAFRPLLHKKIVESFPELSHLSEQRLADQIRVIHRNNRIAPHVREQIKQSVAESVQSFDEHNNQNNIQSISIQLSTCDIQTNHLCSTEISPPHYSTSSSSNQTNTLSNTPDTTEDTITRGTNTINNPPTNSDSIETEKIENVFKEMLIKYTGTDPTLRPVIPKLQVTRNIIKTVNLLNDVIGKYLEEKEVPCLDEIQSALYCAALTTATLHTKIINPSEENETRKTIYQNNPKWQTRIENRIQQLRKEIGKLTQYLNGKLNQKKQQKINPNNLTKSQLLDHLDNLKQKLQAQSKRLRRLKISNARRRDNMLFSTNQRKFYQNINSENIKIIQPPDINEVKDYWEKLWSKPVQHNTDSSWIHSEIQNHQSINQMPDITVDKDDVTIAIKKTLNWKAPGPDKIQNYWLKYFPAAHHHIANIFNSFIQNPQSIPSFMTQGITYLKPKDKNDTKNPTKYRPITCLPTLYKLFTSIITRKLNIHITENKIIPEEQKGCTKGSMGCKEQLVIDAEIHNQAKKSRKDLYFAYIDYQKAFDSVPHSWLIQVLEIYQVNNKLIQLLQYLMSTWSTQLNLRTINNNFCTSPIKIKRGIFQGDSLSPLWFCLALNPLSKILNNACYGFTIDKVNNIKLSHLLYMDDIKLYAKDRQQLEQLLNLTERFSTDIRMSFGIDKCKINCVIKGQHQQINPHNLELQEDIIDSLEAKDTYKYLGYIQNTTINHKDVKNTLKSKYKQRLNKTLKTNLSGRNKIKAINTYAIPILTYSFGIIKWSDTELEALNIATRTASYKHNIHHIHSALERFTLKRKLGGRGCIDIKNLCYNQIENLKTYFQTKAHTSNLHKALINLTQSGTPLQLNNRQFNPKDKIVKDSDKIAKWKGKALHGKFPNQLEQDHIDQVASFSWLTRGNIYSETEGFLVAIQDQIIKTRNYTKYILKENIDTDKCRLCHQTTETIDHITGGCSSLANKEYTHRHDNVAKHIHQLLAIKYKLIDNHTPYYKYKPCNVLENNNAKLYWDREIVTDRTILSNRPDITLTIKSEKITYLVDIAVPNTNNLKQKHNETIQKYIPLADEIKQMWRQETVKIIPVIISSTAVIPKTLTAALKSLDLNKNTYIQMQKSIVIDTCSLVRRFLNPSSSFSTPQS

SEQ ID NO: 1368 - protein, 1326 aa, Cyclargus thomasi
MRLRNRNIPQAGTGAKSNGESRPGPSGPGSPSYSGGDNVSHRSAQTNTVADKVITTTINSHSYPISPTSSNSLFSSPQSSPKSYMTDINSSISRSTTLSPMSEDASREANANNPVPISDITSSTSLLENNEHQPVDHNVSQPHLTNTPARSVLQEMLPATTLAGKRRQRMKWTDLINRELLRCYYIVTSCESNLTAFRPLLHQKFIETFPELSHISEQRLSDQIRVIHKNNRLSSQVRDQIKQSVAESVQIDTPLNLQVPVLNQTTCNIQIDYQSLVTVPFLQQPSNSLSSQELNTSPQITDTIEHTIALDTEPSNRLPTYTNSEETQEIKNVFKEMLIKYIDTDPTLRPTIPKLQVTHNIIKTVNQLNFIIGKHLDESETLCLEDIQTAIYCAAMTATTLHCKITKATKETDTRKTIENNSPQWQRRIENRVKQIRKEIGQVTQYLNGNLSLRKQQKLNSRNLTKTQMIDLLDNLKQKLQAQSKRLRRLKISNARKKDNSLFTTNQKIFYQKLNAENIIVKEPPDIKAVKNYWETLWSKPVQHNINSSWIDTEIEDNQDICPMPDIIVDRSDVTYAIKRTLNWKAPGPDKIQNYWLKYFTSTHGHIANIYNSFIQDPQTIPPFMTQGITYLKAKDKNNTTDPTKYRPITCLPTLYKLLTSIITHKLNAHLLQNKIISDEQKGCTKGSMGCKEQLVIDAEIHNQAKQNHKNMYFAFIDYQKAFDSVPHSWLIKVLEIYQVNNKLINFLKYLMSTWSTKLHLNTADSTLSTSRIKIKRGIFQGDSLSPLWFCLALNPLSKILCKSGHGYTIDKVSNIKVSHLLYMDDIKIYASDRQQLDHLLKLIEIFSADIKMKFGTDKCKINCLIKGKHQQTSPYNLESQEDAIDSMQAKDTYKYLGYIQNTEINHKEIKNILKTKYKQRLIQILHTQLSGRNKIKAINTYAIPILTYSFGIIKWSDTELEALNTTTRTTSYKHNIHHIHSAVERFTLKRELGGRGCIDIKNLCYRQIENLRTYFKTKARNSNLHNAIVNFTHSGTPLQLNNEQFNPKSKIIIDCDKIVKWKSKALHGKFPHQLEQDHIDRAASSSWLTKGNIYSETEGFLIAIQDQIIKTRNYTKYILKENIDTDKCRLCHQTTETIDHITGGCNSLANKEYTHRHDNVAKHVHQLLAIKYKLIDTHTPYYKYKPCSVLENSVAKLYWDRDIITDRTILSNRPDITLTIKAEKTTYLIDIAVPNTNNLKQKHNEKIQKYIPLADEIKQMWHQETVKIIPIILSSTGVIPKTLAVALKSLDLNKNTYIHMQKSVVIDTCSIVRRFLNSSSSFTPL

SEQ ID NO: 1369 - protein, 1328 aa, Cyaniris semiargus
MRLRNRNISQAGTGAESNGESRPGPSGSGSPSYSGGDTAPHTSVQSNTVTDNIVPRTSTIQSYPSSPTSSISLFSSPHSSPKSYMINTNSSSSRSHSLSPMSEDVTQEAPATYPVSTSDNTPSTSTLQNNVPYPVDYNIPQTHLSNTPARSVLQDMLPPTTLAGKCRQRMKWTDLINKELLRCYYIVTSCETNLTSFRPLLHQKFIQSFPELSHISEQRLADQIRVIHRNNRIPAHVREQIKQSISETLEESISQNDMQDTTTQTSITYNIQTNSQPLADYSLSGHTTIISHPPLTLQTPSDTIEHVNTLDSDETIPPRDLNPTQNQEIEDIFKEMLIKYTGTDPSLRPIIPKLQVTRSIIKTVNVLNNIIGKHLEEKAMPDIDEIQTTIYCAALTTTALHTTSKLIKPSAKNETLKTTDNIPKWQVRIKNRIQKLRKEIGQLTQYLNGNLNAKKRQKINPKNYTTDQLVDQLDNLKQKLQAHSKRLRRLKISNDRRRHNILFLNNQKVFYQNLNSENIKIIQPPNIDEVKTYWESTWSKPAQHNERASWIDTETYEQQNINIMPEIILNKEDVTNAIKKTLNWKAPGPDQIHNYWIKYFSATHHYIADIFNSLIENPQTIPAFFTQGITYLKPKDNSDTTNPTKYRPITCLPTLYKLLTSIITQKLNNHIIQNKIIPEEQKGCAKGSMGCKEQVIIDTEIHNQVKQKHRNLYYAYIDYQKAFDSVPHSWLIHVLKIYKVDIKLINFLQFIMSTWSTRLTLRTSKSNLCTSPIKIKRGIFQGDSLSPLWFCIALNPLSKILNKSCDGYTLDKLNNTKVTHLLYMDDLKIYANDRQQLEHLLKITEKFSTDIGMRFGIEKCKINCINKGVHTQIEPLNLEFQEGMIDSMQAIDTYKYLGYIQSITINHKEIKNTLKSKYKQRLNKILATQLSGRNKIKAINTYAIPILTYSFGIIKWTDTELETLNTTTRMLCYKRNIHHIHSAVERFTLKRKLGGRGIIDIKNLHYNQIDNLRTYFLNKAKTSQLHKAVVSLPHKGTPLQLNNDLFNAKHKIVTDDDKIQKWKSKALHGKYPHHLEQDHVDQMASCSWLTKGNIYSETEGFLIAIQDQIIKTRNYSKYILKESIATDKCRLCHLTTETIDHITGGCTTLANKEYTHRHDNAAKHIHQLLAIKYKLIDSQTPYYRYKPRNVLENSTVRLYWDRDIVTDRTILSNRPDITLTIKPEKTTYLIDIAVPNTSNLKQRHNEKIQKYIPLADEIRQMWHQEVVKIIPIIISSTGVIPKTLAASLKTLDLHKNTYIQMQKSIIIDTCSLVRRFLNPSSSFPMNES

SEQ ID NO: 1370 - protein, 1331 aa, Glaucopsyche alexis
MRLRNRNIPQAGTGAKSNGESRPGPSGPGCSSYSGGSNVSPLPAQSRTAADNILPTTSNTYSYPTSPTSSISLFPSSHSSPKSYMFDNNSLSSRSTTSSPMSDVVTREAIANYSVSIPGITPSTNTFQNNNLNLVDHNILTLPHLNNTPVKSVLQDMLPPTTLAGKNRQRMKWTDQINRELLRCYYIVTSCESNLTAFRPLLHQKFVETYPELSHISEQRLADQIRVIHRNNRIAPHVREEIKQSVAEIETLDESNGQINIQDTVLQLSTCNIQTDHQSYADNLSPHRSYISPSPQLNTLPNSSYTTEHAITLETITTNSTPRNPNSIETQKIENIFMEMLIKYSDTDPTLRPIIPKLQVTRNVIKTVNLLNDFIGKYFEEKGIPCLDEIQNAIYCGAMTTATLHTKIINRSEEKETRKTIDQSKPKWQIRIENRIKQLRKEIGQLTQYLNGNLNPKKHKKINPNLLTKSQLLDHLDNLKQKLQAQCKRLRRLKISNTRRKDNMLFSNNQKIFYQNLNSENIKITQPPDINEVKGYWENLWSKPVQHNNNSSWIDAVKQDYQSINQMPDIIVDKDDVTFATKRTFNWKAPGPDKIQNYWLKYFTATHPHIANIFNSFIQNPQTIPSFMTQGITYLKPKDKNDTSNPTKYRPITCLPTLYKLFTSIITQKLNTHIIQNEIIPEEQKGCTKGSMGCKEQLVIDAEIHNQAKKKRKNLYFAYIDYQKAFDSVPHSWLIQVLQIYQVNNKLIQLLQYLMSTWSTKLNLRTSDNTLSTSTIKIKRGIFQGDSLSPLWFCLALNPLTNILNKSCHGYTIDKVNNIKLTHLLYMDDIKLYATDRQQLEHLLKLTERFSTDIKMTFGIDKCKINCLIKGQHQQINPHNLELQENIIDSMQAKDTYKYLGYRQNTAIDHKSIKITLKSQYKQRLNKILSTQLSGRNKIKAINTYAIPILTYSFGIIKWSDTELEALNITTRAASYKHNIHHIHSAVERFTLKRKLGGRGCIDIKNLCYNQIKNLRTYFQTKSHTSHLHQALLSLTHSGTPLQLNNSHFDPKHKIIKDSEKIVKWKSKALHGKFPHQIEQDHINQAASFSWLTRGNIYSETEGFLVAIQDQIIKTRNYSKYILKENIDTDKCRLCHQTTETIDHITGGCSSLASKEYTHRHDNVAKHIHQLLALKYKLIDIHTPYYKYKPCSVLENSTAKLYWDRGIVTDRTILSNRPDITLTIKSEKITYLIDIAVPNTNNLKQKHSEKIQKYITLADEIKQMWRQETVKIIPIIISSTGVIPKTLTAALKLLDLNKNTYIPIQKSIVIDTCSIVRRFLNPSSSFTPPQS

SEQ ID NO: 1371 - protein, 1329 aa, Celastrina argiolus
MRLRNRNIPQAGTGATSDGESRPGPSGSGCPSYSGGGTVSPLPAQSSTAADNIFTTTSNTYSYPISVSPTSSTSLFSSPHSSPKSYMLDNNSTSSRSTTLSPMSDVDTREAFANYPVSIPDIIPSTSSYQNNNQHLVEHNTPIQSHFINTPVRSVLQDMLPPTTLAGKSRQRMKWTAQINRELLRCYYIVTSCESNLTAFRPLLHKKFLETFPELCHISEQRLADQIRVIHRNNRIAAAEREQIKQSVHLQSQPLIDSSVLHTISLNIHPNHQSFIDDQYSQNSSISHSHQPNTLTSVSSTTEHNIIIMETNEGNSPITNPGSAETQKVENVFKEMLIKYTDTDPTLRPIIPKLQVTRKIIKTVNLLNDILQKYLEEKGVPCLDDIQCAMYCAALTTTTLHSKIIKESSQNKERSKTVDQNNPKWQTRIENRITKLRKQIGQLTQYLKGNLTSRKQQKINPKKLTNNQLLDNLDNLKQKLQAQCKRLRRLKISNSRRRDNILFSTNQKVFYQKLNSENIKITQPPDINEVQNYWENLWSKAGQHNTNSPWINTETQDCQNLSPMPEIIVDKDDVTYAVKKTHNWKAPGPDKLQNYWIKYFTATHDHIAKIFNSFIQDPQIIPSYFAQGITYLKPKDKNDTTNPTKYRPITCLPTLYKLLTAIITQKLNTHITQNKIIPEEQKGSTKGSMGCKEQLVIDAEIHNQVRQNRKNLYYSYIDYQKAFDSVPHSWLIQVLKIYKVNDKLVQFLQNIMCIWSTKLNLRTTDTTLCTSPIKINRGIFQGDSLSPLWFCLALNPLSKILNKSSHGYTIDKHNNIKITHLLYMDDIKLYATDRSQLEHLLKVTERFSTDIEMTFGTDKCKINCMIKGQHQQTDSYNLQLQGGIIDSMQTKDSYKYLGYMQSTGINHKDIKNTLKSNYKQRLNKVLCTQLSGRNKIKAINSYAIPILTYSFGIIKWSDTELEALNIATRTASYKHNIHHIHSAVERFTLKRKNGGRGMIDIKNLHYSQINNLRTYFNTKSHTSQLHKAITNMTHSGTPLQLNNCQFNAKQKIIEDSDKIVKWKSKALHGKFPNQLEQDHVDPIASLSWLTRGNIYSETEGFLIAIQDQIIKTRNYSKYILKENIDTDKCRLCHQTTETIDHITGGCSSLANKEYTHRHDNVAKHIHQLLATKYKLIDTHTPYYKYKPSNVLENSTAKLYWDRDIVTDRTILSNRPDITLTIKPEKITYLIDIAVPNTNNLKQKHNEKIQKYIPLADEIKQMWRQESVKIIPIIISSTGVIPKTLTAALKTIDLHKNTYIQMQKSIVIDTCSIVRRFLNPSSSFTNSSQS

SEQ ID NO: 1372 - protein, 1329 aa, Celastrina argiolus
MRLRNRNIPQAGTGATSDGESRPGPSGSGCPSYSGGGTVSPLPAQSSTAADNIFTTTSNTYSYPISVSPTSSTSLFSSPHSSPKSYMLDNNSTSSRSTTLSPMSDVDTREAFANYPVSIPDIIPSTSSYQNNNQHLVEHNTPIQSHFINTPVRSVLQDMLPPTTLAGKSRQRMKWTAQINRELLRCYYIVTSCESNLTAFRPLLHKKFLETFPELCHISEQRLADQIRVIHRNNRIAAAEREQIKQSVHLQSQPLIDSSVLHTISLNIHPNHQSFIDDQYSQNSSISHSHQPNTLTSVSSTTEHNIIIMETNEGNSPITNPGSAETQKVENVFKEMLIKYTDTDPTLRPIIPKLQVTRKIIKTVNLLNDILQKYLEEKGVPCLDDIQCAMYCAALTTTTLHSKIIKESSQNKERSKTVDQNNPKWQTRIENRITKLRKQIGQLTQYLKGNLTSRKQQKINPKKLTNNQLLDNLDNLKQKLQAQCKRLRRLKISNSRRRDNILFSTNQKVFYQKLNSENIKITQPPDINEVQNYWENLWSKAGQHNTNSPWINTETQDCQNLSPMPEIIVDKDDVTYAVKKTHNWKAPGPDKLQNYWIKYFTATHDHIAKIFNSFIQDPQIIPSYFAQGITYLKPKDKNDTTNPTKYRPITCLPTLYKLLTAIITQKLNTHITQNKIIPEEQKGSTKGSMGCKEQLVIDAEIHNQVRQNRKNLYYSYIDYQKAFDSVPHSWLIQVLKIYKVNDKLVQFLQNIMCIWSTKLNLRTTDTTLCTSPIKINRGIFQGDSLSPLWFCLALNPLSKILNKSSHGYTIDKHNNIKITHLLYMDDIKLYATDRSQLEHLLKVTERFSTDIEMTFGTDKCKINCMIKGQHQQTDSYNLQLQGGIIDSMQTKDSYKYLGYMQSTGINHKDIKNTLKSNYKQRLNKVLCTQLSGRNKIKAINSYAIPILTYSFGIIKWSDTELEALNIATRTASYKHNIHHIHSAVERFTLKRKNGGRGMIDIKNLHYSQINNLRTYFNTKSHTSQLHKAITNLTHSGTPLQLNNCQFNAKQKIIEDSDKIVKWKSKALHGKFPNQLEQDHVDPIASLSWLTRGNIYSETEGFLIAIQDQIIKTRNYSKYILKENIDTDKCRLCHQTTETIDHITGGCSSLANKEYTHRHDNVAKHIHQLLATKYKLIDTHTPYYKYKPSNVLENSTAKLYWDRDIVTDRTILSNRPDITLTIKPEKITYLIDIAVPNTNNLKQKHNEKIQKYIPLADEIKQMWRQESVKIIPIIISSTGVIPKTLTAALKTIDLHKNTYIQMQKSIVIDTCSIVRRFLNPSSSFTNSSQS

SEQ ID NO: 1373 - protein, 1021 aa, Celastrina argiolus
METNEGNSPITNPGSAETQKVENVFKEMLIKYTDTDPTLRPIIPKLQVTRKIIKTVNLLNDILQKYLEEKGVPCLDDIQCAMYCAALTTTTLHSKIIKESSQNKERSKTVDQNNPKWQTRIENRITKLRKQIGQLTQYLKGNLTSRKQQKINPKKLTNNQLLDNLDNLKQKLQAQCKRLRRLKISNSRRRDNILFSTNQKVFYQKLNSENIKITQPPDINEVQNYWENLWSKAGQHNTNSPWINTETQDCQNLSPMPEIIVDKDDVTYAVKKTHNWKAPGPDKLQNYWIKYFTATHDHIAKIFNSFIQDPQIIPSYFAQGITYLKPKDKNDTTNPTKYRPITCLPTLYKLLTAIITQKLNTHITQNKIIPEEQKGSTKGSMGCKEQLVIDAEIHNQARQNRKNLYYSYIDYQKAFDSVPHSWLIQVLKIYKVNDKLVQFLQNIMCIWSTKLNLRTTDTTLCTSPIKINRGIFQGDSLSPLWFCLALNPLSKILNKSSHGYTIDKHNNIKITHLLYMDDIKLYATDRSQLEHLLKVTERFSTDIEMTFGTDKCKINCMIKGQHQQTDSYNLQLQGGIIDSMQTKDSYKYLGYMQSTGINHKDIKNTLKSNYKQRLNKVLCTQLSGRNKIKAINSYAIPILTYSFGIIKWSDTELEALNIATRTASYKHNIHHIHSAVERFTLKRKNGGRGMIDIKNLHYSQINNLRTYFNTKSHTSQLHKAITNLTHSGTPLQLNNCQFNAKQKIIEDSDKIVKWKSKALHGKFPNQLEQDHVDPIASFSWLTRGNIYSETEGFLIAIQDQIIKTRNYSKYILKENIDTDKCRLCHQTTETIDHITGGCSSLANKEYTHRHDNVAKHIHQLLATKYKLIDTHTPYYKYKPSNVLENSTAKLYWDRDIVTDRTILSNRPDITLTIKPEKITYLIDIAVPNTNNLKQKHNEKIQKYIPLADEIKQMWRQESVKIIPIIISSTGVIPKTLTAALKTIDLHKNTYIQMQKSIVIDTCSIVRRFLNPSSSFTNSSQS

SEQ ID NO: 1374 - protein, 1331 aa, Glaucopsyche alexis
MRLRNRNIPQAGTGAKSNGESRPGPLGPGCSSYSGGSNVSPLPAQSRTAADNILPTTSNTYSYPTSPTSSISLFPSSHSSPKSYMFDNNSLSSRSTTSSPMSDVVTREAIANYSVSIPGITPSTNTFQNNNLNLVDHNILTLPHLNNTPVKSVLQDMLPPTTLAGKNRQRMKWTDQINRELLRCYYIVTSCESNLTAFRPLLHQKFVETYPELSHISEQRLADQIRVIHRNNRIAPHVREEIKQSVAEIETLDESNGQINIQDTVLQLSTCNIQTDHQYYADNLSPHRSYISPSPQLNTLPNSPYTTEHAITLETITTNSTPRNPNLIETQKIENIFKEMLIKYSDTDPTLRPIIPKLQVTRNVIKTVNLLNDFIGKYFEEKGIPCLDEIQNAIYCGAMTTATLHTKIINRSEEKETRKTIDQSKPKWQIRIENRIKQLRKEIGQLTQYLNGNLNPKKHKKINPNLLTKSQLLDHLDNLKQKLQAQCKRLRRLKISNTRRKDNILFSNNQKIFYQNLNSENIKITQPPDINEVKGYWENLWSKPVQHNNNSSWIDAVKQDYQSINQMPDIIVDKDDVTFATKRTFNWKAPGPDKIQNYWLKYFTATHPHIAKIFNSFIQNPQTIPSFMTQGITYLKPKDKNDTSNPTKYRPITCLPTLYKLFTSIITQKLNTHIIQNEIIPEEQKGCTKGSMGCKEQLVIDAEIHNQAKKKRKNLYFAYIDYQKAFDSVPHSWLIQVLQIYQVNNKLIQLLQYLMSTWSTKLNLRTSDNTLSTSTIKIKRGIFQGDSLSPLWFCLALNPLTNILNKSCHGYTIDKVNNIKLTHLLYMDDIKLYATDRQQLEHLLELTERFSTDIKMTFGIDKCKINCLIKGQHQQINPHNLELQENIIDSMQAKDTYKYLGYRQNTAIDHKSIKITLKSQYKQRLNKILSTQLSGRNKIKAINTYAIPILTYSFGIIKWSDTELEALNITTRAASYKHNIHHIHSAVERFTLKRKLGGRGCIDIKNLCYNQIKNLRTYFQTKSHTSHLHQALLSLTHSGTPLQLNNSHFDPKHKIIKDSEKIVKWKSKALHGKFPHQIEQDHINQAASFSWLTRGNIYSETEGFLVAIQDQIIKTRNYSKYILKENIDTDKCRLCHQTTETIDHITGGCSSLASKEYTHRHDNVAKHIHQLLALKYKLIDIHTPYYKYKPCSVLENSTAKLYWDRGIVTDRTILSNRPDITLTIKSEKITYLIDIAVPNTNNLKQKHSEKIQKYITLADEIKQMWRQETVKIIPIIISSTGVIPNTLTAALKVLDLNKNTYIPIQKSIVIDTCSIVRRFLNPSSSFTPPQS

SEQ ID NO: 1375 - protein, 992 aa, Aricia agestis
MLIKYTDTDPILRPTIPKLQVTRNVIKTVNQLNNIIGKHLDEKDAICLEEIQTTIYCAAMTTTILHSKITKPTKENETRKSIDNYNPKWQGRIESRIQQLRKEIGQLTQYLNGNLSLRKQQKINPRNLTKTQLLDLLDKLKQKLQAQSKRLRRLKISNARRKENNLFTTNQKIFFQKLNSENIIIKDPPDIKEVKNYWENLWSKPVQHNINSSWINTETNDNQDICPMSDITVDRDDVTFAIKKTLNWKAPGPDKIQNYWLKYFTTTHSHIANIFNSFIQDPQSIPSFMTQGITYLKAKDKDNTSDPTKYRPITCLPTLYKLLTSIITQKLNLHITQNKIIPEEQKGCTKGSMGCKEQLVIDAEIHNQAKQNHKNLYFAYIDYQKAFDSVPHSWLLHVLEIYQVNNRLIQLLKYLMSTWTTELHLKTTSTTLSTSTIKIKRGIFQGDSLSPLWFCLALNPLSKILNKSGHGYTIDKVSNTKLTHLLYMDDIKIYASDRQQLNHLLKLTEIFSTDIKMRFGIDKCKINCLIKGRHQQTSPYNLELQEDAIDSMQANDTYKYLGYIQNTAINYKEIKNILKTKYKQRLNKLLHTQLSGRNKIKAINTYAIPILTYSFGIIKWSDTELEALNTATRIASYKHNIHHIHSAVERFTLKRKLGGRGCIDIKNLCYRQIENLRSYFKTKAQISHLHNALINLTHSGTPLQLNNGQFDPTHKIIKDSDKIVKWKSKALHGKFPHLLEQDHIDQVASFSWLTKGNIYSETEGFLVAIQDQIIKTRNYSKYILKDNIDTDKCRLCHQTTETIDHITGGCNSLANKEYTHRHDNVAKYIHQLLAIKFNLIDIHTPYYKYKPCSVLENNIAKLYWDRDIITDRTILSNRPDITLTIKAEKNTYLIDIAVPNTNNLKQKHNEKIQKYIPLADEIKQMWHQESVKIIPIILSSTGVIPKTLAAALKSLDLHKNTYIHIQKSVVIDTCSIVRRFLNPSSSFTSSQS

SEQ ID NO: 1376 - protein, 1328 aa, Aricia agestis
MRLRNRNIPQAGTGAKSNGESRPGPSGPGCPSYSGGDTVSHLSAQSNTAADKVVTTTINSHSYATSPTSSISLFSTPQSSPKSYMIDINSSISRSTTLSPMSNDATREANATHPVPISDITPSTSFLENNILHSVDHNISQNHLTNTPARSVLQEILPATTLAGKCRQRMKWTDLINRELLRCYYIVTSCESNLTAFRPLLRQKFIETFPELSHISEQRLSDQIRVIHKNNRLSVQVREQIKQSVAEIAQIEASNDTQEPVLNQSTYNIQANCLSPMDIPSQQMPSTLSPHQLNTPPNFIDTIEHTITLHTEPTNGPPTYPNNSREIQETENLFEEMLIKYTDTDPTLRPTIPKLQITRNVIKTVNQLNNIIGKHLDEKDAICLEEIQTTIYCAAMTTTILHSKITKPTKENETRKSIDNYNPKWRGRIESRIQQLRKEIGQLTQYLNGNLSLRKQQKINPRNLTKTQLLDLLDKLKQKLQAQSKRLRRLKISNARRKENNLFTTNQKIFFQKLNSENIIIEDPPDIKEVKNYWENLWSKPVQHNINSSWINTETNDNQDICPMSDITVDRDDVTFAIKKTLNWKAPGPDKIQNYWLKYFTTTHSHIANIFNSFIQDPQSIPSFMTQGITYLKAKDKDNTSDPTKYRPITCLPTLYKLLTSIITQKLNLHITQNKIIPEEQKGCTKGSMGCKEQLVIDAEVHNQAKQNHKNLYFAYIDYQKAFDSVPHSWLLHVLEIYQVNNRLIQLLKYLMSTWSTELHLKTTSTTLSTSTIKIKRGIFQGDSLSPLWFCLALNPLSKILNKSGHGYIIDKVSNTKLTHLLYMDDIKIYASDRQQLNHLLKLTEIFSTDIKMRFGIDKCKINCLKKGRHQQTSPYNLELQEDAIDSMQANDTYKYLGYIQNTAINYKEIKNILKTKYKQRLNKILHTQLSGRNKIKAINTYAIPILTYSFGIIKWSDTELEALNTATRIASYKHNIHHIHSAVERFTLKRKLGGRGCIDIKNLCYRQIENLRSYFKTKAQISHLHNALINLTHSGTPLQLNNGQFDPTHKIIKDSDKIVKWKSKALHGKFPHLLEQDHIDQVASFSWLTKGNIYSETEGFLVAIQDQIIKTRNYSKYILKDNIDTDKCRLCHQTTETIDHITGGCNSLANKEYTHRHDNVAKYIHQLLAIKFNLIDIHTPYYKYKPCSVLENNIAKLYWDRDIITDRTILSNRPDITLTIKAEKTTYLIDIAVPNTNNLKQKHNEKIQKYIPLADEIKQMWHQESVKIIPIILSSTGVIPKTLAAALKSLDLHKNTYIHIQKSVVIDTCSIVRRFLNPSSSFTSSQS

SEQ ID NO: 1377 - protein, 1331 aa, Glaucopsyche alexis
MRLRNRNIPQAGTGAKSNGESRPGPSGPGCSSYSGGSNVSPLPAQSRTAADNILPTTSNTYSYPTSPTSSISLFPSSHSSPKSYMFDNNSLSSRSTTSSPMSDVVTREAIANYSVSIPGITPSTNTFQNNNLNLVNHNILTLPHLNNTPVKSVLQDMLPPTTLAGKNRQRMKWTDQINRELLRCYYIVTSCESNLTAFRPLLHQKFVETYPELSHISEQRLADQIRVIHRNNRIAPHVREEIKQSVAEIETLDESNGQINIQDTVLQLSTCNIQTDHQYYADNLSPHRSYISPSPQLNTLPNSPYTTEHAITLETITTNSTPRNPNLIETQKIENIFKEMLIKYSDTDPTLRPIIPKLQVTRNVIKTVNLLNDFIGKYFEEKGIPCLDEIQNAIYCGAMTTATLHTKIINRSEEKETRKTIDQSKPKWQIRIENRIKQLRKEIGQLTQYLNGNLNPKKHKKINPNLLTKSQLLDHLDNLKQKLQAQCKRLRRLKISNTRRKDNILFSNNQKIFYQNLNSENIKITQPPDINEVKGYWENLWSKPVQHNNNSSWIDAVKQDYQSINQMPDIIVDKDDVTFATKRTFNWKAPGPDKIQNYWLKYFTATHPHIANIFNSFIQNPQTIPSFMTQGITYLKPKDKYDTSNPTKYRPITCLPTLYKLFTSIITQKLNTHIIQNEIIPEEQKGCTKGSMGCKEQLVIDAEIHNQAKKKRKNLYFAYIDYQKAFDSVPHSWLIQVLQIYQVNNKLIQLLQYLMSTWSTKLNLRTSDNTLSTSTIKIKRGIFQGDSLSPLWFCLALNPLTNILNKSCHGYTIDKVNNIKLTHLLYMDDIKLYATDRQQLEHLLELTERFSTDIKMTFGIDKCKINCLIKGQHQQINPHNLELQENIIDSMQAKDTYKYLGYRQNTAIDHKSIKITLKSQYKQRLNKILSTQLSGRNKIKAINTYAIPILTYSFGIIKWSDTELEALNITTRAASYKHNIHHIHSAVERFTLKRKLGGRGCIDIKNLCYNQIKNLRTYFQTKSHTSHLHQALLSLTHSGTPLQLNNSHFDPKHKIIKDSEKIVKWKSKALHGKFPHQIEQDHINQAASFSWLTRGNIYSETEGFLVAIQDQIIKTRNYSKYILKENIDTDKCRLCHQTTETIDHITGGCSSLASKEYTHRHDNVAKHIHQLLALKYKLIDIHTPYYKYKPCSVLENSTAKLYWDRGIVTDRTILSNRPDITLTIKSEKITYLIDIAVPNTNNLKQKHSEKIQKYITLADEIKQMWRQETVKIIPIIISSTGVIPKTLTAALKVLDLNKNTYIPIQKSIVIDTCSIVRRFLNPSSSFTPPQS

SEQ ID NO: 1378 - protein, 992 aa, Celastrina argiolus
MLIKYTGTDPTLRPVIPKLQVTRNIIKTVNLLNDVIGKYLEEKEVPCLDEIQSALYCAALTTATLHTKIINPSEENETRKTIYQNNPKWQTRIENRIQQLRKEIGKLTQYLNGKLNQKKQQKINPNNLTKSKLLDHLDNLKQKLQAQSKRLRRLKISNARRRDNMLFSTNQRKFYQNINSENIKIIQPPDINEVKDYWEKLWSKPVQHNTDSSWIHSEIQNHQSINQMPDITVDKDDVTIAIKKTLNWKAPGPDKIQNYWLKYFPAAHHHIANIFNSFIQNPQSIPSFMTQGITYLKPKDKNDTKNPTKYRPITCLPTLYKLFTSIITRKLNIHITENKIIPEEQKGCTKGSMGCKEQLVIDAEIHNQAKKSRKDLYFAYIDNQKAFDSVPHSWLIQVLEIYQVNNKLIQLLQYLMSTWSTQLNLRTINNNFCTSPIKIKRGIFQGDSLSPLWFCLALNPLSKILNNACYGFTIDKVNNIKLSHLLYMDDIKLYAKDRQQLEQLLNLTERFSTDIRMSFGIDKCKINCVIKGQHQQINPHNLELQEDIIDSLEAKDTYKYLGYIQNTTINHKDVKNTLKSKYKQRLNKILKTNLSGRNKIKAINTYAIPILTYSFGIIKWSDTELEALNIATRTASYKHNIHHIHSALERFTLKRKLGGRGCIDIKNLCYNQIENLKTYFQTKAHTSNLHKALINLTQSGTPLQLNNRQFNPKDKIVKDSDKIAKWKGKALHGKFPNQLEQDHIDQVASFSWLTRGNIYSETEGFLVAIQDQIIKTRNYTKYILKENIDTDKCRLCHQTTETIDHITGGCSSLANKEYTHRHDNVAKHIHQLLAIKYKLIDNHTPYYKYKPCNVLENNNAKLYWDREIVTDRTILSNRPDITLKIKSEKITYLVDIAVPNTNNLKQKHNEKIQKYIPLADEIKQMWRQETVKIIPVIISSTAVIPKTLTAALKSLDLNKNTYIQMQKSIVIDTCSLVRRFLNPSSSFSTPQS

SEQ ID NO: 1379 - protein, 1327 aa, Cyaniris semiargus
MRLRNRNIPQAGTGAKSNGESRPGPSGPGCPSYSGGDTVSHLSAQSNTAADKVVTTTINSHSYATSPTSSISLFSSPQSSPKSYMIDINSSTSRSTTLSPMSDDATREANATYPVPISDITPSTSFLENNILHSVDHNTSQHHLTNTPARSVLQEMLPATTLAGKCRQRMKWTDLINRELLRCYYIVTSCESNLTAFRPLLRQKFIETFPELSHISEQRLSDQIRVIHKNNRLSAQVREQIKQSVAEIAQIEAPNDTQEPVLNQSTYNVQANCHSPMDIPSQQRPSTLSPHQLNTLPNFFDTIEHTTTSHTEPTNGPPTYPNSVEIQEIENLFKEMLIKYTDTDPTHRPTIPKLQVTRNVIKTVNYLNNIIGKYLDEKDALCLKDIQTAIYCAAMTTTTLHSKITKPMKEKETRKTIDNNNPKWQGRIESRIQQIRKEIGQLTQYLNENLSLRKQQKINPRNLTKTQLLDLLDKLKQKLQAQSKRLRRLKISNARRKENNLFTTNQKIFFQKLNSENIIIKEPPDIKEVKNYWENLWSKPVQHNVNSSWINTETNDNQDICPMSDITVDRGDVTFAIKKTLNWKAPGPDKIQNYWLKYFTTTHSHIANIFNSFIQDPQSIPSFMTQGITYLKAKYKDNTTDPTKYRPITCLPTLYKLLTSIITQKLNLHITQNKIIPEEQKGCTKGSMGCKEQLVIDAEIHNQAKQNHKNLFFAYIDYQKAFDSVPHSWLLQVLEIYQVNNRLIQLLKYLMSTWSTKLHLKTTNTTLSTSIIKIKRGIFQGDSLSPLWFCLAVNPLSKILNKSGHGYTIDKFSNTKLTHLLYMDDIKIYASNRQQLNHLLKLTEIFSTDIKMRFGIDKCKINCLIKGRHHQTSPYNLELQEDAIDSMQANDTYKYLGYIQNTAINHKEIKNILKTKYKQRLNKILHTQLSGRNKIKAINTYAIPILTYSFGIIKWSDTELEALNTATRTASYKHNIHHIHSAVERFTLKRKLGGRGCIDIKNLCYRQIENLRSYFKTKAQTSHLHNALINLTHSGTPLQLNNGQYDPKHKVINDSDKIIKWKSKALHGKFPHLLEQDHIDQVASFSWLTKSNIYSETEGFLIAIQDQIIKTRNYSKYILQENIDTDKCRLCYQTTETIDHITGGCNSLANKEYTHRHDNVAKYIHQLLAIKYKFIDVHTPYYKYKPCSVLENNIAKLYWDRDIITDRTILSNRPDITLTIKAEKTTYLIDIAVPNTNNLKQKQNEKIQKYIPLADEIKQMWRQDTVKIIPIILSSTGVIPKTLAAALKSLDLHKNTYIHIQKSVVIDTCSIVRRFLNPSSSFTSPQS

SEQ ID NO: 1380 - protein, 1329 aa, Celastrina argiolus
MRLRNRNIPQAGTGATSDGESRPGPSGSGCPSYSGGGTVSPLPAQSSTAADNIFTTTSNTYSYPISVSPTSSTSLFSSPHSSPKSYMLDNNSTSSRSTTLSPMSDVDTREAFANYPVSIPDIIPSTSSYQNNNQHLVEHNTPIQSHFINTPVRSVLQDMLPPTTLAGKSRQRMKWTAQINRELLRCYYIVTSCESNLTAFRPLLHKKFLETFPELCHISEQRLADQIRVIHRNNRIAAAEREQIKQSVHLQSQPLIDSSVLHTISLNIHPNHQSFIDDQYSQNSSISHSHQPNTLTSGSSTTEHNIIIMETNEGNSPITNPGSAETQKVENVFKEMLIKYTDTDPTLRPIIPKLQVTRKIIKTVNLLNDILQKYLEEKGVPCLDDIQCAMYCAALTTTTLHSKIIKESSQNKERSKTVDQNNPKWQTRIENRITKLRKQIGQLTQYLKGNLTSRKQQKINPKKLTNNQLLDNLEYLKQKLQAQCKRLRRLKISNSRRRDNILFSTNQKVFYQKLNSENIKITQPPDINEVQNYWENLWSKAGQHNTNSPWINTETQDCQNLSPMPEIIVDKDDVTYAVKKTHNWKAPGPDKLQNYWIKYFTATHDHIAKIFNSFIQDPQIIPSYFAQGITYLKPKDKNDTTNPTKYRPITCLPTLYKLLTAIITQKLNTHITQNKIIPEEQKGSTKGSMGCKEQLVIDAEIHNQARQNRKNLYYSYIDYQKAFDSVPHSWLIQVLKIYKVNDKLVQFLQNIMCIWSTKLNLRTTDATLCTSPIKINRGIFQGDSLSPLWFCLALNPLSKILNKSTHGYTIDKHNNIKITHLLYMDDIKLYATDRSQLEHLLKVTERFSTDIEMTFGTDKCKINCMIKGQHQQTDSYNLQLQGGIIDSMQTKDSYKYLGYMQSTGINHKDIKNTLKSNYKQRLNKVLCTQLSGRNKIKAINSYAIPILTYSFGIIKWSDTELEALNIATRTASYKHNIHHIHSAVERFTLKRKNGGRGMIDIKNLHYSQINNLRTYFNTKSHTSQLHKAITNLTHSGTPLQLNNCQFNAKQKIIEDSDKIVKWKSKALHGKFPNQIEQDHVDPIASFSWLTRGNIYSETEGFLIAIQDQIIKTRNYSKYILKENIDTDKCRLCHQTTETIDHITGGCSSLANKEYTHRHDNVAKHIHQLLATKYKLIDTHTPYYKYKPSNVLENSTAKLYWDRDIVTDRTILSNRPDITLTIKPEKITYLIDIAVPNTNNLKQKHNEKIQKYIPLADEIKQMWRQESVKIIPIIVSSTGVIPKTLTAALKTIDLHKNTYIQMQKSIVIDTCSIVRRFLNPSSSFTNSPQS

SEQ ID NO: 1381 - protein, 992 aa, Celastrina argiolus
MLIKYTGTDPTLRPVIPKLLVTLNIIKTVNLLNYVIGKYLEEKEVPCLDEIQSALYCAALTTATLHTKIINPSEENETRKTIYQNNPKWQTRIENRIQQLRKEIAKLTQYLNGKLNKKKPQKINPNNLTKSQLLDHLDNLKQKLQAQSKRLRRLKISNARRRDNMLFSTNQRKFYQIINSENIKIIQPPDINEVKDYWEKLWSKPVQHNTDSSWIHSEIQNHQSINQMPDITVDKDDVTIAIKKTLNWKAPGPDKIQNYWLKYFPAAHHHIANIFNSFIQNPQSIPSFMTQGITYLKPKDKNDTKNPTKYRPITCLPTLYKLFTSIITRKLNIHITENKIIPEEQKGCTKGSMGCKEQLVIDAEIHKQAKKSRKDLYFAYIDYQKAFDSVPHSWLIQVLEIYQVNNKLIQLLQYLMSTWSTQLNLRTINNNFCTSPIKIKHGIFQGDSLSPLWFCLALNPLSKILNNACYGFTIDKVNNIKLSHLLYMDDIKLYAKDRQQLEQLLNLTERFSTDIRMSFGIDKCKINCVIKGQHQQINPHNLELQEDIIDSLEAKDTYKYLGYIQNTTINHKDVKNTLKSKYKQRLNKILKTNLSGRNKIKAINTYAIPILTYSFGIIKWSDTELEALNIATRTASYKHNIHHIHSALERFTLKRKLGGRGCVDIKKLCYNQIENLKTYFQTKAHTSNLHKALINLTQSGTPLQLNNRQFNPKDKIVKDSDKIAKWKGKALHGKVPNQLEQDHIDQVASFSWLTRGNIYSETEGFLVAIQDQIIKTRNYTKNILKENIDTDKCRLCHQTTETIDHITGGCSSLANKEYTHRHDNVAKHIHQLLAIKYKLIDNHTPYYKYKPCNVLENNNAKLYWDREIVTDRTILSNRPDITLTIKSEKITYLVDIAVPNTNNLKQKHNEKIQKYIPLADEIKQMWRQETVKIIPVIISSTAVIPKTLTAALKSLDLNKNTYIQMQKSIVIDTCSLVRRFLNPSSSFSTPQS

SEQ ID NO: 1382 - protein, 1385 aa, Duroca duroca
MEKSIKRKYSLRPLPGGRRGASGVGAGCDSMRTVDGLELSKRAPAGNVPEDTTADIISTPSSPISSTYSLFQSPNSSPHSYENPSTSRSSTISPMSFNVAQEPMANSLVPINDTTNSTQGSNPDVNNIRVESNRNTTRSYTTHTHYDRDTPTNSVLQEMFPATTLSGKSRSRLKWTDQINRQLLRCYYRVTNCETDLTAYRPLLHHTFIEVYPELHHITQQRLSDQIRVIHKNNRISPAERLRIKKEISELISTENINENSTPINCNTIHTNNNLVTNNMNICNSTENLTENVILTSRPSGDTIIPITDNVENGDTSLQPSPTVVESAQNNLDILLNYGEIENTFKDNLIKYKNTDPILRPTIPKLQISYSTIKTISTVNKILNTYLKDKETVKIEELHNIIFCAALTITSFHAKPKNQNINPDKSNNRNKSKQKQPPWKKRITTQIATLRKNIGRMTQYIQGNLTEKKQRIINPKNLKTDEFIDELDKYKQKLAAYTKRLRRYEESNRRKSDNNLFNNNQKMFYRNLNSENTKIIQAPNETQVQQFWEEVWSTPEHHNIDAECIELERKEMENIEPMPPVLIDVEDVKYAVRKLHNWKAPGPDKIQNYWLKYLTATHSHLANTLNALIHEPHKMPTFLTQGITYLKSKDSDTANPSKYRPITCLPTLYKLLTSIITYKLNSHISHNNIIPEEQKGCRKGSMGCKEQLVIDSEIHNQVKQKHRNLFYSYIDYQKAFDSVPHSWLIYILKLYKIDDNLLNFLQHVMTTWSTSLNIHTDNGTLKTNPIKISRGIFQGDSLSPLWFCLALNPLSRILNKTNYGYTLDKQNNVKITHLLYMDDIKLYAANRQQLSHLLTLTDKFSKDIKMTFGIDKCKINSIIKGKYKETDSHTLTQQEGIISSMGFKETYKYLGYQQSTILNHKEIKNTLKSQYKQRLTTILKTKLSARNLTKAINTFAIPILTYSFGIINWSETELNALNILTRTTCNKHNIHHSHSAVERFTIKRKNGGRGVIDIKNLHYTQVHNLRSYFQNKARDSPLHKALLHLPTSGTPLKLNNTQYSPVEKVQSEDEKIEKWKKKVLHGKHIQNLEQPHIDKEASNSWLTKGNIFGETEGFLVAIQDQIIKTRNYAKFILKERIETDKCRLCHQTTESIEHITGGCRVLANKEYTHRHDNVAKHVHQQLALKYKLLNTYTPYYQYKPKNVLENSDTKLYWNRDIITDRTVLSNRPDITLTLKATKNTYLIDISIPNTNNLKQKYAEKIQKYIPLADEIKQMWHQDLVRIVPIIISSTGIIPNTLLDALQFLQLPKNTYIPLQKSVVLDTCSIVRRFMNPSSLPIHTSNSDNYNVSATHDTYNTANMHTAHDTHHTSDMHTAHHTHNTLDTHT

SEQ ID NO: 1383 - protein, 982 aa, Noctuana haematospila
MNQILHTYLQDKETLPIEELHLIVYCAAITITSLHIKTNKKNTNRNKHKQKQPTWKSRITTHIETLRKNIARMTQYLKGNLSIKKQRKLNPKNLDTNQLIDELDKHKQKLSAYTKRLRRYEESNRRKAENNLFQNNQKIFYRQLNSNHINITQAPDETQVQKFWENIWSTPENHNEDAEFIELEKKESENIESMPPLVIDIDDIKYATQKIHNWKAPGPDKIQNYWLKYFTSIHNHIANAYNTLIQEPHNMPTFLTQGITFLKPKDSDTTNPAKYRPITCLPTLYKLLTSIITHKLNTHISYNNIIPEEQKGCCKGSMGCKEQLVIDTEIHNQVKQKHRNLFFSYIDYQKAFDSVPHSWLIHVLKLYKIDDNLVNFLQHIMTFWTTTLNIHTHNKTLITNPIKICRGIFQGDSLSPLWFCLAINPLSKILNNTNYGYTLDKQNNIKITHLLYMDDIKLYAANKQQLKHLLTLTEQFSKDIKMSFGLDKCKINSVIRGKYKETESHILTLQEGTIHNMLFKETYKYLGYEQSTTINHTEIKAKLKTIYKHSLKTILRTKLSARNKTKAINTYAVPILTYSFGIINWSETELNALNTLTRTTCNKHNIHHTHSAVERFTIKRKNGGRGFIDIKNLHYSQVHNLRLYFQNKAKNSPLHKSIVSLNTSGTPLKLNDTQYNPNLKIQTEEEKIENWKKKTLHGKYPQQLLQPHIDKDASNTWLTKGNIFGETEGFLVAIQDQVIKTRNYSKYILKDRIETDRCRLCYQTTESIDHITGGCSSLASKEYTYRHDNVAKHIHQQLAIKYNLIHTYTPYYQYKPKNVLENNEAKLYWNRDIITDRTILSNRPDLTLTLKITKTTYLIDVSVPNTNNLKQKFTEKIQKYLPLADEIKQMWHQDSVRVIPIILSSTGIIPKSLFAALQSLQLPKTTYIPIQKSVVLDTCSIVRRFMNPSSQPLLCANHDNQNSLTTPDEQNIATQQHITPNI

SEQ ID NO: 1384 - protein, 1369 aa, Lerema accius
MEKSIKRKYCLRPLPGGRRGVSGVGAGCDSMRTVDGLELSRRAPAGNVPEDTTADIISIPSSPISSTHSLFQSPNSSPHSYENPSTSRSSTVSPMSVNVAQEPMAHSLVPIYDTTNSAQGSNPDVNNIRAESERHTTLTYTTHTHCDRDAPTRSVLQEMFPATTLGGKSRTRMKWTDQINRQLLRCYYRVTNCETDLTAYRPLLHHMFIEVYPELQHITQQRLSDQIRVIHKNNRISPTERLRIKKEVSELISTVNPDENNIPFNSNTLHPQDNQIENNSSVYNSSENFAVSVTLASRSLGDTIIPTVDDVENCDVFIQPSPITESPQTNSDISYNYGEIENTFKDNLIKYNNTDPILRPTIPKLQISYSTMKTVTTVNKILNTYLQDKETLAVEELHKIIYCAALTITSSHAKPKNNTRKLDKSNCRNTSKEKQPPWKKRIITQITTLRKNIGRMTQYLKGNLSDKKQRIINPKNLTTDEFIDELDKYKQKLAAYTNRLRRYEVSNKRKSDNNLFSNNQKIFYRNLNSENIKITHAPHETQVQQFWEKVWSTPEDHNSDAECIELERKEMESIEPMSPFIIDIEDVKYAVRKLHNWKAPGPDKIQNYWLKYLTATHNHLANTLNALILEPHKIPTFLTQGITYLKPKDSDTTNPSKYRPITCLPTLYKLLTSIITHKINSHITHNNIIPEEQKGCRKGSMGCKEQLIIDSEIHNQVKQKHRNLFYSYIDYQKAFDSVPHSWLIYILKIYKVNDSLVNFLEHVMTTWSTSLNIHTDNGTLKTKPIKIARGIFQGDSLSPLWFCLALNPLSRLLNNTKYGYILDKQNNIKITHLLYMDDIKLYAANRQQLNQLLTLTEKFSKDIKMSFGIDKCKLNSIIKGKYKETDSHTLTQQEGIICGMEFKETYKYLGYQQSTMLNHTEIKNTLKSKYKQRLTTILKTKLSARNLTKAINTFAVPILTYSFGIINWSETELNALNTLTRTTCNKHNIHHSHSAVERFTIKRKNGGRGIIDIKNLHYMQVHNLRLYFKNKAKDSPLHRALLQLPISGTPLKLNNIQYSPIDKVESEEEKIDRWKKKVLHGKHIQHLEQPHIDKEASNSWLTKGNIFGETEGFLVAIQDQIIKTRNYAKYILKERIDTDKCRLCHQTTESIEHITGGCRALASKEYTHRHDNVAKHIHQQLALKYKLLQTYTPYYQYKPKNVLENSDTKLYWNRDIITDRTVLSNRPDLTLTLKATKTTYLIDVSVPNTSNLKQKYAEKIQKYISLADEIKQMWHQELVRIVPVIISSTGIIPKTLFDALQFLQLPKNTYIPIQKSVVLDTCSIVRRFMNPSSLPIHTSNSEFCTVPATHTTRNTSYTRTRTTHDTQLT

SEQ ID NO: 1385 - protein, 1353 aa, Pythonides amaryllis
MEKSIKRKYNLRPLPGGRRGTPGVGAGCDSMRTVDGLELSRRAPAGHVPEVTTAEIISNPSSPISSTHSLFQSPSSSPHSYENPSSSRSTTLSPMSTNVALWPMANLHVPIFDTINSTQESEIDANILCVDTHINPFHSSTTFTSKTYDKPNDSVLQKMFPATTLGGKSRQRMKWTDDINQQLLRCYYKVTNCETDLTMYRPNLHHMFVKIYPELQHITQQRLSDQIRVIHKNNRISPSERLRIKQEIAQTIPTHNDVQNIVHLHISNTQQSQTANDIVTENTTESTTLYNTLNATHTDTHYRSHSTQNNFHSNDIPTLPLPTSEPTSDNAELYTKIKDRLHENLIKYENTCPTLRPIIPKLQISTLTIKTVNTMNEVLHEFIQDKEALLIEEIHKIIYCSAMTVTSLHAKSRKHNINNTKDNTTMQKQPTWKIRLIKQIDTLRKTIGCLTQYIKGNLTQKKQNKINPKNLNTDYLIDLLDKNKQKLSAFTKRLQRYEESNKRKADNNLFNTNQKVFYRNLNTHQIKITQAPEKSQLHQFWENIWSTPAEHNNEADFIQLEQNYTDNIESMPPITIGLEDVQYAVRKIHNWKAPGPDKIQNYWIKYLTATHKHLAKAFNELINKPYSMPTFLTQGITYLKPKDTNTENPASYRPITCLPTFYKLLTSIITHKVHTHISHNNIIPEEQKGCCKGSMGCKEQLIIDTEIHYQVKQKHKNLFYSYIDYQKAFDSVPHSWLLHVLKLYKIDDNLLNFLKHAMTNWITTLNIHTNTGTLKTNPIKISRGIFQGDSLSPLWFCLAINPLSRILNQSNYGYIIDKQTNTKITHLLYMDDIKLFAANRQQLDHLLTLTERFSKDIKMTFGLDKCKVNCIIRGKHKETHEHILTQQEGTISNMEFKETYKYLGYQQSTSINHTEIKNSLRSKYKQRLHTILKTKLSAKNKTKAVNTYAIPILTYSFGIIKWSETELNALNTLTRTTCNKHNIHHTHSAVERFTIKRKNGGRGFTDIKNLHFSQIHNLRTYFHNKANNSDIHKAITNLPTSGTPLMLNNAQYNPNSKIQTEEDKIVNWKSKTLHSKHAHLLEQAHIDKEASNTWLTKGNIFGETEGFFIAIQDQIIKTRNYSRHILKEKIETDKCRLCHQTTESIDHITGGCSALANKEYTYRHDNVAKHIHQTLALKYKLLQTYTPYYQYKPKNVLENKDVKLYWDRDIITDRTILSNRPDLTLTLKEIKTTYLIDVSVPNSNNLKQKFTEKVQKYIPLADEIKQMWKQDSVRVIPIIISSTGVIPKTLFTALQVLQVPKNTYIPIQKSVVLDTCAIVRRFLNPSSLSLQENFNNLHTSTTQITSNTERTKI

SEQ ID NO: 1386 - protein, 1361 aa, Thymelicus lineola
MEKSVKRKYSLRPLPGGRRGTSGVGAGCDSMRTADGLELSRRAPAGHVPEVTTADIISTPSSPTSSTYSLFQSPNSSPHSYENPSTSRSSTASPMSFNVARGPMANLLAPINDTTNSTQGSRRDTNILRVESIPNTSRSVITPTNHEHDTRYTSVLREMLPPTTLGGKSRTRMKWTDQINRQLLRCYYRVTNCETDLTAYRPLLHHAFVEIYPELQHITQQRLSDQIRVIHKNNRISLAERTRIKQEILEAISDENTLNQNDISPTINIPPIQTNQTANSNIMISNSVENPTENITLTPEPRHENSDLVTENIQTSDIIIHHRPTLDSTQKGPDTHLNYEEIDCIFKENIIIYKNTDPTLRPTIPKLQISFSIIKTVNTINDILHKYLQDKETLTIEELHTIIYCAAMTVTFVHTKSRKQNKNLDIISNRNKNNQKQPPWKKRITTQIATLRKSIGRMTQYIKGNLSHKKQHVINPRNLNKDEFIDELDKKKQKLSAYTKRLKRYEESNRRKADNHLFNNNQKLFYRNLQSDNIKITKTPDKTQVQQFWENIWSTPEEYNNDAEFIESEQKETENIVPMPPILIDVEDVKFAVRKTHNWKAPGPEKIQNYWLKYLTATHNHLANTFNAIIHEPHNIPQFLTQGITYLKPKDSDTENPSKYRPITCLPTIYKLLTSIITHKLNMHISFNNIIPEEQKGCRKGSMGCKEQLVIDTEIHNQVKQRHRNLFYAYIDYQKAFDSVPHSWLLYILRLYKTDANLVNFLQHIMTTWRTILNIHTDNGTVKTNPIKISRGMFQGDSLSPLWFCLAINPLSRILNKTNYGYTIDKHNNIKITHLLYMDDIKLYAANRQQLNKLLTLTEQYSKDIKMTFGIEKCKINSIIKGKYKETDAHTLTHQEGTISNMEFKETYKYLGYQQNTALNHTEIKNKLRIQYKQRLTTILKTKLSARNLTKAINTYAVPILTYSFGIINWSETELNALNTLTRTTCNTHFIHHSHSAVERFTIKRKNGGRGVIDIKNLHYAQVQNLRLYFQNKSNDSPLHKAIMHLSTSGTPLKLNNAQYDPTQKIQSEEEKLEKWRKKALHGKYLQQIEQPHIDKEASNSWLTKGNIFGETEGFLVSIQDQVIKTRNYSKYILKERIETDKCRLCHQTTETIEHITGGCKALANKEYTHRHDNVAKHIHQLLALKYKLLETYTPYYQYKPKNVLENKDTKLYWNRDIITDRTVLSNRPDLTLTLKAMKTTYLIDISVPNTNNLKQKFTDKIQKYIPLADEIKQMWHQDLVRIIPIIISSTGVIPKTLPNAIELLQLPKHTYITLQKSVVLDTCSIVRRFMNPSSLPIHTRESDNYNISTTHDTQNIHLNT

SEQ ID NO: 1387 - protein, 925 aa, Atrytonopsis hianna
MTQYVKGNLSLKKQHKINPNNLNTDQFIDELDKYKQKLSAYTKRLKRYEESNRRKVDNNLFNNNQKSFYRHLNSEHVKLTHTPDETEVQTFWENVWSKPEHFNENAECIKFEQKQTESIEPMPPIKIDVEDVKYAVRKTHNWKTPGPDKIQNYWLKYLTATHNHLANTVNALIYEPHNMPVFLTQGITYLKPKDPDTTDPSKYRPITCLPTLYKLITSIITHKLNTHISYNNIIPEEQKGCRKGSMGCKEQLVIDTEIHNQAKLKHRNLFFSYIDYQKAFDSVPHSWLIYILKLYKTDDNLINFLRHIMTTWRTVLNIHTANGVVKSNPIKISRGIFQGDSLSPLWFCLAINPLSRILNKTKYGYTLDKQNNIKITHLLYMDDIKLYAANRQQLNHLLTLTEQFSMDIKMTFGIDKCKINSIIKGKYKETDSHILTQQKGTISSMEFKETYKYLGYQQSTTLNHTEIKNTLKSKYKQRLTTILKTKLSARNLIKAINTYAVPILTYSFGIINWSETELNALNILTRTTCNKHNIHHSHSAVERFTIKRKNGGRGVIDIKNLHYTQVHNLRSYFRDKANDSPLHKAIVHLPTSGTPLKLNNSQYYPVGKIQPEEEKIEKWKSKALHGKHAQQLEQPHIDKEASNSWLTKGNIFGETEGFLIAIQDQIIKTRNYAKYILKERLETDKCRLCHQTTESIEHITGGCKALANKEYTHRHDNVAKHIHQQLALKYKLLQTYTPYYQYKPKNVLEDNNTKLYWNRDIITDRTILSNRPDLTLTLKATKTTYLIDISVPNTSNLKQKYTEKIQKYIPLADEIKQMWHQDLVRVVPIIISSTGIVPKTLLDALQFLQLPKNTYIPLQKSVVLDTCSIVRRFMNPSSLPIHTSNSDSYNITTTHNTHNTPHAHDTPHTHTTQHTDDTTLPSHLA

SEQ ID NO: 1388 - protein, 1352 aa, Carystus phorcus
MEKSIKRKYSLRPLPGGRRGTPGVGAGCDSMRTADGLELSRRAPAGHVPEDTTAEIISTPSSPISSTYSLFQSPNSSPRSYENPSTSRSSTISPMSLNVAQGSMTNSLVPINDTTNSTQGSNQDTNNVRVDSNRNTIQSLTTPTQYNHDTSTINVLQEMFPTTTLNGKVRTRMKWTEPINRQLLRCYYKVTNCETNLTTYRPLLHQTFIEIYPELQHITQQRLADQIRVIHKNNRISQAERLRIKQEIEELISTENAVSSNNINNNIHAQTHNHSLNNITSYNTIHNSMGNHTENMILTSEPLSNTLGSIIENTQNGDISIQASPVSDSTQNNLDTSYKYTEIENTFKDNLIKYKTTDPTLRPAIPKLQISYLTIKSINTMNKILQVYLQDKDTLPIKELHNIIYCAAVTITSLHARPKIQNNVDKINSKNINKEKQPPWKKRIITQIATLRKYIGRMTQYIKGNLSQKKQRKMNPKNLNINDIIDDLDKSKQKLSAYTKRLKRYEESTRRKTDNNLFNNNQKLFYRKLNADHIKITQMPDKTQVQQFWENIWSTPEEYNNEAECIEVEQKEIENIEPMPPISIDVEDVRYAVSRTHNWKAPGPDKIQNYWLKYLTATHHHLANTLNTVIQEPHNMPTFLTRGITYLKPKDADTTNPSKYRPITCLPTLYKLMTSIITHKLNTHVTHNNIIPEEQKGCCKGSMGCKEQLVIDTEIHNQVKQKHRNLFYSYIDYQKAFDSVPHSWLIYILKLYKIDDILLNFLQHTMGTWSTILNIHTDNGTLKTNPIKISRGIFQGDSLSPLWFCLAINPLSRMLKKTNCGYTLDKQNNIKISHLLYMDDIKLYAANRQQLNNLLTVTEKFSKDIKMTFGIDKCKINSIIKGKYKETDSHTLTQQAGIISSMEFKETYKYLGYQQSTTLNHTEIKNALKSKYKYKLITILKTKLSARNLIKAINTYAIPILTYSFGIINWSETELNALNILTRTTCNKHNIHHSHSAVERFTIKRKNGGRGVIDIKNLHYSQVHNLRSYFQYKVHNSPLHKALVDLPTSGTPLKLNNAHYNPKEKIQSEEEKWEKWKKKTLHGKHPQNLEQPHIDKEASNTWLTKGNIFGETEGFLIAIQDQVIKTRNYSKYILKERIDTDKCRLCHQTTESIEHITGGCKALASKEYTHRHDNVAKHIHQQLALKYKLLQTYTPYYQYKPKNVLENIEAKLYWNRDIITDRTILSNRPDLTLTLKATKTTYLIDISVPNTNNLKQKHTEKIQKYIPLADEIKQMWHQDLVRIIPILISSTAIVPKTLFNALELLQLPRNTYIPLQKSVVLDTCSIVRRFLNPSSLPINTIDSDDYNTITTH

SEQ ID NO: 1389 - protein, 1345 aa, Euphyes dion
MEKSIKRKYSLRPLPGGRRGTSGVGAGCHSMRTADGLESSRRAPAGNEPEATTASIIISNPSSPISSTHSLFQSPSSSPRSYENPSTSRSSSISPMSFNVAQEPLANSLVPIIDTTNSTQGSSRNTNILRVEPIRTTTPNRSVLLEMFPATTLGGKTRERMKWTDQINQQLLRCYYIVTNCETNLTAYRPMLYQTFIKIYPELQHITQQRLSDQIRVIHKNNRICPTERLRIKQEILDLLSTGDAINENITPEINNTLQIQNNQGAHNTNINSLHNSTENLTVHSTLSPSQADDSNCPIVPTLDSAQNDVDMNLNYEDTEHTFKENLIKYKNTDPSSRPNIPKLLISYTTIKTVNTVNNILHTYLQDKDTLSIEEIHTIIYCAAKTIVSIHIKQKNKNIYTKNINKINQNKQKQPPWKARIILQVETLRKNIGRMTQYIKGNLSLKKQRKINPNNLNTDQFMDELDKNKQKLSAYTKRLKRYEESNKRKVDNILFNNNQKSFYRNLNSEHIKITHTLDERKFQEFWENVWSKPEDHDKNTKCIELEQKQAESIVPMSPIEIKVEDVKYALRKAHNWKAPGPDKIQNYWLKYLTATHKHLANALNMLIQKPHNVPAFLTHGITYLKPKDLDTTNPSKYRPITCLPTLYKLMTSIISHKLNIHISHNKIIPEEQKGCRKGSMGCKEQLVIDTEIHSQVKQNHRNLFYAYIDYQKAFDSVPHSWLIYVLKLYKTDDYLVNFLQHVMTTWNTILNIHTVNGVVRTNPIKISRGIFQGDSLSPLWFCLAINPLSRLLNNTNYGYTLDKQNNIKITHLLYMDDIKLYATNRQQLNHLLTLTEKFSKDIRMTFGTEKCKINSIIRGKYKETNPHILTQQKGTISGMDFKDTYKYLGYEQSTTINHKEIKNTLKSKYKERLTTVLKTKLSARNLTKAINSYALPILTYSFGIINWSETELNALNTLTRTTCNKHNIHHSHSAVERFTIKRKNGGRGVIDIKNLHYSQVNNLRSYFQSKASDSVLHKALVHSPTSGTPLKLNNTQYNPVEKIQLEEEKIEKWKNKALHGKHAQQLEQTHINKEASNTWLTKGNIFGETEGFLIAIQDQIIKTRNYTKYILKEKIETDKCRLCHQTTESIEHITGGCKALANKEYTHRHDNVAKHIHQQLALKYKLLDTYTPYYQYKPKNVLENNNTKLYWNRDIITDRTILSNRPDITLTLKATKTTYLIDISIPNTNNIKQKYTEKIQKYIPLADEIKQMWHQDSVRVVPIIISSTGIIPNTLLDALQFLKLPKNTYIPLQKSVVLDTCSIVRRFMNPSSLPIHSSNFDNFNTITPHDPHIPSHSHTDTTHTV

SEQ ID NO: 1390 - protein, 1350 aa, Pholisora mejicanus
MEKSIKRKYSLRPLPGGRRGTSGVGAGCDSMRTVDGQELSRRAPAGNVPEVTTADIISIPSSPISSTHSLFQSPNSSVHSYENPSTSRSSSISPMSFNVAREPLAKSLVSIYDTNKSTQGSIRDTNNICVDANQTIMHPLPNSTSLNHNIPVTSVLQEMLPATTLGGKSRQRMKWTDEINRQLLRCYYKVTNGETNLTSYRPLLHHTFTNIYPELQHLTQQRLSDQIRVIHKNNRISPSERLRIKQEVTQFITTENVENQSNTILHNNNLHAQEHPVLDTVYNNPLSNLAVTLPSALVESLCTSNRNTRTKNLLAQKDSQSQDISTSLTQITNTIEEEDNLNIDINYEKIQELFSENLKKYKNINPCLRNTIPKLPITRSTVKTVNTMNNILHTHLQDTVPLAIEELHLIVYSAAITITSLHVKSSEVTNTRNKNQNKHKKPTWKARIITLIETLRKNIARMTQYLKGNLSLKKQRKTNPDNLNIDEMIELLDKNKQKLSAYTKRLKRYEESNRRKTENNLFQNNQKLFYRHLNSENISIKQAPDASNVQKFWENIWSKPESHNSDAEFIELETKETENLVTMLPVVIDLDDIKYATQKIHNWKAPGPDKIQNYWLKYFTSIHSHLANAYNTLIQKPHNMPTFLTQGITYLKPKDSDTTNPAKYRPITCLPTLYKLLTSIITHKLNTHISHNNIIPEEQKGCCKGSMGCKEQLVIDTEIHNQVKQKHRNLFYSYVDYQKAFDSVPHSWLIQILKLYKTDDKLVSFLQHIMTLWTTTLNIHTHNKTIKTNPIKISRGIFQGDSLSPLWFCLAINPLSKILNKTNYGYILDKQNNIKITHLLYMDDIKLYAANRQQIKHLLTLTEQFSKDIKMAFGLDKCKINCIIRGKYKETESHILTLQEGTINSMLFRETYKYLGYEQSTTINHTEIKTKLKTIYRHRLNTVLRTKLSARNKTKAINTYAVPVLTYSFGVINWSETELNALNTLTRTTCNKHNIHHSHSAVERFTIKRKNGGRGFIDIKNLHYSQVHNLRLYFQNKANSSSLHKAIVGLHTSGTPLKFNDTLYNPNLKIQTEEEKIEIWKGKSLHGKYPQTLQQPHIDKNASHTWLTKGNIFGETEGFLVAIQDQVIKTRNYSKHILKEKIETDKCRLCHQTTESIDHITGGCSALANKEYTYRHDNVAKHIHQQLAIKHKLLHTYTPYYQYKPKNVLENKDAKLYWNRDIITDRTILSNRPDLTLTLKATKTTYLIDVSVPNTNNLQQKFTEKIQKYLPLADEIQQMWHQDSVRVIPIIISSTGIIPKTLLTALQSLQLPIKTYIPLQKSVVLDTCSLVRRFMNPSSQPLLSRNTNDH

SEQ ID NO: 1391 - protein, 1197 aa, Thymelicus sylvestris
MQEMFPATTLSGKSRTRLKWTDQINRQLLRCYYRVTNCETNLTAYRPLLHHTFIEIYPELQHITQQRLSDQIRVIHKNNRISLAERQHIKQEISELLSTGNIVNQNNVPLNNNMLHTQNNQISNEINSTCNPMVTLTENMTFTPEPINDTMCPVTENVQNSESPIEPPSTSELIQNNHDNNLNYREIENKFKENLIKYKNVDPNLRPIIPKLQISFSTIKTVNTVNNIIHTYLQDKETLLIEELHNILYCAAITITSLHTKTKIQNNNTDKLNNRNKNKNVEPFWKKRITTQIATLRKNIGHMTQYIKGNLSQKKQRKINPKNLNNDEFIDELDKNKQKLSAYAKRLKRYEESNRRKVENNLFNSNQKIFYRNLNSEHIKITQAPDKTEVQQFWEKIWSTPEEHNYDAECIKLEQKETENIDPMPPIVIDVEDVKYAVRKTQNWKAPGPDKIQNYWIKYLTATHNHLAHTFNVLLHEPHNLPPFLTQGITYLKPKDSDTTNPSKYRPITCLPTLYKILTSIITQKLNKHISLNNIIPEEQKGCRKGSMGCKEQLVIDTEIHNQAKQKHRNLFFSYIDYQKAFDSVPHSWLIDILKLYKTDDILLNFLQYAITTWTTVLNIHTNNGTVRTNPIKISRGIFQGDSLSPLWFCLALNPLSRILNKTNYGYTLDKQNKVKITHLLYMDDIKLYAANRQQLNHLLTLTEQFSNDIKMTFGIDKCKINSVIKGKYKETDSHTLIHQEGIINSMEFRDTYKYLGYQQSTTINHTEIKNTLKSKYKQRLTTILKTKLSARNLTKAVNSFAVPILTYSFGIINWSETELNALNLLTRTTFNKHNIHHSHSAVERFTIKRKNGGRGVIDVKNLHYTQVHSLRTYFQNKSKDSPLHKALINSPTSGTPLKLNDAQYKPNEKIQTEEEKIEKWKKKVLHGKHPQHLDQPHIDKEASNRWLTKGNIFGETEGFLVAIQDQIIKTRNYTKFILKERIESDKCRLCHQTTESIEHITGGCKTLATKEYTHRHDNVAKHIHQQLALKYKLIQIYTPYYQYKPKNVLENNDTKLYWNRDIITDRTILSNRPDLTLTLKTEKITYLIDISVPNTNNLKQKFADKIQKYIPLADEIKQMWHQDIVRIVPIIISSTGIIPKTLHNALEFLQLPKNTYIPLQKSVVLDTCSIVRRFMNPSSLPLHSSDSDNHNISTTH

SEQ ID NO: 1392 - protein, 1418 aa, Grais stigmaticus
MPITPRQPSLTNGPSLKHIMEKSIRRKYSLRPLPGGRRGTPGVGAGCDSMRTVDGLELSRRAPAGNVPEVTTADITSTPSSPISSTHSLFQSPNSSPHSYENPSTSRSTTTSPMSFNVARKRHANLLVPIDDTTNSMQGYNQTTNQCIETNPNTAHTRTLTTPTLSNNDEPTRSVLREMFPATTLGGKNRQRMKWTDEINHQLLRCYYRVTNCETDLTAYRPSLHQLFVTMYPELKHLTQQRLSDQIRVIHKNNRISSSERLRIKNEIAEFISTENTNNQYNTQPSYNNAPTQISPIENNTNNTTLLNLINIPSENVTINTEHVDDVLCAMNNTQNISLVTQHNISHPINNPIQSSPISEISQDTDLNHKNIENTFNQNLIKYSNTDPSLKPTIPKLQITRSTIKTVNCVNDMLHVYLQDKEGLSIEKLHEIIYSAAITITSLHMKQQKQNTNLNKIPNRNKNKQKQPPWKTRLTYQIETLRKTIGQMTQYIKGNLSTKKQRKVNPKNLHTDQLIDELDKNKQKLAAYSKRLNRYEESNRRKADNNLFQKNQKLFYRNLNIEHTKITQTPDKTQVQQYWENIWSRPEDHNSDAEFIKLEQEETKNIESMPPIVIDVEDVQIAVRKTQNWKAPGPDKIQNYWLKYLTATHHHLANALNTLIQKPHDIPTFLTQGITYLKPKDSDTLNPAKYRPITCLPTLYKLLTSIITHKLNTHISNNKIIPEEQKGCCKGSMGCKEQLVIDTEIHNQVKQKHRNLFYSYIDYQKAFDSVPHSWLIYILKLYKTDTNLLNFLQHIMTTWTTILNIHTDNGTLKTNPIKISRGIFQGDSLSPLWFCLAINPLSRILNRTNYGYTLDKQKNIKITHLLYMDDIKIFAANRQQLNHLLTLTEQFSKDIKMTFGLDKCKLNCIIKGKYKETESHILTQEEGTISNMEFRETYKYLGYQQSTTLNHTEIKNTLKSKYKQRLITILKTKLSARNKTKAINTFAVPILTYSFGIINWSETDLNALNTLTRKICNKYNIHHSHSAVERFTIKRKNGGRGFIDIKNLHYSQVHNLRSYFKNKANDSPLHEAIVNSSTSGTPLNMKNAHYDPTQKIQTEEEKIENWKKKSLHGKYPQQLEQPHIDKEASNTWLTKGNIFGETEGFLVAIQDQIIKTRNYAKYILKEKIPTDKCRLCHHTTETIDHITGGCSALASKEYTHRHDNVAKHIHQQLALKYKLLHTYTPYYEYKPKNVLESNDAKLYWNRDIITDRTILSNRPDLTLTLKATKTTYLIDISVPNTNNLKQRYTEKIQKYIPLADEIKQMWHQDIVRIIPIIISSTGIIPKTLLNALQFLQLPKHTFVPLQKSIVLDTCSIVRRFMNTTSLPIHGSTFDISTRHNTQNIPTSDHTHTTQNTPNTHISLHPQHTDNTSIPSHLA

SEQ ID NO: 1393 - protein, 1322 aa, Muschampia tessellum
MRTIDGQELSRRAPAGNVPEVTTAEIISTPSSPISSTHSLFQSPSSSPHSYENPSTSRSTSICSMSFNVARGPLAKSRVSIYDTNKFTQGSIRDTNNICVDTNQIPLHPLTTNQTSSNHDILTLPASNVLKEMLPATTLAGKNRQRMKWTDEINRQLLHCYYKVTKCEAELTAYRSLLHHTFSDIYPELKHLTQQRLADQIRVIHKNNRISPSERIRIKQEVAALITTENIENQNTISNNNNTQMQETHIPDNITSKSQAIDENLYQATIYTQTENLLEQSDTTPLTDIFTQLEPTLEIIQDGSHLDVNYKKIQEAFHENLTKYENINPLDRKTIPKLQITHAAIKTVNSMNNILHTYLQDRRVLPIEELHLIIYCAALTITSLHVKTNEKVNITNKNKNKQPSWKTRIVKIIETLRKTIARMTQYIKGNLSAKKQRKVNPKNLDTDQFIEELDKNRQKLAAYTKRLRRYEESNRRKAENNLFQNNQKLFYRQLNSQHITVTQGPDETHLQQFWENIWSTPENHNSNAEFIEAEKQDTEHIETMPSVVIDVDDVKYCTQKLHNWKAPGPDKIQNYWLKYFTSIHTHLANAYNTLIQEPHHMPNFLTQGITYLKPKDSETTNPAKYRPITCLPTMYKLLTSIITNKINTHISHNNIIPEEQKGCCKGSMGCKEQLVIDSEIHNQVKQKHRNLFYSYIDYQKAFDSVPHSWLIHVLKLYKIADNLINLLQYIMTSWTTTLYIHTQNSILKTNTIKICRGIFQGDSLSPLWFCLAINPLSKILNRTNYGYTLDKQNNIKITHLLYMDDIKLYSANRQQLQHLLTITEQFSKDINMTFGLEKCKINCIIRGKYNETESHKLTLHEGNISSMLFRETYKYLGYEQSTTINHTEIKTKLKTIYKNRLNTILKTKLSARNKTKAINTYAVPILTYSFGVINWSETELNALNTVTRTTCNKHNIHHSHSAIERFTIKRKNGGRGFIDIKNLHYSQVHNLRLYFQNKANSSPLHKAIINLHTSGNPLKFKDTQYNPILKIQTEEEKIENWNKKAVHGKYPQQLEQPHIDKDASHTWLTKGNIFGETEGFLVAIQDQVIKTRNYSKYILKERIETDKCRLCHQTTESIDHITGGCSALANKEYTYRHDNVAKHIHQQLAIKYKLLHTYTPYYQYKPKNVLENNDAKLYWNRDIITDRTILSNRPDLTLTLKVTKTTYLIDISVPNTNNLKQKFTEKIQKYLPLADEIKQMWHQDSVRVIPMIISSTGVIPKTLTTALQTLQLSKATYIPLQKSVVLDTCSIVRRFLNPSTQPFYSLDEQNINYYIQHKTTNT

SEQ ID NO: 1394 - protein, 1363 aa, Niconiades incomptus
MEKSTKRKYSLRPLPGGRRGASGVGAGCYSMRTADGLELSRRAPAGHEPEDSTADIISTPSSPTSSTHSLFQSPNSSPHSYENPSTSRSSTISPMSLNVAQEPMANSLVPINDTTNSMQGSNQGFSNICIESSRNLSSTTPTYNNQDTPARSVLQEMFPATTLGGKSRTRMKWTDEINRQLLRCYYRVTNCETDLTTYRPLLHKTFIEIFPELQHITQQRLADQIRVIHKNNRISPVQRLRIKQEILELISTEHDVHQNTILTTDNTPIITCNTVENFTEDMTLTAGPINDTTNPNTGNVENGDMFIQHSHIVEAAQNSLDKSLNYDEIENTFKENLIKYKNTNPILRPTIPKLQISYSTIKTVNIVNKILYTYLQDKETLPIEELHKIIYCAALTITSLHAKPKNQNKNLDKTNNKNKSKLKQPPWKTRLTTQIATLRKNIGRMTQYLKGNLSEKKQRIINPKNLNADEFIDEFDKHKQKLAAYTKRLRRYEESNRRKSDNNLFNNNQKIFYRSLNSENIKITHAPNETQVQQFWEKVWSNPETHNNDAECIELEKEEMENIEPMLAIVIDVEDVKRAVKKSHNWKAPGPDKIQNYWLKYLTATHNHLANTLNTLIHEPHSMPAFLTQGITYLKPKDSDTTNPSKYRPITCLPTLYKLLTSIITYKLNTHITHNNIIPEEQKGCRKGSMGCKEQLVIDSEIHNQVKQKHRNLFYSYIDYQKAFDSVPHSWLIYILKLYKIDDNLLNFLQHIMTTWSTSLNIHTDNGTLKTKPIKIARGIFQGDSLSPLWFCLALNPLSRILNKTNCGYIIDKQNNIKITHLLYMDDIKLYAANRKQLNNLITLTEKFSKDINMTFGIDKCKINSIIKGKYKGTDPHTLTQQEGTISSMEFKETYKYLGYQQSTTLNHSEIKNTLKSKYKQRLTTILKTKLSARNLTKAINTFAVPILTYSFGIINWSETELNALNTLTRTTCNKYNIHHSHSAVERFTIHRKNGGRGVIDIKNLHFIQVHKLRLYFQNKAKESPLHKALINLPISGTPLKLNNADYEPTEKIVKEEGKIEKWKKKVLHGKHPQLLEQPHVDKEASNSWLTRGNIFGETEGFLVAIQDQIIKTRNYAKYILKERIETDKCRLCHQTTETIEHITGGCRTLANKEYTHRHDNVAKHIHQQLALKYKLLETYTPYYQYKPKNVLENCDTKLYWNRDIVTDRTILSNRPDLTLTLKVTKTTYLIDISVPNTNNLKQKYTEKIQKYIPLADEIKQMWHQNLVKVVPIIISSTGIIPKTLFDALQFLQLPKNTYIPLQKSIVLDTCSIVRRFMNPSSLPIYTYTSNSDNSNIPAVHDTHTVPCTHTTQNTDTLLPNLT

SEQ ID NO: 1395 - protein, 1370 aa, Thymelicus sylvestris
MEKSVKRKYSLRPLPGGRRGTSGVGAGCDSMRTADGLELSRRAPAGHVPEVTTADIISSPSSPTSSTNSLFQSPNSSPHSYENPSTSRSSTTSPMSFNVARGPMANLPAPINDTTNSTQGSRRDTNILRVESIRNTSRSLITPTHHEHDTPATSILREMLPPTTLGGKSRTRMKWTDQINRQLLRCYYRVTNCEKDLTAYRPLLHHAFVEIYPELQHITQQRLSDQIRVIHKNNRISLAERTRIKQEILEVISNGNTLNQNDIPLTTNIPTAYSNITISNSVENPIENMTSTPEPRDETSELVNENIQTNEMIIQHSPTLDSTQKGQDTHPNNEEIDCIFKENLIIYKNIDPTLRPTIPKLQISFSTIKTVNTVNNILHKYLQDKETLTIEELHTIIYCAAMTVTFVHIKSRKQNKSSDNINNRNKNNQKQSPWKKRITTQIATLRKNIGRMTQYIKGNLSHKKQHLINPRNLNTDEFIDELDKNKQKLSAYTKRLKRYEESNRRKADNNLFNNNQKLFYRNIQSENIKITQTPDKTQVQQFWENIWSTPEEYNKDAEFIESEKKETENIVPMPPIVIDTEDVKFAVRKTHNWKAPGSEKIQNYWLKYLTATHNHLANTLNALIHEPHNMPQFLTQGITYLKPKDSDTKNPSKYRPITCLPTIYKLLTSIITHKLNIHISLNNIIPEEQKGCRKGSMGCKEQLVIDTEIHNQAKQRHRNLFYAYIDYQKAFDSVPHSWLLYILRLYKTDDSLVNFLQHIMTTWSTILNIHTDNGTVKTNPIKISRGIFQGDSLSPLWFCLAINPLSRILNKTNYGYTLDKTNNIKITHLLYMDDIKLYAANRQQLNQLITITEQYSKDIKMTFGIDKYKINSIIKGKYNKTDAHTLTHQEGTISNMEFKETYKYLGYQQSITLNHTEIKNKLRTKYKQRLTTILKTKLSARNLTKAINTYAVPILTYSFGIINWSETELNALNTLTRTTCNKHLIHHSHSAVERFTIKRKNGGRGIIDIKNLHYAQVQNLRLYFRNKSNDSPLHKAIVHLSTSGTPLKLNNTQYDPTQKIQSEEEKIEKWRNKALHGKYLQQIEQPHIDKEASNSWLTKGNIFGETEGFLVSIQDQVIKTRNYSKYILKERIDTDKCRLCHQTTETIEHITGGCRALANKEYTHRHDNVAKHIHQQLALKYKLLETYTPYYQYKPKNVLENTDTKLYWNRDIITDRTVLSNRPDLTLTLKRTKTTYLIDISVPNTNNLKQKFTDKIQKYIPLADEIKQMWHQDFVRIIPIIISSTGVIPKTLLNAIELLQLPKHTYITLQKSVVLDTCSIVRRFMNPSSLPIHTTESENYNTSTTCDTQNLPSLHLSTLLGQTKLPSHLA

SEQ ID NO: 1396 - protein, 1359 aa, Thymelicus sylvestris
MEKSVKRKYSLRPLLGGRRGTSGVGAGCDSMRTADGLELSRRAPAGHVPEVTTADIISSPSSPTSSTNSLFQSPNSSPHSYENPSTSRSSTTSPMSFNVARGPMANLPAPINDTTNSTQGSRRDTNILRVESIRNTSRSLITPTHHEHDTPATSILREMLPPTTLGGKSRTRMKWTDQINRQLLRCYYRVTNCEKDLTAYRPLLHHAFVEIYPELQHITQQRLSDQIRVIHNNNRISLAERTRIKQEILEVISDGNTLNQNDIPLTTNIPTAYSNITISNSVENPIENMTSTPEPRDETSELVNENIQTNEMIIQHSPTFDSTQKGQDTHPNNEEIDCIFKENLIIYKNIDPTLRPTIPELQISFSTIKTVNTVNNILHKYLQDKETLTIEELHTIIYCAAMTVTFVHIKSRKQNKNSDNINNRNKNNQKQPPWKKRITTQIATLRKNIGRMTQYIKGNLSHKKQHLINPRNLNTDEFIDELDKNKQKLSAYTKRLKRYEESNRRKADNNLFNNNQKLFYRNIQSENIKITQTPDKTQVQQFWENIWSTPEEYNKDAEFIESEKKETENIVPMPPIVIDTEDVKFAVRKTHNWKAPGPEKIQNYWLKYLTATHNHLANTLNALIHEPHNMPQFLTQGITYLKPKDSDTKNPSKYRPITCLPTIYKLLTSIITHKLNIHISLNNIIPEEQKGCRKGSMGCKEQLVIDTEIHNQAKQRHRNLFYAYIDYQKAFDSVPHSWLLYILRLYKTDDSLVNFLQHIMTTWSTILNIHTDNGTVKTNSIKISRGIFQGDSLSPLWFCLAINPLSRILNKTNYGYTLDKTNNIKITHLLYMDDIKLYAANRQQLNQLITITEQYSKDIKMTFGIDKCKINSIIKGKYNKTDAHTLTHQEGTISNMEFKETYKYLGYQQSITLNNTEIKNKLRTKYKQRLTTILKTKLSPRNLTKAINTYAVPILTYSFGIINWSETELNALNTLTRTTCNKHLIHHSHSAVERFTIKRKNGGRGIIDIKNLHYAQVQNLRLYFRNKSNDSPLHKAIVHLSTSGTPLKLNNTQYDPTQKIQSEEEKIEKWRNKALHGKYLQQIEQSHIDKEASNSWLTKGNIFGETEGFLVSIQDQVIKTRNYSKYILKERIETDKCRLCHQTTETIENITGGCRALANKEYTHRHDNVAKHIHQQLALKYKLLETYTPYYQYKPKNVLENNDTKLYWNRDIITDRTVLSNRPDLTLTLKRTKTTYLIDISVPNTNNLKQKFTDKIQKYIPLADEIKQMWHQDFVRIIPIIISSTGVIPKTLLNAIELLQLPKHTYITLQKSVVLDSCSIVRRFMNPSSLPIHTTESENYNTSTTRDTQNLPSLHLSTL

SEQ ID NO: 1397 - protein, 1355 aa, Zera sp.
MEKSTKRNYNLRPLPGGRRGTPGVDAGCDSMRTVDGLELSRRAPAGHVPEFVTAEIISNPLSPISSTHSLFQSPNSSPHSYENPSTSRSTTTSPMPINVARGLLANSLVPIIDTTNATRGSQRDTDYTCVEINSHTRTLRTPTISYEDRPTNSILHEMLPATTLSGKTRQRMKWTDEINRQLLRCYYKVTKCETDTTAYRPLLYDMFIENYPELQHLSQQRLSDQIRVIHKNNRISPSERQRLKQEIASIISTNHDNNSFSNNTSYTQNNQTAHNRTNDTLTIMTDNNIEHVSQNTHLPTDNTIYNSENIHTLPQQTTAYNTDVLDNVYIENTFRENLTKYQNIDPTLRPTIPKLQISRFVIKVVNVVNNILHNHLQDKETVPIEELHTLIYSAAITVTSLCIKPKKQNNILQNLSNTHKQPRWKIRLTLQIESLRRDIGRLTQYLNGHITLKKQHKINPKSLNTDQLIEELDNKKQKLAAYTKRLKRYEESNRRKKDNNLFNKNQKLFYRNLHTEHNKITHTPDKTHIQQFWENIWSIPAVHNSEADFIKLEEKDADKLDTMPPVEINIEDFRHAISKTLNWKAPGPEKIQNYWLKYLTSTHNHLVNAFNTLLKEPHHTPSFLTQGITYLKPKDTDTTNPANYRPITCLPTLYKLLTSIITHKLNTHISINNIIPEEQKGCCKGSMGCKEQLVIDTEIHHQVKQKHRNLYYSYIDYQKAFDSVPHSWLLHVLKLYKTDNNLLSFLQHIMTIWTTTLNIHTDKGTIKTNQVKISRGIFQGDSLSPLWFCLAINPLSKILKNTNFGYTLDKQNNIKITHLLYMDDIKLYAANRQQLNNLLTLTEQFSKDIKMTFGIDKCKLSSIIKGKYKQTHTHILTQQPGSINNMKFRETYKYLGYQQSTSLNHTEIKSTLKSKYTQRLNSILKTKLSARNKTKAINTYAVPILTYSFGIIKWSETELNAINTLTRTTCNKHNIHHSHSAVERFYIKRKNGGRGFIDIKNLHYNQVYNLRTYFLQKANDSPLHKSLTNLTTSGTPLLLNNSQYNPKIKIHTEDEKLVNWKNKVLHSKHPLQLDQTHIDKEASNSWLTKGNIFGETEGFFIAIQDQIIKTRNYSKYILKERLDTDLCRLCHKTTETIDHIIGGCSALAKKEYTYRHDNVAKHIHQLLALKYKLLQTHTPYYEYKPKNVLESKDVKLYWDRDIVTDRTILSNRPDITLTLKATKTTYLIDISVPNSNNLKPKFTEKIQKYVPLSDEIKQMWHQNTVRVIPIIISSTGVIPKTLFNALQVLQLPKTTYIPLQKSIVLDTCAIVRRFMNPSSLSLQISNSENVPISTTLNTHTPITRETHINQNTLNT

SEQ ID NO: 1398 - protein, 1325 aa, Quadrus cerialis
MRTVDGLELSRRAPAGHAPEVTTAEIIISNPSSPISSTHSLFQSPNSSPHSYENPSTSRSTSTSPMSANVALWPMANLQVPITDTISSAQEYEINVNIPSAETHIKPLRSLSTSTLSKDDRTTSSVLQEIFPATTLGGKSRQRMKWTDDINRKLLCCYYKVTNCEKDLTMYRPLLHHMFIEIYPELQHITQQRLSDQIRVIHKNNRISPSERLRIKQEIAETISSTIDSQRSQSENNIDTTNTTENTSQDNTLYPTDAHHRNFLTQNDTHPNDASTLTTTYPTPESISENSELNYTKIESTFKENLIKYQDTHPTLRPTIPKLQISRLTIKTVNTMNDVLDKYLQDKEVLSIEELHKIIYCSALTVTLFHTKTKKHINNTKNNTTAQKQPPWKIRLIKQIESLRKTIGCITQYIRGELSQKKQNKINPQNLNTDNLINELDKSKQKLAAYTKRLKRYEESNKRKADNSLFNNNPKVFYRNLNSHHLDITHAPEQSQLHQFWENIWSNPEEHNNESDFIHSEQKHTENIEIMPPIAVNLEDVQYAVKKAHNWKAPGPDKVQNYWLKYLTATHHHLANTFNELIQKPHSMPTFLTQGITYLKPKNTDTTNPANYRPITCLPTLYKLLTSIITNKLHTHISRNNIIPEEQKGCSKGSMGCKEQLIIDTEIHYQAKQKHRNLFYSYIDYQKAFDSVPHSWLIHVLQLYKIDENLLKFLKHTMINWTTTLNIHTGTGTLRTNPIKISRGIFQGDSLSPLWFCLAINPLSRILNQTKYGYTIDKQNNTKITHLLYMDDIKLFAANRKQLDHLLTLTEEFSKDIKMTFGVDKCKVNCIIKGKHKETHEHILTQQEGIISNMEFKETYKYLGYQQSTSINHTEIKNTLRSKYKQRLNAILKTKLSARNKTKAVNTFAIPILTYSFGIIKWSETELNALNTLTRTTCNKHNIHHTHSAVERFTIKRKNGGRGFIDIKNLHYSQIHNLRSYFHNKASNSNIHKAINNLPTSGTPLMLNNTQYDPHSKIQSEEDKIVNWKRKSLHSKHANLLEQTHIDKEASNSWLTKGNIFGETEGFFVAIQDQIIKTRNYSRHILKEKIETDKCRLCHQTTESIDHITGGCSALANKEYTYRHDNVAKHIHQTLALKYKLLQTYTPYYQYKPKNVLENKEVKLYWDRDIITDRTILSNRPDLTLTLKTIKTTYLIDISVPNSNNLKQKFTEKVQKYIPLADEIKQMWKQDTVRVIPIIISSTGVIPKSLFNALQSLQLPKNTYIPLQKSVVLDTCAIVRRFLNPSSLSLQQHYYENPHTFTTRETQNTLTTLNSHTIQITSNTP

SEQ ID NO: 1399 - protein, 1265 aa, Thymelicus sylvestris
MSFNVAQGPMANSLVPIYDTINSTQGFNRDTNNICVESNQNITCSSSTPANSNYEAPTKSVMQEMFPATTLSGKSRTRLKWTDQINRQLLRCYYRVTNCETNLTAYRPLLHHTFIEIYPELQHITQQRLSDQIRVIHKNNRISLAERQHIKQEISELLSTGNIVNQNNVPLNNNMLHTQNNQISNEINSTCNPMVTLTENMTFTPEPINDTMCPVTENVQNSESPIEPPSTSELIQNNHDNNLNYREIENKFKENLIKYKNVDPNLRPIIPKLQISFSTIKTVNTVNNIIHTYLQDKETLLIEELHNILYCAAITITSLHTKTKIQNNNTDKLNNRNKNKNVEPFWKKRITTQIATLRKNIGHMTQYIKGNLSQKKQRKINPKNLNNDEFIDELDKNKQKLSAYAKRLKRYEESNRRKVENNLFNSNQKIFYRNLNSEHIKITQAPDKTEVQQFWEKIWSTPEEHNYDAECIKLEQKETENIDPMPPIVIDVEDVKYAVRKTQNWKAPGPDKIQNYWIKYLTATHNHLAHTFNVLLHEPHNLPPFLTQGITYLKPKDSDTTNPSKYRPITCLPTLYKILTSIITQKLNKHISLNNIIPEEQKGCRKGSMGCKEQLVIDTEIHNQAKQKHRNLFFSYIDYQKAFDSVPHSWLIDILKLYKTDDILLNFLQYAITTWTTVLNIHTNNGTVRTNPIKISRGIFQGDSLSPLWFCLALNPLSRILNKTNYGYTLDKQNKVKITHLLYMDDIKLYAANRQQLNHLLTLTEQFSNDIKMTFGIDKCKINSVIKGKYKETDSHTLIHQEGIINSMEFRDTYKYLGYQQSTTINHTEIKNTLKSKYKQRLTTILKTKLSARNLTKAVNSFAVPILTYSFGIINWSETELNALNLLTRTTFNKHNIHHSHSAVERFTIKRKNGGRGVIDVKNLHYTQVQSLRTYFQNKSKDSPLHKALINSPTSGTPLKLNDAQYKPNEKIQTEEEKIEKWKKKVLHGKHPQHLDQPHIDKEASNRWLTKGNIFGETEGFLVAIQDQIIKTRNYTKFILKERIESDKCRLCHQTTESIEHITGGCKTLATKEYTHRHDNVAKHIHQQLALKYKLIQIYTPYYQYKPKNVLENNDTKLYWNRDIITDRTILSNRPDLTLTLKTEKITYLIDISVPNTNNLKQKFADKIQKYIPLADEIKQMWHQDIVRIVPIIISSTGIIPKTLHNALEFLQLPKNTYIPLQKSVVLDTCSIVRRFMNPSSLPLHSSDSDNHNISKTHESQTEHT

SEQ ID NO: 1400 - protein, 1379 aa, Ouleus salvina
MSLTSRLMHLMPTTSRQPSQTNGPSPKCNMEKLAKRKYNLRPLPGGRRGIPGVGAGCDSMRTVDGLELSRRAPAGNIPEITTAEIISNPSSPISSTHSLFQSPNSSFHSYENPSTSRSTTTSPMSTNVALWPTANLHVPITDTNSASEFKIDGNIASAETHINPLHSLSITTSSKDNRTISSVLQEMFPATTLGGKSRQRMKWTDDINRELLRCYYKVTNCEKDLTMYRPLLHQMFIEIYPELQHITQQRLSDQIRVIHKNNRISPSERQHIMREIAETISNTIVTRKSQSDNNIEITNTVENSSQSISLHPTDIDTHNKYSLSQNHTHSNDVSALSTTITISESTPENSELYYTKIENTFKENLIKYQNTHPARRPTIPKLQISKLTIKTVNTMNDVLHKYIQDKYALSIEELHKIIYCSAMTVTSFHTKTKNHINNTKNSTTAQRQPPWKIRLIKQIESLRKTIGCMTQYIRGNLSQRKQNKINPHNLSTDNLIDELDKNKQKLSAYSKRLKRYEESNKRKADNSLFNNNQKVFYRNLNSHHFKITQAPEQSKLHQFWQNIWSIPEEHNNDADFIHSEQIHTDTIELMPPIAVDIEDVQNAVKKTHNWKAPGPDKVQNYWLKYLTATHNHLAKAFNELIQKPHSIPTFLTQGITYLKPKNTDTTNPANYRPITCLPTLYKLLTSVITHKLHTHISRNNIIPEEQKGCSKGSMGCKEQLIIDTEIHYQAKQKHRNLFYSYIDYQKAFDSVPHSWLIHVLKLYKVDENLLKFLKQTMTTWTTTLNIHTSNGTLRTNPIKILRGIFQGDSLSPLWFCLAINPLSRILNQTKYGYTIDKQTNTKITHLLYMDDIKIFAATRQQLDHLLTLTEQFSKDIKMTFGVDKCKVNCIIKGKHRNTHEHILIQQEGIISNMEFKETYKYLGYQQSTSINHTEIKNNLRSIYKQRLNTILKTKLSARNKTKAVNTFAIPILTYSFGIIKWSETELNALNTLTRTTCNRHNIHHTHSAVERFTIKRKNGGRGFIDIKNLHYTQVHNLRSYFHNKANNSHIHKAIATLPSSGTPLMLNNAQYDPQSKIQTEEDKIIKWKTKALHSKHPHLLEQTHIDKEASNSWLTKGNIFGETEGFFVAIQDQIIKTRNYSRHILKEKIETDKCRLCHKTAESIDHITGGCSVLANKEYTHRHDNVAKHIHQILALKYKLLQTYTPYYQYKPKNVLENKDVKLYWDRDIITDRTILSNRPDLTLTLKTIKTTYLIDISVPNSNNIKQKLTEKTQKYIPLADEIKQMWKQDSVRVIPIVMSSTGIIPKALFNALQALQLPKNTYIPLQKSVVLDTCAIVRRFLNPTSLSIQQHSSDNPHSASTRDTQNIPATLNCHRNTP

SEQ ID NO: 1401 - protein, 993 aa, Zera sp.
MNDVLHKFMHDKEIISIEELHKIIYCSAMTVTSFHTKTKKHINNTQYIKTAQKQPPWKIRLIKQIESLRKTIGCITQYIRGNLSQKKQNKINPQNLNTDHLIDELDKNKQKLSAYTKRLKRYEESNKRKADNSLFNKNQKVFYRNLNSQHFEITQAPEQSQLHQFWENIWSTPEEHNNNADFIHSEQKYTDNIELMPPVSVNIEDVQYAVKKTHNWKAPGLDKVQNYWLKYLTATHNHLANTFDVLIQKPHSMPTFLTQGITYLKPKDTDTTNPANYRPITCLPTLYKLLTSIITHKLHTHITHNNIIPEEQKGCSKGSMGCKEQLIIDTEIHYQAKQKHRNLFYSYIDYQKAFDSVPHSWLIHVLKLYKIDENLLKFLKQIMTNWNTTLNLQTGTGTIRTNPIKISRGIFQGDSLSPLWFCLAINPLSRLLNHTKYGYTIDKQNNTKITHLLYMDDIKLFAANRQQLDHLLTLTEKFSKDIKMTFGVDKCKINCIIKGKHKETHEHILTQQEGTISNMEFNETYKYLGYHQSISINHTEIKNTLKSKYKQRLNTILKTKLSARNKTKAINTFAVPILTYSFGIIKWSETELNALNTLTRTTCNRHNIHHTHSAVERFTIKRKHGGRGFIDIKNLHYSQIHNLRSYFHNKANNSHIHKAITNLPTSGTPLMLNNLQYDPQSKIQTEEDKVVKWKRKTLHSKHPHLLEQTHIDKEASNSWLTKGNIFGETEGFFVAIQDQIIKTRNYSRHILKEKIETDKCRLCHQTTESIDHITGGCSALAKKEYTYRHDNVAKHIHQTLALKYKLLQTYTPYYQYKPKNVLENKDVKLYWDRDIITDRTILSNRPDLTLTLKTLKTTYLIDISVPNSNNLKQKFTEKIQKYIPLADEIKQMWKQNSVRVIPVIISSTGVIPKTLFNALQLLQLPKNTYIPLQKSVVLDTCAIVRRFLNPSSLSLQQHYFEKPHSSSTRDTQNISATLNTHTILLSAKTLRNT

SEQ ID NO: 1402 - protein, 930 aa, Nastra julia
MTQYIKGNLSEKKQRIINPKNLTTDEFIEEIDKYKQKLAAYTKRLKRYEISNKRKSDNNLFNNNQKIFYRNLNSENIKITHAPHETQVQQFWEKVWSTPEDHNNDAECIELEKKEMESIEPMPPFIIDIEDVKYAVKKLHNWKAPGPDKIQNYWLKYLTATHNHLTNTLNTLILEPHNIPTFLTQGITYLKPKDSDTTNPSKYRPITCLPTLYKLLTSIITHKINSHITHNNIIPEEQKGCRKGSMGCKEQLVIDSEIHNQVKQKHRNLFYSFIDYQKAFDSVPHSWLIYILKLYKINDNLVNFLKHVMTTWSTSLNIHTDSGTLKTNPIKISRGIFQGDSLSPLWFCLALNPLSRILNNTNYGYILDKQNNIKITHLLYMDDIKLYAANRQQLNHLLTLTEKFSKDIKMTFGIDKCKVNSIIKGKYKETDSHTLTQQEGVICSMEYKETYKYLGYQQSTILNHTEIKNTLKSKYKHRLTTILKTKLSARNLTKAINTYAIPILTYSFGIINWSETELNALNILTRTTCNKYNIHHNHSAVERFTIKRKNGGRGFIDIKNLHYMQIHNLRLYFQNKAKDSPLHRTLLHSPISGTPLKLNNTQYNPIEKVQSEEEKIDRWKKKILHGKHIQHLEQPHIDKEASNSWLTKGNIFGETEGFLVAIQDQIVKTRNYAKFILKERIETDKCRLCHQATESVEHITGGCRVLASKEYTYRHDNVAKHIHQQLALKYKLLKTYTPYYQYKPKNVLENCDIKLYWNRDIITDRTVLSNRPDLTLTIKATKTTYLIDVSVPNTANLKQKYAEKIQKYIPLSDEIKQMWHQELVRIVPIIISSTGIIPKTLFDALQFLQLPKNTYIPLQKSVVLDTCSIVRRFMNPSSLPIHTTNSDNCNAPATHDTYNTPDTRTTHDTHNIPDTHNTHDTHNTPDTHTT

SEQ ID NO: 1403 - protein, 1200 aa, Taractrocera maevius
MSNDVVQDKNCPIPISDIANTARLSEINQASNCADTYTYSHTHNSNTPGRSVLQEMLPATTLAGKSRQRMKWTHEINRELLRCYYLVTNCEENLTAYRPLLHKKFIETLPELSHLTEQRLADQIRVIHKNNRILPPEREQIKQAAQQVMNTENQTNSTNLTQNINTLDQTDNIHSMSTSAQEHTTTTQIENETLQQPTLVRNQQVYEHSQTQDTPITSQESVDIKKIEDTFNEVLTKYTGTDPTLRPIIPKPQITKTFIKTVNIINNVIRAHLQTHQEEITIEKIQEVIYCAAITVTILNSKQKENNKHYKSNDNNKTMTNRERTPRWQKRLENKIITLRAIIGKLTQYINGNLNLKNQKKVNPNNKNIDEINDELDKNKQKLQAYSKRLKRYKISNKRKSDNSLFNKNQKIFYRKFNTETFEIKESPNINEIQKYWENLWSKPVHHNPHPSWAAIEEKEVQYIDAMPEINITKTDVTQAIKNTLNWKAPGPDKIQNYWIKYFTSTHEHITRTFNHLIHNPQDLPPFLTLGITYLKPKDHDTANPGKYRPITCLPTMYKLLTSIISHKLNSHLTHNKIISEEQKGCSKGSMGCKEQLVIDTEIHNQVIQKHRNLYYSYIDYQKAFDSIPHSWLLHVLKIYKADNTLIKFLKYTMTKWKTKLHIRTSLNTPTIKISRGIFQGDSLSPLWFCLALNPLSRILNNTGHGYVINRDNDIKLSHLLYMDDIKLYAANRLQIEHLIKLTEKFSMDIKMMFGIDKCKINSIVKGKHTETDSYRLELQNGVIGSMDPKESYKYLGYQQSTSINNTEIKATLKTKYKQRLKTIFSTQLSARNKNKAINTYAIPILTYSFGIIKWSDTELEALNTITRTMSNKYNFHHTHSAVERFTLKRKFGGRGFIDIKNLHYIQIDNLRSYFYIKANECSIHRSIVNLTNPRTPLQLNNRHFDPKNKIVTDEQKLENWKKKALHGRFPHQLGQEHIDRNASNTWLTKGNIFGETEGFLIAIQDQIIKTRNYSRYILKETIETDKCRLCHQTTETIEHITGGCSTLANKEYTHRHDNVAKHIHQQLALKYKLLDQYTPYYKYKPKNVLENSTVKLYWDRDIVTDRTILSNRPDITLTLKSTKTTYLIDIAVPNTHNLKQKYTEKTQKYIPLSDEIKQMWHQEHVKIVPIIISSTGVVPKSLKPALKLLDLPENTYIPL

SEQ ID NO: 1404 - protein, 1393 aa, Epargyreus clarus
MRLRNRQIPQAGTREGESRPEPSGSGCPTYSGGGNVSHKTAQSHTVAVESPSHITTHSSSPISSTHSLFQSPSSSPHSYEFQHSPSTSTTTTPLSCDVAQEAHAISPVPITDIINPTRVPQNNVQNRVNHNTHSLSPITNTPARSVLQDMLPATTLAGKSRQRMKWTDQINRELLRCYYVVTHNETNLTAWRPQLHQKFAVCFPELSHISEQRLADQIRVIHRNNRLTFIERERIKESVSLILSSSNTSNDCTITNNIQTPLNTSPTINNFGLITHSSSQAFNPQHTQTLNHLHTQHTHTQHSHTHSLPINTSTQPCQAPENSEHSQTQEPQRTMKPLDPIDYDTIENTFAEMLINYTGTDPTLRPPIPKLQATRYTIRTINTVNEIVEKHLKTKNSVTLEEIHTLIYCAAQTAATLHTKHIKKSVNNNNNYNPNTIIKQKKPQWEERIEKKIITLRKEIGQLTQYLNGNLTQKKQNKLNPNNRSRNEILEQLDKNKQKLQAYSKRLRRYKISNQRKAHNKLFTTNQKLFYQKLDTDHIQITQNPNKDDIHNYWKNIWSKPVLHNAHPSWTEIEDQEINNIEAMPEIIIDKDDVTQAIKKTLNWKAPGPDKIQNYWIKYLPATHKYIANTFSYLMNNPQDTPSFLTQGITYLKPKDNDTTNPSKYRPITCLPTIYKLLTSIISSKLNTHITQNHIILEEQKGCCKGSRGCKEQLIIDTEIHNQVKQKHRNLYYAYIDYEKAFDSIPHSWLIHVLKIYKVDNKLIDFLQYTMNHWTTKLNLRTNNTSICTQPLKILRGIFQGDSLSPLWFCLAINPLSRILNKTGYGYVIDRESNIRLTHLLYMDDIKLYASNRQQIDHLLKLTEQFSTDIKMTFGTNKCKINSIIKDQQKETDPFELEIQGKRIDSMESKETYKYLGYQQCTSINHTHIKNTLKIKYKQRLHKILNTQLSARNKVKAVNTYAIPILTYSFGIIKWSDTELEALNTITRKASNTHSIHHIHSAIQRFTLKRKFGGRGFIDIKNLHYTQIDNLRTYFLTKAMESDLHKAIVRLSISGTPLQLNNSVYDPKLKILSDEQKLENWKKKALHGKYPHQLEQDHIDCNASCTWLTKGNIFGETEGFLIAIQDQIIKTRNYSKYILKEAIDTDKCRLCHQTTETIDHITGGCSVLANKEYTHRHDNVAKHIHQQLALKYKLLDSHTPYYQYKPKNVLENNTTKLYWDRDIITDRTILSNRPDITLTLKSTKTTFLIDIAVPNTHNLKQKHTEKKIQKYIPLADEIKQMWHQETVRIIPIIISSTGVIPKTLKTALKLLDLHENTYIPLQKSIVIDTCSIVRRFLNPTTLTLQTHRDTLPDTATQNTSTRNTTHNTQTHTPNTSISTHSNHANTQESGYLA

SEQ ID NO: 1405 - protein, 1283 aa, Blastobasis adustella
MRRSTRIKNKNSAQCLTAAENGSAGNSSPISSTQSLFSSPSSSPKSFQNPTLSQSTTVSPMSYDVTQEASADFPASISDIINAARNIAYGESNNGVQTNTQINIDTNTPARSALQEMLPATTLAGKSRQRMKWTDLINRELLRCYYMVTQCETNLTAYRPLLHKMFIEIFPELSHLSEQRLADQIRVIHRNQRIAAAERERIKQLVSLSVTEEISGTVHDTSLFDTTSPLIYREITNNTHNVSVNREQYATSTQPPTDLSLQQTISQTDDPDTQNYEPESLHINYNTIEDTFTEMLIKYSHTDATLRPTIPKLQITRKTIKTVNTVNEIIHKHLENRETIDIDHIHEVIYCAAMTVTTLHAKPKNNENGYRHKSSNFKDRKQQWERRLENKITILRKEIGQLTQYLNGNLTQKKQRRINPNNQSKDEIVNHLDNYKQKLQAYSKRLRRYKLSNQRKSDNILFRTNQKLFYRNLNTDNIHITQPPNITDVQDFWENIWSKPVEHNRNTPWSRIEEQDALNIESMAEVFICKDDVTQAIMKTLNWKAPGPDKIQNYWIKYFTSTHEHIANAFNHLIHNPQDTPSFFTQGITYLKPKDNDTTNPAKYRPITCLPTIYKLLTSIISHKLNLHIAHNKIIPEEQKGCSKGSMGCKEQLVIDTEIHNQVKQKKRNLSYAYIDYQKAYDSVPHSWLIEVLKMYKIDYGLIQFLQHAMAHWTTTLNIHTDNKTINTKHIKILRGIFQGDSLSPIWFCLALNPLSKILNGTGYGYNIDREHSIKLSHLLYMDDIKLYAANRQQLDHLLKLTEDFSRDIKMTFGTDKCRINLIVKGQHKDTEPYDLEQQGGKIDNMEARETYKYLGYLQSTSINHSEIKSTLKTKYKQRLNKILKTKLSARNITKAVNTYAIPVLTYSFGIIKWSDTELEALNTVTRTACNKQNMHHIHSAVQRFGGRGFIDIKNLHYSQIDNLRTYFQTKANQSTLHEAIANITLSGTPLQLNNSQFDPKQKILHDDKKIENWKKKSLHGKYPHHLDQGHVDRTASCTWLAKGNLFSETEGFLIAIQDQIIKTRNYSKYILKEAITTDKCRLCHQTTETIDHITGGCSILANKEYTHRHDNVAKHIHQQLALKHKLFETYTPYYKYKPKNVLENNTAKLYWDRDIVTDRTVLSNTPDITLTLKSTKTTYLIDVAVPNTHNLKQKHIEKIQKYLQLADEIKQMWHQETVRIIPIIISSTGVVPTSLSASLNTLQLPDTTYIPLQKSIVIDTCSIVRRFLNPTSLSYDISPETN

SEQ ID NO: 1406 - protein, 1193 aa, Pythonides amaryllis
MKWTDHINRELLRCYYIVTHNETNLTAWRPLLHKKFTELNPELSHLSEQRLADQIRVINKNNRIQISERDDLKKSVSILLNTQNNQMLNPDNTLSQIILPTTQTVIHQSNSQDIAFFPRQMDTTPQSHQHPIDTEHSDTQRSHTSDILIDAPDHKNIENTFKEMLIKYTGTDPTLRPIIPRLRITRNGIKTVQTMNEIIKKHLQAKENIPIEELHEIIYCAACTVSIHTTKRPENNTSAKIGITSKQNKQKWEKRLENKIAMLRKIIGQLTQYLKGNLTFKKQQKLNPNKKSNNDILEQLDTNKQKLQAYSKRLRRYKISNQRKQHNKLFNINQKHFYQTLNSEQIHIQQVPDKEELEKYWKNIWSKPVQHNTHVTWNKIEEHETENINSMPEITIHKTDVTEAIKKTLNWKAPGPDKIQNYWIKYLPCTHEHIATAFNHLMHNPQETPNFLTQGITYLKPKDNETVISWICYPVNYRPITCLPTIYKLLTSIIAHKLHIHISQNQIIPEEQKGCRKGSQGCKEQLIIDTEIHNQVKQKHRNLFYAYIDYQKAFDSVPHSWLTHILRIYKVDNKLINFFKHTMKNWNTRINLRTPKTSFSTHPIKILRGIFQGDSLSPLWFCLALNPLSKILNETSHGYIIDRNTNTKINHLLYMDDIKLYAANRQQIDHLLTLTEKFSTDIKMTLGTNKCKINSIIKGQHKDTNQFDLNIQGGKIDSMGPKETYKYLGYHQSTSINHTEIKNTLKDKYKQRLNKILNTQLSARNKIKGINTYAVPILTYSFGVIKWSDTELEALNTLTRTTSYKHNIHHIHSAVQRFTLKRKLGGRGLIDIKNLHYTQIDNLRTYFLSKAQENDLFKAIVKITQTGTPLQLNNNQFDPKQKIIKDKQKLDNWKMKALHGKYPHQLDQDHVDRNASLSWLTKGNIFGETEGFIVAIQDQIIKTRNYSKFILKQPIESDKCRLCHQSTETTDHITGGCSILANKDYTHRHDNVAKHVHQQLALKHKLLDKYTPYYQYKPKNVLENNTAKLYWDRDIITDRTILSNRPDITLTLKSLKTTYLIDIAVPNTHNLKQKQTEKLQKYTPLADEIKQMWHQDFVRIVPIIISSTGVIPKSLKSAFKLLDLHENTYIPLQKSIIIDTCSIVRRFLNPTSLTLQDDDQRTNTLTQNISTFTNDTQFGTHNTTNTHLNTLHT

SEQ ID NO: 1407 - protein, 1218 aa, Lycaena phlaeas
MLPATTLAGKSRQRMKWTNKINQELLRCYYIVTQCETNLTAYRPLLHQKFTQLFPELSNLTEQRLADQIRLIHKNNRISAPEREKIKQLVIQAIHRPEELDEQISINNTQQSNMDSFTDNNNREHATSYTQITSPQNLTENIHHITPIPQTSHLIQNENTQTILTEINEDDNALEQAINLDKIENTFAEMIIKYAGTDPTLRPSIPKLKVTRASIKIVNTVNDIVGKHLNDKAIITIGEIHEAIYCAAMTVTVIYNKHKYGGRTRDNTTHRINIQRQKKPHWEKRLTDKISTFRKQIGQLTQYLNGNLNHKKQKKLNPNNKSKEEIIDQLDICKQKLQANSKRLRRYKLSNQRKSDNNIFNTNQKLFYRSLNTENIKITQAPNVTDLQNYWENIWSKPIQHNPNIAWIESEEHEVRNIEMMPEITIEKDDVIQAVKKTLNWKAPGPDKIQNYWLKYMTTTHQYLAQTLNSLVHSPQEMPSFLTQGVTYLKPKDSDTTNPAKYRPITCLPTIYKILTSIISQKLYSHISQNKIIPEEQKGCSKGSRGCKEQLIIDTEIHNQVKQKHRNLHFSYIDYQKAYDSVPHSWLLHILKIYKIDNRLINFLQIIMKKWTTKLILRTDGLTLDTSAIKISRGIFQGDSLSPLWFCLAINPLSRILNKTGYGYIIERENDVKVTHLLYMDDIKLYAANRQQLDQLLSLTESFSDDIKMKFGTDKCKINCIIKGQHKETIPHILELQGGTIDSLENRDTYKYLGYLQSTCINHTEIKNTLKLKYKQRINKILNTQLSARNKTKAVNTYAVPILTYSFGVIKWSDTELEALNKLTRTTCYKHNIHHIHSAIQRFTLKRKFGGRGFLDIKNLHYTQIHNLRLYFLNKAKESAIHKAIVNISHPGTPLQLNNDQFNPQQKILKDEQKIEIWKGKALHGKYPFQLQQDHVDKNASCTWLMKGNIFGETEGFLIAIQDQVIKTRNYARHILKEAIQTDKCRLCHQNTETIDHITGGCSVLANKEYTHRHDNVAKHIHQQLALKHKLLDTYTPYYKYKPKNVLENNTTKLYWNRDIITDRTILSNRPDITLTLKHTKITYLVDIAVPNTHNLKQKHTEKIQKYIPLADEIKQMWNQDTVTIIPIIISSTGVVPKTLNTTYILLLFILCINYYYFKICVCNKVILLLLYYYYIPLQKSIVLDTCSIVRRFLDPTMLSFNENRDITNVSTQQHTEH

SEQ ID NO: 1408 - protein, 1350 aa, Lycaena phlaeas
MRLRSKRVLPQAGTSVNRAGESRTRLTASGSPTYSGGGTVSQESAQFQTVAAIGTTPVESTSHSSTPISSSHSLFQSPSSSPQWCRYGSTPESSSSLSYDVAQEAIALYPEPITDSIQPTCISENYALINTVDTNSSPLSLSIDTPVRSVLQEMLPATTLAGKSRQRMKWTNKINQELLRCYYIVTQCETNLTAYRPLLHQKFTQLFPELSNLTEQRLADQIRLIHKKNRISAPEREKIKQSVIQAIHRPEELDEQISINNTQQSNMDSFTDNNNREHATSYTQITSPQNLTENIHHITPIPQTSHLIQNENTQTILTEINEDDNALEQAINLDKIENTFAEMIIKYAGTDPTLRPSIPKLKVTRASIKIVDTVNDIVGKHLNDKAIITIGKIHEAIYCAAMTVTVIYNKHEYGGRTRDNTTHRINIQRQKKPHWEKRLTDKISTFRKQIGQLTQYLNGNLNHKKKKKLNPNNKSKEEIIDQLDICKQKLQANSKRLRRYKLSNQRKSDNNIFNTNQKLFYRSLNTENIKITQAPNVTDLQNYWENIWSKPIQHNPNTAWIESEEHEVRNIEMMPEITIEKDDVIQAVKKTLNWKAPGPDKIQNYWLKYMTTTHQYLAQTLNSLVHSPQEMPSFLTQGVTYLKPKDSDTTNPAKYRPITCLPTIYKILTSIISQKLYSHISQNKIIPEEQKGCSKGSRGCKEQLIIDTEIHNQVKQKHRNLHYSYIDYQKAYDSVPHSWLLHILKIYKIDNRLINFLQIIMKKWTTKLILRTDCLTLDTSAIKISRGIFQGDSLSPLWFCLAINPLSRILNKTGYGYIIDRENDVKVTHLLYMDDIKLYAANRQQLDQLLSLTESFCDDIKMKFGTDKCKINCIIKGQHKETIPHILELQGGTIDSLENRDTYKYLGYLQSTCINHTEIKNTLKLKYKQRLNKILNTQLSARNKTKAVNTYAVPILTYSFGVIKWSDTELEALNTLTRTTCYKHNIHHIHSAIQRFTLKRKFGGRGFLDIKNLHYTQIHNLRLYFLNKAKESAIHKAIVNISHPGTPLQLNNDQFNPQQKTLKDEQKIEIWKGKALHGKYPFQLQQDHVDKNASCTWLMKGNIFGETEGFLIAIQDQVIKTRNYARHILKEAIQTDKCRLCHQNTETIDHITGGCSVLANKEYTHRHDNVAKHIHQQLALKHKLLDTYTPYYKYKPKNVLENNTTKLYWNRDIITDRTILSNRPDITLTLKHTKITYLVDIAVPNTHNLKQKHTEKIQKYIPLADEIKQMWHQDTVTIIPIIISSTGVVPKTLNTALKTLQLPATTYIPLQKSIVLDTCSIVRRFLDPTMLSFNENRDITNVPTQQHTEH

SEQ ID NO: 1409 - protein, 1344 aa, Lycaena phlaeas
MRLRNKKVLPQAGTSVNRAGESRTRLTASGSPTYSGGGTVSQEAAQCQTVAAIGTTPVESTSHSSTPTSSRHSLFQSPSSSPQWSGNESTSSSSSSSLSCNVAQEASALYTEPITDTMQTTRISENYTLINTVDTNTPSSNSQIDTTARSVLREMLPATTLAGKSRQRMKWTNQINQELLRCYYIVTHCESNLTAYRPMLRQRFIQIFPELSNITEQRLADQIRTIHKNNRISASEREKIKQSVLHATNITQELIQPIINNDTHQINTNFSINNSREYTPDSHSLLENSQQILSITQTHDSITTRNIHTIPIESNDQNNTSEETINVDKIENAFNEMIIKYSGTDPTLRPTIPKLQITRATIKTVNIINDIVGKYLNNKITVTIEEIHEIIYCAAMAVISIHRKQEQICSNNASSTHRITANREKKPHWEKRLIDKISALRKQIGLLTQYLNGNLNRKKQQKLNPSNKSKDEMTDQLDICKQKLQANSKRLRRYKLSNKRKSDNKMFNNNQKLFYKNINTENINITQAPNLSDLQKYWENIWSNSTEHNQNTSWMLTEEQEVSDIEIMPEITIEKEDVTLTLKNTLNWKAPGPDKIQNYWLKYFTTTHQYLAQALNNLINHTHNIPEFLTQGITYLKPKHKDTTNPANYRPITCLPTIYKLLTSIISHKIQSHIVEYNIIPEEQKGCSKGSRGCKEQLIIDTEIHSQVKQKHRNLHYAYIDYQKAYDSVPHSWLLHILKIYKIDNRLIKFLQSIMAKWTTKLALKTNNATLSTPSIKITRGIFQGDSLSPLWFCLALNPLSRILNKTGYGYVIDRENGIKLTHLLYMDDIKLYAANRQELDHLIKITETFSDDIRMKFGIDKCKINSIIKGQHKNTTPHILELQEGTIDSLEHKDTYKYLGYLQSTSINHTDIKTTLKSKYKHRLNKILNTQLSARNKTKAVNTYAIPILTYSFGVIKWSDTELEALNTLTRISCYKHKIHHIHTAVQRFTLKRKFGGRGFIDIRNLHYSQIHNLRSYFLSKANNSNIHKAIVKISNSGSPLQLNNDQFDPQQKILKDEQKIENWKKKALHGKYPFVLQQEHVDKNASCTWLMKGNIFGETEGFLIAIQDQVIKTRNYARHILKEQIGTDKCRLCHQSTETIDHITGGCSVLANKEYTHRHDNVAKHIHQQLALKHKLLDTYTPYYKYKPKNVLDNNTTKLYWNRDIITDRTILSNRPDITLTLKHTKITYLVDIAVPNTHNLKQKHTEKIQKYIPLADEIKQMWHQDTVTIIPIIISSIGVVPKTLNTALETLQLPATTYIPLQKSIVLDTCSIVRRFLDPTMLSFNENRDITNVSTQQHTEH

SEQ ID NO: 1410 - protein, 1350 aa, Lycaena phlaeas
MRLRSKRVLPQAGTSVNRAGESRTRLTASGSPTYSGGGTVSQESAQFQTVAAIGTTPVESTSQLSTPISSSHSLFQSPSSSPQWCRYGSTPESSSSLSYDVAQEAIALYPEPITDSIQPTCISENYALINTVDTNSSPLSLSIDTPVRSVLQEMLPATTLAGKSRQRMKWTNKINQELLRCYYIVTQCETNLTAYRPLLHQKFTQLFPELSNLTEQRLADQIRLIHKKNRISAPEREKIKQLVIQAIHRPEELDEQISINNTQQSNMDSFTDNNNREHATSYTQITSPQNLTENIHHITPIPQTSHLIQNENTQTILTEINEDDNALEQAINLDKIENTFAEMIIKYAGTDPTLRPSIPKLKVTRASIKIVNTVNDIVGKHLNDKAIITIGEIHEAIYCAAMTVTVIYNKHEYGGRTRDNTTHRINIQRQKKPHWEKRLTDKISTFRKQIGQLTQYLNGNLNHKKQKKLNPNNKSKEEIIDQLDICKQKLQANSKRLRRYKLSNQRKSDNNIFNTNQKLFYRSLNTENIKITQAPNVTDLQNYWENIWSKPIQHNPSTAWIESEEHEVRNIEMMPEITIEKDDVIQAVKKTLNWKAPGPDKIQNYWLKYMTTTHQYLAQTLNSLVHNPQEMPSFLTQGVTYLKPKDSDTTNPTKYRPITCLPTIYKILTSIISQKLYSHISQNKIIPEEQKGCSKGSRGCKEQLIIDTEIHNQVKQKHRNLHYSYIDYQKAYDSVPHSWLLHILKIYKIDNRLINFLQIIMKKWTTKLILRTDGLTLDTSAIKISRGIFQGDSLSPLWFCLAINPLSRILNKTGYGYIIDRENDVKVTHLLYMDDIKLYAANRQQLDQLLSLTESFSDDIKMKFGTDKCKINCIIKGQHKETIPHILELQGGTIDSLENRDTYKYLGYLQSTCINHTEIKNTLKLKYKQRLNKILNTQLSARNKTKAVNTYAVPILTYSFGVIKWSDTELEALNTLTRTTCYKHNIHHIHSAIQRFTLKRKFGGRGFLDIKNLHYTQIHNLRLYFLNKANESAIHKAIVNISHPGTPLQLNNDQFNPQQKILKDEQKIEIWKGKALHGKYPFQLQQDHVDKNASCTWLIKGNIFGETEGFLIAIQDQVIKTRNYARHILKEAIQTDKCRLCHQNTETIDHITGGCSVLANKEYTHRHDNVTKHIHQQLALKYKLLDTYTPYYKYKPKNVLENSTSKLYWNRDIITDRTILSNRPDITLTLKHAKTTYLIDIAVPNTNNLKQKHTEKIQKYIPLADEIKQMWHQDTVTIIPIIISSTGIVPKTLSTALKTLQLSATTYIPLQKSIVLDTCSIVRRFLNSTMLSFSDSRAIADTSTHTPTTH

SEQ ID NO: 1411 - protein, 1350 aa, Lycaena phlaeas
MRLRSKRVLPQAGTSVNRAGESRTRLTASGSPTYSGGGTVSQESAQFQTVAAIGTTPVESTSHSSTPISSSHSLFQSPSSSPQWCRYGSTPESSSSLSYDVAQEAIALYPEPITDSIQPTCISENYALINTVDTNSSPLSLSIDTPVRSVLQEMLPATTLAGKSRQRMKWTNKINQELLRCYYIVTQCETNLTAYRPLLHQKFTQLFPELSNLTEQRLADQIRLIHKKNRISAPEREKIKQLVIQAIHRPEELDEQISINNTQQSNMDSFTDNNNREHATSYTQITSPQNLTENTHHITPIPQTSHLIQNENTQTILTEINEDDNALEQAINLDKIENTFAEMIIKYAGTDPTLRPSIPKLKVTRASIKIVNTVNDIVGKHLNDKAIITIGEIHEAIYCAAMTVTVIYNKHEYGGRTRDNTTHRINIQRQKKPHWEKRLTDKISTFRKQIGQLTQYLNGNLNHKKQKKLNPNNKSKEEIIDQLDICKQKLQANSKRLRRYKLSNQRKSDNNIFNTNQKLFYRSLNTENIKITQAPNVTDLQNYWENIWSKPIQHNPNTAWIESEEHEVRNIEMMPEITIEKDDVIQAVKKTLNWKAPGPDKIQNYWLKYMTTTHQYLAQTLNSLVHSPQEMPSFLTQGVTYLKPKDSDTTNPAKYRPITCLPTIYKILTSIISQKLYSHISQNKIIPEEQKGCSKGSRGCKEQLIIDTEIHNQVKQKHRNLHYSYIDYQKAYDSVPHSWLLHILKIYKIDNRLINFLQIIMKKWTTKLILRTDGLTLDTSAIKISRGIFQGDSLSPLWFCLAINPLSRILNKTGYGYIIDRENDVKVTHLLYMDDIKLYAANRQQLDQLLSLTESFSDDIKMKFGTDKCKINCIIKGQHKETIPHILELQGGTIDSLENRDTYKYLGYLQSTCINHTEIKNTLKLKYKQRLNKILNTQLSARNKTKAVNTYAVPILTYSFGVIKWSDTELEALNTLTRTTCYKHNIHHIHSAIQRFTLKRKFGGRGFLDIKNLHYTQIHNLRLYFLNKAKESAIHKAIVNISHPGTPLQLNNDQFNPQQKILKDEQKIEIWKGKALHGKYPFQLQQDHVDKNASCTWLMKGNIFGETEGFLIAIQDQVIKTRNYARHILKEAIQTDKCRLCHQNTETIDHITGGCSVLANKEYTHRHDNVAKHIHQQLALKHKLLDTYTPYYKYKPKNVLENNTTKLYWNRDIITDRTILSNRPDITLTLKHTKITYLVDIAVPNTHNLKQKHTEKIQKYIPLADEIKQMWHQDTVTIIPIIISSTGVVPKTLNTALKTLQLPATTYIPLQKSIVLDTCSIVRRFLDPTMLSFNENRDITNVSTQQHTEH

SEQ ID NO: 1412 - protein, 1350 aa, Lycaena phlaeas
MRLRSKRVLPQAGTSVNRAGESRTRLTASGSPTYSGGGTVSQESAQFQTVAAIGTTPVESTSHSSTPISSSHSLFQSPSSSPQWCRYGSTPESSSSLSYDVAQEAIALYPEPITDSIQPTCISENYALINTVDTNSSPLSLSIDTPVRSVLQEMLPATTLAGKSRQRMKWTNKINQELLRCYYIVTQCETNLTAYRPLLHQKFTQLFPELSNLTEQRLADQIRLIHKKNRISAPEREKIKQLVIQAIHRPEELDEQISINNTQQSNMDSFTDNNNREHATSYTQITSPQNLTENIHHITPIPQTSHLIQNENTQTILTEINEDDNALEQAINLDKIENTFAEMIIKYAGTDPTLRPSIPKLKVTRASIKIVNTVNDIVGKHLNDKAIITIGEIHEAIYCAAMTVTVIYNKHEYGGRTRDNTTHRINIQRQKKPHWEKRLTDKISTFRKQIGQLTQYLNGNLNHKKQKKLNPNNKSKEEIIDQLDICKQKLQANSKRLRRYKLSNQRKSDNNIFNTNQKLFYRSLNTENIKITQAPNVTDLQNYWENIWSKPIQHNPNTAWIESEEHEVRNIEMMPEITIEKDDVIQAVKKTLNWKAPGPDKIQNYWLKYITTTHQYLAQTLNSLVHSPQEMPSFLTQGVTYLKPKDSDTTNPAKYRPITCLPTTYKILTSIISQKLYSHISQNKIIPEEQKGCSKGSRGCKEQLIIDTEIHNQVKQKHRNLHYSYIDYQKAYDSVPHSWLLHILKIYKIDNRLINFLQIIMKKWTTKLILKTDGLTLDTSAIKISRGIFQGDSLSPLWFCLAINPLSRILNKTGYGYIIDRENDVKVTHLLYMDDIKLYAANRQQLDQLLSLTESFSDDIKMKFGTDKCKINCIIKGQHKETIPHILELQGGTIDSLENRDTYKYLGYLQSTCINHTEIKNTLKLKYKQRLNKILNTQLSARNKTKAVNTYAVPILTYSFGVIKWSDTELEALNTLTRTTCYKHNIHQIHSAIQRFTLKRKFGGRGFLDIKNLHYTQIHNLRLYFLNKANESAIHKAIVNISHPGTPLQLNNDQFNPQQKILKDEQKIEIWKGKALHGKYPFQLQQDHVDKNASCTWLMKGNIFGETEGFLIAIQDQVIKTRNYARHILKEAIQTDKCRLCHQNTETIDHITGGCSVLANKEYTHRHDNVAKHIHQQLALKYKLLDTYTPYYKYKPKNVLENSTSKLYWNRDIITDRTILSNRPDITLTLKHAKTTYLIDIAVPNTNNLKQKHTEKIQKYIPLADEIKQMWHQDTVTIIPIIISSTGIVPKTLSTALKTLQLSATTYIPPQKSIVLDTCSIVRRFLNSTMLSFSDSRAIADTSTHTPTTH

SEQ ID NO: 1413 - protein, 959 aa, Lycaena phlaeas
MILMFNFKKNFLTIIYISIIIIIIIIIIIIIIIKNIQRQKKPHWEKRLTDKISTFRKQIGQLTQYLNGNLNHKKQKKLNPNNKSKEEIIDQLDICKQKLQANSKRLRRYKLSNQRKSDNNIFNTNQKLFYRSLNTENIKITQAPNVTDLQNYWENIWSKPIQHNPNTAWIESEEHEVRNIEMMPEITIEKDDVIQAVKKTLNWKAPGPDKIQNYWLKYMTTTHQYLAQTLNSLVHSPQEMPSFLTQGVTYLKPKDSDTTNPAKYRPITCLPTIYKILTSIISQKLYSHISQNKIIPEEQKGCSKGSRGCKEQLIIDTEIHNQVKQKHRNLHYSYIDYQKAYDSVPHSWLLHILKIYKIDNRLINFLQIIMKKWTTKLILRTDGLTLDTSAIKISRGIFQGDSLSPLWFCLAINPLSRILNKTGYGYIIDRENDVKVTHLLYMDDIKLYAANRQQLDQLLSLTESFSDDIKMKFGTDKCKINCIIKGQHKETIPHILELQGGTIDSLENRDTYKYLGYLQSTCINHTEIKNTLKLKYKQRLNKILNTQLSARNKTKAVNTYAVPILTYSFGVIKWSDTELEALNTLTRTTCYKHNIHHIHSAIQRFTLKRKFGGRGFLDIKNLHYTQIHNLRLYFLNKAKESAIHKAIVNISHPGTPLQLNNDQFNPQQKILKDEQKIEIWKGKALHGKYPFQLQQDHVDKNASCTWLMKGNIFGETEGFLIAIQDQVIKTRNYARHILKEAIQTDKCRLCHQNTETIDHITGGCSVLANKEYTHRHDNVAKHIHQQLALKHKLLDTYTPYYKYKPKNVLENNTTKLYWNRDIITDRTILSNRPDITLTLKHTKITYLVDIAVPNTHNLKQKHTEKIQKYIPLADEIKQMWHQDTVTIIPIIISSTGVVPKTLNTALKTLQLPATTYIPLQKSIVLDTCSIVRRFLDPTMLSFNENRDITNVSTQQHTEH

SEQ ID NO: 1414 - protein, 1344 aa, Lycaena phlaeas
MRLRNKKVLPQAGTSVNRAGESRTRLTASGSPTYSGGGTVSQEAAQCQTVAAIGTTPVESTSHSSTPTSSRHSLFQSPSSSPQWSGYESTSSSSSSSLSCDVAQEASALYTEPITDTMQTTRISENYTLINTVDTNTPSSNSQIDTTARSVLREMLPATTLAGKSRQRMKWTNQINQELLRCYYIVTHCESNLTAYRPMLRQRFIQIFPELSNITEQRLADQIRTIHKNNRISASEREKIKQSVLHATNITQELIQPSINNDTHQINTNFSINNSREYTPDSHSLLENSQQILSITQTHDSITTRNIHTIPIESNDQNNTSEETINVDKIENAFNEMIIKYSGTDPTLRPTIPKLQITRATIKTVNIINDIVGKYLNNKITVTIEEIHEIIYCAAMAVTSIHRKQKQICSNNTSSTHRITANREKKPDWEKRLIDKISALRKQIGLLTQYLNGNLNRKKQQKLNPSNKNKDEMTDQLDICKQKLQANSKRLRRYKLSNKRKSDNKMFNNNQKLFYKNLNTENINITQAPNLSDLQKYWENIWSNATDHNQNTSWMLTEEQEVSDIEIMPEVTIEKEDVTLTLKNTLNWKAPGPDKIQNYWLKYFTTTHQYLAQALNNLINHTHNIPEFLTQGITYLKPKHKDTTNPANYRPITCLPTIYKLLTSIISHKIQSHIVEYNIIPEEQKGCSKGSRGCKEQLIIDTEIHSQVKQKHRNLHYAYIDYQKAYDSVPHSWLLHILKIYKIDNRLIKFLQSIMAKWTTKLALKTNNATLSIPSIKITRGIFQGDSLSPLWFCLALNPLSRILNKTGYGYVIDRENGIKLTHLLYMDDIKLYAANRQELDHLIKLTETFSDDIRMKFGIDKCKINSIIKGQHKNTTPHILELQEGTIDSLEHKDTYKYLGYLQSTSINHTDIKTTLKSKYKHRLNKILNTQLSARNKTKAVNTYAIPILTYSFGVIKWSDTELEALNTLTRISCYKHKIHHIHTAVQRFTLKRKFGGRGFIDIRNLHYSQIHNLRSYFLSKANNSNIHKAIVKISNSGTPLQLNNDQFDPQQKILKDEQKIENWKKKALHGKYPFVLQQEHVDKNASCTWLMKGNIFGETEGFLIAIQDQVIKTRNYARHILKEQIGTDKCRLCHQSTETIDHITGGCSVLANKEYTHRHDNVAKHIHQQLALKHKLLDTYTPYYKYKPKNVLENNTTKLYWNRDIITDRTILSNRPDITLTLKHTKITYLVDIAVPNTHNLKQKHTEKIQKYIPLADEIKQMWHQDTVTIIPIIISSTGVVPKTLNTALKTLQLPATTYIPLQKSIVLDTCSIVRRFLDPTMLSFNENRDITNVSTQQHTEH

SEQ ID NO: 1415 - protein, 1325 aa, Lysandra bellargus
MRLRNRNIPQAGTGAKCNGESRPEPSGPGCPSYSGGDTVSHLSAQSNTAADKATTTTINSYSYPTSPTTSISLFSSPQSSPRSYIVNINSSTSRSTTLSPVSDDATREANATYPVPIPDITSSTSFLVNNVLHPVDHNTSQSHLINTPARSVLQEMLPATTLTGKCRQRMKWTDHINKELLRCYYIVTSCESNLAAFRPLLRQKFIETFPELSHISEQRLSDQIRVIHKNNRLSAQVREQIKQSVAEMTQADRSNDIIQESVLNQNTCNLQANHQSRVNIPAPQQPSTLTSHQLNTPAISPDTIEYTNTLDTERTNEQPTYPNTIEAQEIEKVFTEMLIKYTDTDPTLRPTIPKLQVTRNIIKTVNQLNLIIGKYLDEKEALCLDEIQTTIYCAAMTTTTLHSKITNTVKDKETGKATNTNNPKWQGRIESRIKEIRKEIGQITQYLNGNLSLRKQQKLNPRNLTKTQLTDLLDNLKQKLQAQSKRLHRLKISNARRKDNSLFTTNQKLFFQKLNTENIVIKEPPDINEIKNYWENLWSKPVQHNTNSSWINTEANDNQNISPMSDFTVDRDDVTSAIKKTLNWKAPGPDKIQNYWLKYFTTTHIHIANIFNSFIKDPQSIPSFMTQGITYLKAKDKDNTTDPTKYRPITCLPTLYKLLTSIITQKLNLHITQNKIIPEEQKGCTKGSMGCKEQLVIDAEVHNQAKQNNKNIYFAYIDYQKAFDSVPHSWLLQVLEIYQVNNKLIHLLKYLMSIWSTKLHLKTTNATLSTSTIKIKRGIFQGDSLSPLWFCLALNPLSKNLNKSGHGYTIDKLSNVKLTHLLYMDDIKIYASDRQQLDHLLKLTEIFSADIKMTFGIDKCKINCLIKGRHQQTNPYNLELQEDAIDSMQAKDTYKYLGYIQSTTVNHKDIKNILKTKYKQRLNKILHTQLSGRNKIKAVNTYAIPILTYSFGIIKWTDTELEAINTAIRTASYKHNIHHIHSAVERFTLKRKLGGRGCIDIKNLCYRQIENLRTYFQTKSRTSHLHNALVNLAHSGTPLQLNNSQFDPNHKIIKDSDKIAKWKSKAVHGKFPHLLDQDHIDQVASSSWLTKGNIYSETEGFLFAIQDQIIKTRNYSKYILKENIDTDKCRLCHQTTETIDHITGGCNSLANKDYTHRHDNVAKFIHQLLAIKYKLIDIHTPYKPSNVLENNIAKLYWDRDIITDRTILSNRPDITLTIKAKKTTYLIDIAVPNSNNLKQKHNEKIQKYIPLADEIKQMWRQETVKIIPIILSSTGVIPKTLFTALKTLDLNKNTYIHIQKSVVIDTCSIVRRFLNPSSSFTSSQA

SEQ ID NO: 1416 - protein, 1328 aa, Lysandra coridon
MRLRNRNIPQAGTGAKSNGESRPGPSGPGCPSYSGGDTVSHLSAQSNTAADKVVTTTINSHSYATSPTSSISLFSSPQSSPKSYMIDINSLTSRSTTLSPMSDDATRKANATHPVPISDITSFTSFLENNTLHSVDHNISQHHLTNTTARSVLQEMLPATTLAGKCRQRMKWTDLINRELLRCYYIVTSCESNLTAFRPLLRQKFIETFPELSHISEQRLSDQIRVIHKNNRISVQVREQIKQSVAETAQIEAPNNTQEPVLNQSTYNIQANCLSPMDIPSQQLPSALSSHQLNTPPNFFDTIEHTITLHTEPTNGPPTYPNSRDIQEIENLFKEMLIKYTDTDPTLRPTIPKLQVTRNVIKTVNQLNKIIGKHLDEKDAICLEEIQTAIYCAAMTTTILHSKITKPTKENETRKTIDNNKPKWQGRIESRIQQLRKEIGQLTQYLNGNLSLRKQQKINPRNLTKTQLLDLLDKLKQKLQAQSKRLRRLKISNARRKDNNLFTTNQKIFFQKLNSENIIIKDPPDIKEVQNYWENLWSKPVQHNINSSWINTETNDNNQDICPMSDITVDRDDVTFAIKKTLNWKAPGPDKIQNYWLKYFTTTHSHIAYIFNSFIQDPQSIPSFMTQGITYLKAKDKDNTTDPTKYRPITCLPTLYKLLTSIITQKLNLHITQNKIILEEQKGCTKGSMGCKEQLVIDAEIHYQAKQNHKNLYFAYIDYQKAFDSVPHSWLLQVLEMYQVNNRLIQLLKYLMSTWSTKLHLKTTNTTLSTSTIKIKRGIFQGDSLSPLWFCLALNPLSKILNKSGHGYTIDKVSNTKLTHLLYMDDIKIYASDRQELNHLLKLTEIFSTDIRMRFGIDKCKVNCLIKGRHQQTSPYNLELQEDAIDSMQANDTYKYLGYIQNTATNHKEIKNILKTKYKQRLNKILHTQLSGRNKIKAINTYAIPILTYSFGIIKWSDTELEALNTTTRTASYKHNIHHIHSAVERFTLKRKLGGRGCIDIKNLCYKQIDNLRSYFKTKAHISHLHKALINLTHSGTPLQLNNGQFDPKHKIIKDSDKIVKWKSKALHGKFPHLLEQDHIDQVASFSWLTKGNIYSETEGFLVAIQDQIIKTRNYSKYILKENIDTDKCRLCHQTTETIDHITGGCNSLANKEYTHRHDNVAKYIHQLLAIKFKLIDIHTPYYKYKPCSVLENNIAKLYWDRDIITDRTIPSNRPDITLTIKAEKTTYLIDIAVPNTNNLKQKHNEKIQKYIPLADEIKQMWRQETVKIIPIILSSTGVIPITLAAALKSLDLHKNTYIHIQKSVVIDTCSIVRRFLNPSSSFTSPQS

SEQ ID NO: 1417 - protein, 1327 aa, Celastrina argiolus
MRLRNRNIPQAGTGAKSDGESRPGPSGSGCSSYSGGSTVSPHAAQSSTAADDIIKRTSNTNSCPTSPASSISLFPSPHSSPQSYMLNNSSSTRSTSFSSMSDVVAQEANAFNPVPILDIIPSTSTSQNTDLNFVDHNILRQPHLSNTPIRSVLQDMLPSTTLAGKSRQRMKWTDQINIELLRCYYLVTSCESNITAFRPLLHNKFIETFPELSHISEQRLSDQIRVIHRNNRISPQERNRIKILVAQELNNNNSQNNNIQNTDLQVNPCNIHIDSQPSTDNLISCRSSILTSGESFYISNFSDTPEQATTSEPNTTNIPNVVLDSTENQKIENIFTEMMVKYSGTDPTLRPTIPKLQTTRNVIKTVNILNSLIANYLEEKETHSLDEIHTTIYSAAITVATLHSKIDNSSENKNTDKIIAHNTPKWQTRIENRIKKLRKEVGQLTQYLKGNLTIKKQRKLNPNNLTNVQIVDLLDKLKQKLQAQSKRLRRLKISNARRKDNTLFNSNQKIFYQNLTSENFKITNPPNIDEVNNYWEELWSKPVHHNTQSSWLSTEIEESQTLNIMPEIIIDKDDVTYAIKNTLNWKAPGPEKIQNYWIKYFTATHRHIADVFNSFIQYPQTIPPFFTQGITYLKPKDKNDTTNPTKYRPITCLPTIYKLLTSIITQKLSAHITQNNIIPEEQNGCTKGSMGCKEQLIIDAEIHNQVKQNRKNLYYSYIDYQKAFDSVPHSWLLHILKIYKVDCKLIQFLQSLMCTWSTKLNLKTIDTTFCTSPIKIKRGIFQGDSLSPLWFCLALNPLSKILIKACHGYVIDKTKNIKITHLLYMDDIKLYATDRQQLEKLLQLTEQFSIDIKMTFGIEKCKINCITKGQHTQTESLNLELQTGIIDSMQAKDTYKYLGYIQSTAINHKEIKNTLKSKYKERLNKILSTQLSGRNKVKAINTYAVPILTYSFGIINTELEALNTATRTSSYKHNIHHIHSAVERFTLKRKLGGRGAMDLKNLHYNQIDNLRKYFLNKANTSELHNAIINIPHSGTPLHLNNNQFDPRHKILSDNNKITKWKSKALHGKFPHQLQQEHIDQEASFSWLTKGNIFSETEGFIIAIQDQIIKTRNYSKYILKENIETDKCRLCHQTTETIDHVTGGCSALASKEYTYRHNNVAKHIHQLLATKYKLIETPTPYYKYKPSSVLENSSVKLYWDRDIVTDRTILSNRPDITLTIKPEKITYLIDIAVPNTNNLKQKHSEKIQKYIPLADEIKQMWRQESVKIIPIIISSTGVIPKTLTAALKTIDLHKNTYIQMQKSVVIDTSSIVRRFMNPSSSFTNSPQS

SEQ ID NO: 1418 - protein, 815 aa, Muschampia musta
MWSTPEYHNIDAEFIELERKETEHIESMPTVIIDVDDIKYALRKIYNWKAPGPDKIQNYWIKYLTSIHTHLANAYNTLIQNPHNMPPFLTQGITYLKPKDSDTTNPAKYRPITCLPTLYKLLTSIITYKVNNHLSNYNIISEEQKGCCKGSMGCKEQLVIDTEIHNNAKQKYRNLFYSYIDYQKAFDSVPHSWLIHVLQLYKIDNDLVKFLQHIMTLWTTTLNIHAHSGTLKTNPIKICRGIFQGDSLSPLWFCLAINPLSKILNKTNYGYTLDKGKNIKITHLLYMDDIKLYAANRQQLNHLLTLTEQYSKNIKMAFGLDKCKINCIIRGKYKETESHKLTLQEGTINSMVFRETYKYLGYEQSTTINHTKIKTNLKTIYKHRLNTVLKTKLSARNKTKAINTYAVPILTYSFGIINWSETELNALNTITRTTCSKHNIHHSHSAIERFTIKRKNGGRGFIDIKNLHYSQIHNLRSYFQNRANDSSLHKAIVSLHTSGTPLKLNDAQYDPILKIQTEEEKIENWKKKTLHGKYLQQLQQPHIDKDASNTWLTKGNIFGETEGFLVAIQDQVIKTRNYSKYIIKERIVTDKCRLCNRTTESIDHITGGCSALANKEYTYRHDNVAKHIHQQLAIKHKLINKYTPYYQYKPKNVLDSNDTKLYWNRDIITDRTILSNRPDLTLTLKATKTTYLIDISVPNTNNLKQKFTEKIQKYSPLADEIKQMWHQDSVRIIPIIISSTGIVPKTLITALQSLQLSKNTYIPLQKSVVLDTCAIVRRFMNPSSQPLLSSNPEDYDTLTIPDEQNINQDANKTNI

SEQ ID NO: 1419 - protein, 1352 aa, Noctuana stator
MKKSITRKYSLRPLPGGRRGTPGVGAGCDSMRTVDGLELSRRAPAGNVPEITTADIITTTSSLISSTHSLFQSPNSSPHSYENPSTSRSSSISPLSLNVARGPSAKSLVPIDDTNKSTQGFTRNTINICVDTNQIPLHNHNHDIPATSVLREMFPATTLGGKSRQRMKWTDEINRQLLRCYYKVTKCETELTAYRPLLYHMFIHIYPELQHLTQQRLSDQIRVIHKNNRISLSERLHIKQEVAKLISTTNIESQNNTPDNNNPQTQNIHIQDNVTSTSVMLDATSYTTNIYTQTGSLLSQNNIIHPTDILIQPTLTIETTQDDSSTEINYKKIEEAFNENLRIHKNTNPVLRKTIPKLQISRATIKTVNTMNQILHTYLQDKETLPIEELHLIVYCAAITITSLHIKTNKKNTNRNKHKQKQPTWKLRITTHIETLRKNIARMTQYLKGNLSLKKQRKLNPKNLDTDQLTDELDKHKQKLSAYTKRLRRYEESNRRKAENNLFQNNQKIFYRQLNSNHINITQAPDETHVQKFWENIWSTPENHNENAEFIEWEKKESENIESMPSVVIDIDDIKYATQKIHNWKAPGPDKIQNYWLKYLTSIHNHIAKAYNTLIQEPHNMPTFLTQGITYLKPKDSDTTNPAKYRPITCLPTLYKLLTSIITHKLNTHISYNNIIPEEQKGCCKGSMGCKEQLVIDTEIHNQVKQKHRNLFFSYIDYQKAFDSVPHSWLIHVLKLYRIDDNLVNFLQHIMTFWTTTLNIHTHNKTLITNPIKICRGIFQGDSLSPLWFCLAINPLSKILNNTNYGYTLDKQNNIKITHLLYMDDIKLYAANKQQLKHLLTLTEQFSKDIKMSFGLDKCKINSVIRGKYKETESHILTLQEGTIHNMLFRETYKYLGYEQSTTINHTEIKAKLKTIYKHRLKTILRTKLSARNKTKAINTYAVPILTYSFGIINWSETELNALNTLTRTTCNKHNIHHTHSAVERFTIKRKNGGRGFIDIKNLHYSQVHNLRLYFQNKAKNSTLHKSIVSLNTSGTPLKLNDTQYNPNLKIQTEEEKIENWKKKSLHGKYPQQLLQPHIDKDASNIWLTKGNIFGETEGFLVAIQDQVIKTRNYSKYILKERIETDRCRLCYQTTESIDHITGGCSSLANKEYTYRHDNVAKHIHQQLAIKYNLIHTYTPYYQYKPKNVLENNEAKLYWNRDIITDRTILSNRPDLTLTLKITKTTYLIDVSVPNTNNLKQKFTEKIQKYLPLADEIKQMWHQDSVRVIPIILSSTGIIPKSLFAALQSLQLPKTTYIPLQKSVVLDTCSIVRRFMNPSSQPLLCANHNNHNSLTTPDEQNIATQQHVTPNI

SEQ ID NO: 1420 - protein, 979 aa, Ernsta dromus
MNSILHTYLQNKKTLLIEELHLIIYCAAITITSLHDKTNEITNNINNKNKQKKPSWKIRITKLIETLRKNIARMTQYLKGNLSVKKRQKVNPKNLNTDQFIDELDKNKQKLAAYTKRLKRYEESNRRKAENNLFHSNQKLFYRQLNSEHIKITQAPDETHLQQFWEDIWSAPENHNNDAEFIELEKQETEKLETMPPVVITIEDVKCSIKKIHNWKAPGPDKIQNYWIKYLTSTHTYLADTYNTLIQKPHNMPTFLTQGITYLKPKDPDTTNPAKYRPITCLPTIYKLLTSIITHKLNTHISRNNIIPEEQKGCCKGSMGCKEQLVIDTEIHNQAKQKHRNLFYSYIDYQKAFDSVPHSWLIHVLELYRIDNKLINFLRCIMTSWTTTLNIHTENRTLKTNVIKICRGIFQGDSLSPLWFCLAINPLSKILNRTNYGYTLDKQNNIKITHLLYMDDIKLYATNKQQLNHLLTLTEQFSKDIKMTFGLDKCKINCIMKGKYKETESHNLTLQEGTINNMLFRETYKYLGYEQSTTINHAEIKTNLKTIYKSRLNKILKTKLSARNKTKAINTYAVPILTYSFGIINWSETELNALNTLTRTTCNKHNIHHSHSAVERFTIKRKNGGRGFIDIKNLHYSQIHNLRLYFQNKANTSQLHKAIVNLNTSGTPLKLNNIQYNPEQKIQTEEEKIENWKQKTLHGKYLQQLQQPHIDKDASNTWLTKGNIFGETEGFLIAIQDQVIKTRNYTKYIIKERIETDKCRLCHHTTETIDHITGGCSALANKEYTYRHDNVAKHIHQQLAIKHKLLHTYTPYYQYKPKNVLDNSDAKLYWNRDIITDRTILSNRPDLTLTLKATKTTYLIDISVPNTNNLKQKFTEKIQKYLPLADEIKQMWHQDSVRVIPIILSSTGIVPKTLITALQSLQLPKSTYIPLQKSVVLDTCSIVRRFMNPSTQPFHSSNDTVTQHIEQNTNTAQNTSSNL

SEQ ID NO: 1421 - protein, 1362 aa, Pholisora mejicanus
MKKSIKRKYCLRPLPGGRRGTSGVGAGCDSMRTVDGLELSRRAPAGHVPEITTADIISTPSSPISSTHSLFQSPNSSPHSYENPSTSRSSSISPMSLNVARGPTAKSLASIDDTNKSTQGSIRDTSNICVDQNQILTNPLTNPTSLNQDIPVTNVLREMLPATTLGGKSRQRMKWTDEINRQLLRCYYQVTNCESNLTAYRPLLHHTFTDIYPELQHLTQQRLSDQIRVIHKNNRISPSERQHIKQQVAKMISTENVENEDNTILYNNNSHIQCTPDLTRNNQLPRLVENHTNDMLSAIETLNDTLDTTTIIQNSNPLTQIDVNQPTDTYTQLPVTLETTQDYLNIDISYEKIQDIFSENLKNYKNINPTIRKTIPKLPISRSAIKTVNTMNCILQTHLQDKVSLPIEELHLVVYCAAITVTSLHVKTNGQSNKTNKNKHKKPAWKTRIVALIETLRKNIARMTQYIKGNLSLKKQRKMNPKNLETDELIDELDKNKQKLAAYTKRLKRYEESNRRKAENNLFQNNQKLFYRQLNSEHITVTQAPDETHVQQFWENIWSKPENHNSDAEFIHLETKETENLEIMLPVVIDIDDIKYATQKIHNWKAPGPDKIQNYWLKYFTSIHNHLANAYNVLIQEPHNMPTFLTQGITYLKPKDSDTTNPAKYRPITCLPTLYKLLTSIITQKLNIHITHNNVIPEEQKGCCKGSMGCKEQLVIDTEIHNQVKQKHRNLFYSYIDYQKAFDSVPHSWLIHILKLYKIDEKLVNFLQHIMTLWTTTLSIHAHNKTLKTKPIRICRGIFQGDSLSPLWFCLAINPLSKILNKTNYGYVLDKQNNIKITHLLYMDDIKLYAANKQQIKHLLTLTEQFSKDIKMTFGLDKCKINSILKGKFKETDSHILTLQEGTINNMLFRETYKYLGYEQSTTINHTEIKTKLKTIYKHRLNTVLKTKLSARNKTKAVNTYAVPVLTYSFGIINWSETELNALNTLTRTTCNKHNIHHSHSAVERFTIKRKNGGRGFIDIKNLHYSQVHNLRLYFQNKANNSSLHKAIVGFHTSGTPLKLNDTLYNPNLKIQTEDEKIENWKKKSLHGKYLQQLQQPHIDKDASNTWLTKGNIFGETEGFLVAIQDQVVKTRNYSKYILKEKIETDKCRLCHQATESIDHITGGCSSLANKEYTYRHDNVAKHIHQQLAIKHKLLHTYTPYYQYKPKNVLESNDAKLYWNRDIITDRTILSNRPDLTLTLKATKTTYLIDISVPNTNNLKQKFTEKIQKYLPLADEIKQMWHQDTVRVIPIILSSTGIIPKTLLIALQSLQLPKKTYIPLQKSVVLDTCSLVRRFMNPSSQPLLTSNTNNYDSLTTPNEQNN

SEQ ID NO: 1422 - protein, 1352 aa, Ouleus salvina
MEMSEKRRYNLRSLPGGRRGTPGVGAGCDSMRTVDGLELSRRAPAGQVPEVTTAEIISNPSSPISSTHSLFPSPNSSPHSYHNPPTSRSTTTSPMSVNVARGLLANSIEPIIDTTNATRGSHRDTYNKSVEINSHTRTLTTPTNTPTTSNNRGRSKGILQEMLPATTLSGKSRQRMKWTDEINRELLRCYYKVTKCETDITAYRLHLHYTFIQIYPELQHITQQRLSDQIRVIHKNNRISPPERLRIKKEIADLTSTNFDPQDNNPYTNNMACNPNNDTSHNLTESNTAHMTSTNTINFESYLRDDINQPPPLTQQNPVKDLNFEKIEIEFKKNILKFRDLDPTLKPTIPKLYISKLAINTVNIINDIIHTYLKDKISLSLEDLHNIIYSAAVTITSQHVKVRKQKSNSKDTGNKNRQKQPPWKVRLTLQIEKLRKEVGRMTQYLKGNLTLKKQRKINHKNLNTNQFIEELDKHKQKLSAYAKRLKRYEESNKRKTDNNLFNTNQKLFYRNLRSEHIKITQTPDTTQIQQFWENIWSIPEEHNSDAEFIKLEEKEAKNIKTMTPTIITLEDVQYALRKTLNWKAPGPDKIQNYWLKYLTSIHTHITNVFNTLIKEPHKMPTFLTQGITYLKPKDPDTSNPSKYRPITCLPTLYKLLTSIITHKLNTHITLNNIIPEEQKGCCKGSMGCKEQLVIDAEIHHQVKHKHRNLFYSYIDYQKAFDSVPHSWLLHVLKLYKTDDTIIKFLQYIMTTWTTTLNIHTHNGTLTTNKLKIARGIFQGDSLSPLWFCLAINPLSRILNQSNCGYILDKDNNTKITHLLYMDDIKLYAKNRQQLNHLLTLTEKFSSDIKMTFGTDKCKLNSIIKGKHKETSTHDLTQQLGSISNMKFNETYKYLGYHQSTTIKNTDIKNTLKSKYKQRLNTILKTKLSARNKTKAINTYAVPILTYSFGVITWSETELNALNTLTRTTCNKHNIHHSHSAVERFTIKRKNGGRGFTDIKNLHYIQIHNLRTYFLNKANDSLLHKAITKSPTSGTPLMLNNAQYNPKGKIQTEEEKIGNWKNKTLHGKYPQQLDQPHINKEASNTWLTKGNIFGETEGFLVAIQDQTIKTRNYSKYILKERIETDLCRLCHKTTETVDHITGGCSALAYKEYTYRHNNVAKHIHQQLALKYNLLHDHTPYYEYKPKSVLESKDVKLYWDRDIITDRTILSNRPDITLTLKATKTSYLIDISVPNTNNLKQKFTDKIQKYIPLADEIKQMWRQHSVRVIPIILSSTGVIPKTLFNALQVLQLEKTTYIPLQKSIVLDTCAIVRRFMNPSSLSLQGPNLDNFNISTTHTHVTENTQTTQDTQNTQ

SEQ ID NO: 1423 - protein, 1079 aa, Pholisora mejicanus
MLAAVEAFDKTLSTTTITQNTDTLIPVEITQPTDTYTQLPSTLETTQDYINNDITYEKIQNTFNDNLKKYQNINPTIRKIIPKLKVSKSTIKTVNTMNFIIQTYLQDKVSVPIEELHLVVYCAAITITSLHIKANEQNNYTNKNKQRRPSWETRIVTLIETLRKNIARITQYIKGNLSLKKQRKINPKNLDTDELIEELDKYKQKLAAYTKRLSRYKESNRRKAENNLFYKNQKLFYRQLSSEHITITQAPDPTQVQQFWENMWSKPENYNSDAEFLESEIKEAENIEIMSPITVELDDIKYATQKLHNWRAPGPDKIQNYWLKYFTSIHNHLANAYNTLIQEPHSMPTFLTQGITYLKPKDSDTTNPAKYRPITCLPTLYKLLTSIITHKLNTHILHNNIIPEEQKGCRKGSMGCKEQLVIDTEIHHQVKQKHRNLFYSYIDYQKAFDSVPHSWLVHILKIYKIDDNLVKFLQHIMTLWTTTLNIHTHNETLKTNPINICRGIFQGDSLSPLWFCLAINPLSKILNKTNNGYILDKQKNIKITHLLYMDDIKLYAANSQQLKHLLTLTEQFSKDIKMSFGLDKCKINCIIRGKYKETESHILTLQEGTINNMLFRETYKYLGYEQSTTINHTEIKTKLKTIYKHRLNTVLRTKLSARNKTKAVNTYAIPVLTYSFGVINWSETELNALNTLTRTTCNKHNIHHSHSAVERFTIKRKNGGRGFIDIKNLHYSQVYNLRLYFQNKANSSSLHRAIADLCTSGTPLKLNDTLYNPNLKIQTEEEKIENWKRKSLHGKYIQQLQQSHIDKDASNTWLTKGNIFGETEGFLVAIQDQVIKTRNYSKYILKEKIDTDKCRLCHQTTESIDHITGGCSALANKEYTYRHDNVAKHIHQQLAIKHKLLHTYTPYYLYKPKNVLESNDTKLYWNRDIITDRTILSNRPDLTLTLKATKTTYLIDISVPNSNNLKQKFTEKIQKYLPLADEIKQMWHQDSVRVIPIIISSTGIIPKTLLTALHSLQLPINTYIPLQKSVVLDTCSLVRRFMNPSSQPLLSLNIDNYDSLTIPNEQNNISNTQHITPNI

SEQ ID NO: 1424 - protein, 1337 aa, Ernsta colotes
MEKSFKKVYSLRPLPGGRRGTSGVGAGCDRMRTVDGQELNRRAPAGNVPEDTTAEVISSPSSPISSNHSLFQSPSSSPHSYENPSTSRSTSSSPMSLNVARRPLANSVVPIDDINKSTQGSIRDTNTMCVDDIHIPPILPTKSVLQDMLPATTLAGKSRQRMKWTDEINRELLRCYYKVTKCETELTTYRPLLHDRFTNIYPELQHITQQRLSDQIRVIHKNNRISPSERLRIKQEVASLVSTGNNDTQNNTIPTTYNTPIQDNHITDNRTEALDDNLSTTNICIQPENIPAQNKIIEDTDIITQNLPTPDTTQNPNIDVSCEKIEEIFHENLSKFENIDPTLRKTIPKLQISRAAIKTVNLMNSILHKYLQNKKTLPIEELHLILYCAATTITSLHVKTNETININKNKPKKPSWKIRILKLIETLRKNIARMTQYIKGNLSVKKRQKVNPKNLDTDKYIEELDLNKQKLAAYTKRLKRYEESNRRKAENNLFHSNQKLFYRQLNSEQITITQTPDETHLQQFWKDIWSTPENHNRDAEFIELEKQETENIETMPTVIINVDDVKYSIQKLHNWKAPGPDKVQNYWLKYLTSTHTHLADAYNTLLQKPQNMPPFLTQGITYLKPKDSDTKNPAKYRPITCLPTIYKLLTSIITLKLNTHISHNNIIPEEQKGCCKGSMGCKEQLVIDTEIHNQAKQKHRNLFYSYIDYQKAFDSVPHSWLIHVLELYKIDDKLINFLRYIMKSWATTLNIHTENSILKTDVIKICRGIFQGDSLSPLWFCLAINPLSRILNRTNYGYTLDKQDNIKITHLLYMDDIKLYATNRQQLNHLLTLTEQFSKDIKMAFGLDKCKINCIMKGKYKKTESHNLTLQEGTINNMLFRETYKYLGYEQSTTINHTEIKTNLKTIYKSRLNKILKTKLSARNKTKAINTYAVPILTYSFGIINWSETELNALNTLTRTTCNKHNFHHSHSAVERFTIKRKNGGRGFIDIKNLHYSQIHNLRIYFQNKANGSPLHKALVNLNTSGTPLKLNNKQYNPEQKIQTEEEKIESWMKKSLHGKYPQQLQQPHIDKDASNTWLTKGNIFGETEGFLVAIQDQVIKTRNYSKYIIKERIETDKCRLCHQTTESIDHITGGCSALANKEYTYRHDNVAKHIHQQLAIKHKLLHTYTPYYQYKPKNVLDNSDVKLYWNRDIITDRTILSNRPDLTLTLKATKTTYLIDISVPNTNNLKPKFTEKIQKYLPLADEIKQMWHQDSVRVIPIIISSTGIVPKTLITALQSLQLSKNTYIPLQKSVVLDTCSIVRRFMNPSSLPFHSIEEVTNVEQSVNTTQHNSSNL

SEQ ID NO: 1425 - protein, 1344 aa, Spialia ferax
MEKSIKKVYCLRPLPGGRRGTSGVGAGCDRMRTVDGQELNRRAPAGNVPEVTTAEVVSSPSSPISSNHSLFQSPSSSPHSYENPSSRSISSSPMSLNVARRPLANSVVPIDDTNKSTQGSIRDTNIMCVDNFHTPSILPTKSVLQDMLPATTLAGKSRQRMKWTDEINRELLRCYYKVTKCETELTAYRPLLHDTFTNIYPELQHITQQRLSDQIRVIHKNNRISPSERSRIKQEVSSLISTGNVDTLNNTTPNTNNTQVHDNHIIDNSTEALNDILFSPNICTHFENLQAQNEVTEDTGIFIQNSPTPDTVQNNSYYVDASYEKIEEIFHENLSKFENIDPTLRKTIPKLQTSRAAIKTVNSMNSILHTYLQNKNTLPIEELHLIIYCAATTITSLHVKTNKTININNVNVNKNKPKKPPWKIRIIKLIETLRKNIARLTQYIKGNLSVKKRQKVNPKNLDTEQLIEELDQNKQKLAAYTKRLKRYDESNRRKAENNLFNSNQKVFYRQLNSEDITVTQAPDEKHLQQFWENIWSTPENHNSEAEFIELEKQETKNIEIMPPVVINVEDLKYSIQKIHNWKAPGPDKIQNYWLKYLTSTHTHLADAYNTLIQNPHNMPTFLTQGITYLKPKDSDTTNPAKYRPITCLPTMYKLLTSIITHKLNTHILRYNIIPEEQKGCCKGSMGCKEQLVIDTEIHNQAKQKHRNLFYSYIDYQKAFDSVPHSWLIHILKIYKIDNDLINFLQYIMTSWTTTLNISTQNSILKSNVIKICRGIFQGDSLSPLWFCLAINPLSKILNRTNYGYTLDKQNNTKITHLLYMDDIKLYATNRQQLNHLLTLTEQFSKDIKMAFGLEKCKINCIMKGKYKEIESHILTIQEGTINNMLSRETYKYLGYEQSTTINHAEIKTKLKTIYKSRLNKILKTKLSARNKTKAINTYAIPILTYSFGIINWSETELNALNTFTRTTCNKHNIHHSHSAVERFTIKRKNGGRGFIDIKNLHYSQIHNLRLYFQNKANSSSLHKAIVNLNTSGTPLKLNDIQYNPEQKIQTEEDKIENWKKKTLHGKYPQQLQQPHIDKDASNTWLTKGNIFGETEGFLVAIQDQVIKTRNYSKYIIKERIETDKCRLCHQTTESIDHITGGCSALANKEYTYRHDNVAKHIHQQLAIKHKLLNTYTPYYQYKPKNVLDNSEAKLYWNRDIITDRTILSNRPDLTLTLKTTKTTYLIDISVPNTNNLKQKFTEKIQKYLPLADEIKQMWHQDSVRVIPIIISSTGIVPKTLITALQSLQLSKNTYIPLQKSVVLDTCSIVRRFMNPSTLPFHSSNDAVTNVQQNTNTTQQTSSNS

SEQ ID NO: 1426 - protein, 991 aa, Wiebesia pumilae
MRNGRDDRGYPHGVRSRVAGSTADRRRAPRGLLVTREPTGDQRELIALANAAADLEQLERAATRVAEHLAKLLPVDEGRGENRGRHRTGRGGGPRETREQPPVNPAVGAPFVGDSGERDRWVRSAKRIQALFRSNRKRAVQEVLAGPNQRCEISVEEVQRYFRDVHAVRESVGAPPDLYPDNEPSAESGESLVRPFEAACVSRRLGRTKNSSPGPDGITYAHLKRADPGCHVLSAIYNACLRLGAVPRCWGKSSTVLLYKKGDPESLANWRPIAMGDTIARLFAALIADRLTDWAVTNGRLSPSQKGFLRHEGCHEHNYVLQEILRDAQKGTKEVVVAWLDLANAFGSIPHAAIHGALRLHGVPAPIRDIVASAYDGATTTIATTEGTTEPIQILAGVRQGCPLSPIIFNLTLEPLVRAITAEGHGYGLWGQTYNNLLYADDAALISACPTGMGALLRRAEGVAAAIGLKFNPAKCATLHIKGGGGQRVRPTCFRLQGEEVRVLKPGEPYEHLGTPTGFQVRQTPTEALMDIGEDLQAVHRSLLAPWQKIETVANFILPRLDFCLRGSHVEKGPLTETDKVVRKLAKSWMGLPQRASAEVVYLPPYMGGGGLVPLADMADVLTVAHAFRILHSGDATVRTIAMSSLGATVSKRLGRSAQNADIARYLSGAMDGDMARPSGDSESLWSRARNAARRLAPRIGLGWRWTPERREFAIACPRSGGRMIVVPPGAKAQVVARLRGAVVEHYRARLLAKKDQGKVFEVTSRSRVSNHFLRGGSFTRFAEWRFVHRARLNCLPLNGARHWAPGGDRRCRRCGRDLETLPHVVQHCRPHFVAITKRHDAVVRRLVEACHAPGDLTVNQTVRGAEGENASLRPDIVIRDDARKRIVMLDVAVPFENRRTAFDEAREEKLRKYHSLAENLRRNGYVVEVEAFLVGALGGWGPSNDAAMGLLKVNSRYAVMMRRLMVSDTIRWSRDIYVEHVSGVRQYQDQ

SEQ ID NO: 1427 - protein, 990 aa, Wiebesia pumilae
MRNGRDGRGYPHGVRSRVAGSTADRRRAPRGLLVTREPTGDQRELIALANAAADLEQLERAATRVAEHLAKLLPVDEGRGENRGRHRTGRGGGPRETREQPPVNPAGGAPFVGDSGERDRWVRSAKRIQALFRSNRKRAVQEVLAGPNQRCEISVEEVQRYFRDVHAVRESVGAPPDLYPDNEPSAESGESLVRPFEAACVSRRLGRTKNSSPGPDGITYAHLKRADPGCHVLSAIYNACLRLGAVPRCWGKSSTVLLYKKGDPESLANWRPIAMGDTIARLFAALIADRLTDWAVTNGRLSPSQKGFLRHEGCHEHNYVLQEILRDAQKGTKEVVVAWLDLANAFGSIPHAAIHGALRLHGVPAPIRDIVASAYDGATTTIATTEGTTEPIQILAGVRQGCPLSPIIFNLTLEPLVRAITAEGHGYGLWGQTYNNLLYADDAALISACPTGMGALLRRAEGVAAAIGLKFNPAKCATLHIKGGGGQRVRPTCFRLQGEEVRVLKPGEPYEHLGTPTGFQVRQTPTEALMDIGEDLQAVHRSLLAPWQKIETVANFILPRLDFCLRGSHVEKGPLTETDKVVRKLAKSWMGLPQRASAEVVYLPPYMGGGGLVPLADMADVLTVAHAFRILHSGDATVRTIAMSSLGATVSKRLGRSAQNADIARYLSGAMDGDMARPSGDSESLWSRARNAARRLAPRIGLGWRWTPERREFAIACPRSGGRMIVVPPGAKAQVVARLRGAVVEHYRARLLAKKDQGKVFEVTSRSRVSNHFLRGGSFTRFAEWRFVHRARLNCLPLNGARHWAPGGDRRCRRCGRDLETLPHVVQHCRPHFVAITKRHDAIVRRLVEACHAPGDLTVNQTVRGAEGENASLRPDIVIRDDAGKRIVMLDVAVPFENRRTAFDEAREEKLRKYHSLAENLRRNGYVVEVEAFLVGALGGWGPSNDAAMGLLKVNSRYAVMMRRLMVSDTIRWSRDIYVEHVSGARQYQD

SEQ ID NO: 1428 - protein, 880 aa, Wiebesia pumilae
MRDGRGGRGNRRGVRPRAGGLAVDRRRAPRGPLAQRQPAGDQRELMALADAASNPEQLERAAVRVAQFIIGQLPVDVGRGENRGRRRPGRGGDAREAHEQPLVNPAGGAPVASDSGVRERWVRSARRIQMLFRSNRKRAVQEVLAGPNRHCEISVEEVQRYFRGVHAARDSVGASPDLYPTDQPSAESCESLVRPFDAASVFHRLGRTKNSSPGPDGITYAQLKRADPGSHVLSALFNACLRLGAVPRCWGKSNTVLLFKKGDPESLANWRPIAMGDTIARLFAALIADRLTDWAMTNGRLSPTQKGFLRYEGCHEHNYVLQEILRDAQRSNGEVVVAWLDLANAFGSIPHAAIHGALRHHGVPAPIRDIVASAYDGASTTIATAQGTSEPIQILAGVRQGCPLSPIIFNLTLEPLVRAITAEGHGYGLWGQTYNNLLYADDAALISSCPAGMGALLRRAEAVAADIGLRFNPAKCATLHTKGVGGSRVKSTVFRLQGEEVRALKPGEPYQHLGTPTGVLVRGTPTETLMEIGENLQAVDRSLLAPWQKIETVANFILPRLDFCLRGSHVEKGPLTETDKLVRKLTKSWMGLPQRASAELVYLPPYMGGGGLLPLADMADVLTVAHAFRILHSSDATVRAIAESALGAAVSKRLGRRARNADVARYLSGDMDGDMARPSGDTESLWSRARNAARRLAPRLGLGWRWSPERREFAVVCGREGGRTVVVPPGAKAQVVARLRGAVVEHYRARLLAKRDQGKVFEVTSRSRVSNHFLRGGSFTRFAEWRFVHRARLNCLPLNGARHWAPGGDRRCRRCGRDLETLPHVVQHCRPHFVAITRRHDAIVRRLVEASHAPGDLTVNQTVRGVDEGKCLASPRHRHS

SEQ ID NO: 1429 - protein, 1465 aa, Wiebesia pumilae
MRLRAEAIRSMRERRRISGQTPPSRAGDRPSDRETVGLGVRVRTTPAPVRPGVTFADVAARRTPACTTPQPAAKATPSPPLLSEAPTTSGALTTLTTATTTTTVGTRPIPSPNIVPPVSSSSPSPATPPASWWIASPSPTTPAWATPAASTPPAAPQRRQWMDMPLLDSPPPEPDIPVPQSTLRATAPAWHPTPSPRKPAPPPSPEDRTPEAKQPSSHPPTPPRRTPPSTTTRKTPPTPPQTTSPRRTPATSSPRPLDPPQRPPTTSGRKSPRPQPPSSSGTSGRPRTLPKIISNVQIKPPAEAGQWTTIQGRRQSRVSGGKHQHQQQPLPQPEQQQHQRQRQPQQHQQVRQRHQRLSKGGPEDTRVARHREATEQRQQRRRPGGSGLEAGGGSEAPPLEQRPGQRQQPRDQPGPQPPQPPPSQHHQRQRRQRQRPRLVPATETRRAGPSETGTRRIAGTAGLRRSGGNPAPGSQTRPGRGGRGNRRGVPPPGAEPVVDRQRAPRGHPVGHEPTEDQEELIALANATAGPEQLERAAVRVAEYIFRQLPAEVGRGENRVRRRPDRNGGRREVRGGSAPRVNPAGGAPVGGSPAQREKWAESAARIQALFRSNRRRAVREVLEGPNRGCEFSPEEVHRYFRDVHAAREPGGEMPDYFPANEPSAESCDSLVRPFHAAEVSRRLGRTKNSSPGPDGVTYAQLKRADPGCHVLSALYNACLRLGAVPRCWGNSSTVLLFKKGDAGLLSNWRPIAMGDTIARLFSALIADRLTDWAMTNGRLSPTQKGFLRYEGCHEHNFVLQEILRDAQRANGEVVVAWLDLTNAFGSLPHASIHEALRRHGVPAPIRDVVASAYSGASTRIATADGMSEPVQILAGVRQGCPLSPIIFDLTIEPVVRAISAMGLGYRMRGAACNNLVYADDAAIISACPAGMNRLLHQAERTAAAIGLRFNPAKCATLHIKGGGGLRVRPTVFRLQGEDIRALKPGEPYEHLGTPTGFRVRQTPTDTLMEIEEDLLALDRSLLAPWQKLETVANFIMPRLDFCLRGSHVDKGPLTRLDRSIKKLAKSWMGLPQRASAELVYLPPSMGGGGLLPLADMADVLTVAHAFRILNSGDATVRTIAMSSLVAVVTKRLGRHANEQDIARYLSGAMDGDLALPSGDTKSLWSRARNAARRLASTLGLGWRWTPERSELGIVCLRRGGQRLIVPPGAKAQVIARLRASVVERYRARLLAKRDQGKVLEVTSRSRVSNHFLRGGSFTRFAEWRFLHRARLNCLPLNGARHWAPGGDRRCRRCGGDLETLPHVLQHCRPNLVAITRRHDAVVRRLVEACHAPGDLAVNHAVRGVGGESASLRPDIVIRDERNRHITIVDVAVPFENRRLAFDEAREMKLLKYHSLAEDLRRGGYEVDVEAFIVGSLGGWDPRNEAAMGLLQISRRYATLMRRLMVSDNIRWSRNIYVEHVSGVRQF

SEQ ID NO: 1430 - protein, 1463 aa, Wiebesia pumilae
MRLREEAIRRREERRGPGRTPPSAGTDDTTFEEDRWADRRRRAPSAPVRPGVTYAHVTVRRDVTAVNSSPVTLDTSSDSSTITLRSSVSPRGSTTPSSGPLTLTTATYTITARSAPTMTPCVVLTPLPEHLPTSRIAMAPTPSPPTSRDWATPTASLPPPNQQLFTTTPLQSSPGTPTPAPRLSLQRTTPPARTPTPAPRRSTPSPAPSMELRVPATTHPPSPPRTSPRVTVATTSPTPQRSTSPPQRPLTQSRESPGPRTSTTGSPGRSGTPPRRSPVGVDGWTTIERRRRQQAPVEQRGDTGERGRACDVTHHQGVDNSPPQGGGGRGRQRQPPQNHGHLPQEQQHQHQQQRQVPINRQRRDQPRQRQQQQRQQPSPPLQRHQQQQRRQQPSSPGRPHSPPPQRRRPLQQPLQQQQQQLQHQPREGLPDRQQRRYVPARETRRAGPSGGTRRAAGEAENRGADGAPALVPPMRNGRDGRGYPHGVRSRVAGSTADRRRAPRGLLVTREPTGDQRELIALANAAADLEQLERAATRVAEHLAKLLPVDEGRGENRGRHRTGRGGGPRETREQPPVNPAGGAPFVGDSGERDRWVRSAKRIQALFRSNRKRAVQEVLAGPNQRCEISVEEVQRYFRDVHAVRESVGAPPDLYPDNEPSAESGESLVRPFEAACVSRRLGRTKNSSPGPDGITYAHLKRADPGCHVLSAIYNACLRLGAVPRCWGKSSTVLLYKKGDPESLANWRPIAMGDTIARLFAALIADRLTDWAVTNGRLSPSQKGFLRHEGCHEHNYVLQEILRDAQKGTKEVVVAWLDLANAFGSIPHAAIHGALRLHGVPAPIRDIVASAYDGATTTIATTEGTTEPIQILAGVRQGCPLSPIIFNLTLEPLVRAITAEGHGYGLWGQTYNNLLYADDAALISACPTGMGALLRRAEGVAAAIGLKFNPAKCATLHIKGGGGQRVRPTCFRLQGEEVRVLKPGEPYEHLGTPTGFQVRQTPTEALMDIGEDLQAVHRSLLAPWQKIETVANFILPRLDFCLRGSHVEKGPLTETDKVVRKLAKSWMGLPQRASAEVVYLPPYMGGGGLVPLADMADVLTVAHAFRILHSGDATVRTIAMSSLGATVSKRLGRSAQNADIARYLSGAMDGDMARPSGDSESLWSRARNAARRLAPRIGLGWRWTPERREFAIACPRSGGRMIVVPPGAKAQVVARLRGAVVEHYRARLLAKKDQGKVFEVTSRSRVSNHFLRGGSFTRFAEWRFVHRARLNCLPLNGARHWAPGGDRRCRRCGRDLETLPHVVQHCRPHFVAITKRHDAIVRRLVEACHAPGDLTVNQTVRGAEGENASLRPDIVIRDDAGKRIVMLDVAVPFENRRTAFDEAREEKLRKYHSLAENLRRNGYVVEVEAFLVGALGGWGPSNDAAMGLLKVNSRYAVMMRRLMVSDTIRWSRDIYVEHVSGMRQYQV

SEQ ID NO: 1431 - protein, 1430 aa, Wiebesia pumilae
MRLREEAIRRREERRGPGRTPPSAGTDDTTFEEDRWADRRRRAPSAPVRPGVTYAHVTVRRDVTAIDSSPVTLDTSSDSSTITLRSSVSPRGSTTPSSGPLTLTTATYTITARSAPTMTPCVVLTPLPEYPPSSRIAMAPTPSPPTSRDWATPTASLPPPNQQLFTTTPLQSSPGTPTPAPRLSLQRTTPPARTPTPAPRRSTPPPAPSMELRVPATTHPPSPRTSPRVTVATTSPTPQRSTSPPQRPLTQSRESPGPRTTTTGSPGRSGTPPRRSPVGVDGWTTIERRRRQQAPVEQRGDTGERGRACDVTHHQGVDNSPPQGGGGRGRQRQPPQNHGHLPQEQQHQHQQQRQVPINRQRRDQPRQRQQQQRQQPSPPLQRHQQQQRRQQPSSPGRPHSPPPQRRRPLQQPLQQQQQQQQPREGLPDRRQNRYVPTRETRRAGPSETGVRRAAGDAENRGGEGVPTPGDAMRDGRGGRGNRRGVRPRAGGLAVDRRRAPRGPLAQRQPAGDQRELMALADAASNPEQLERAAVRVAQFIIDQLPVDVGRGENRGRRRPGRGGDAREAHERPLVNPAGGAPVASDSGVRERWVRSARRIQMLFRSNRKRAVQEVLAGPNRHCEISVEEVQRYFRGVHAARDSVGASPDLYPTDQPSAESCESLVRPFDAASVFHRLGRTKNSSPGPDGITYAQLKRADPGSHVLSALFNACLRLGAVPRCWGKSNTVLLFKKGDPESLANWRPIAMGDTIARLFAALIADRLTDWAMTNGRLSPTQKGFLRYEGCHEHNYVLQEILRDAQRSNGEVVVAWLDLANAFGSIPHAAIHGALRHHGVPAPIRDIVASAYDGASTTIATAQGTSEPIQILAGVRQGCPLSPIIFNLTLEPLVRAITAEGHGYGLWGQTYNNLLYADDAALISSCPAGMGALLRRAEAVAADIGLRFNPAKCATLHTKGVGGSRVKSTVFRLQGEEVRALKPGEPYQHLGTPTGVLVRGTPTETLMEIGENLQAVDRSLLAPWQKIETVANFILPRLDFCLRGSHVEKGPLTETDKLVRKLTKSWMGLPQRASAELVYLPPYMGGGGLLPLADMADVLTVAHAFRILHSSDATVRAIAESALGAAVSKRLGRRARNADVARYLSGDMDGDMARPSGDTESLWSRARNAARRLAPRLGLGWRWSPERREFAVVCGREGGRTVVVPPGAKAQVVARLRGAVVEHYRARLLAKRDQGKVFEVTSRSRVSNHFLRGGSFTRFAEWRFVHRARLNCLPLNGARHWAPGGDRRCRRCGRDLETLPHVVQHCRPHFVAITRRHDAIVRRLVEASHAPGDLTVNQTVRGVDEENASLRPDIVIRDDAGKRIVILDVAVPFENRRTAFDEAREEKLRKYHSLARIFDGTATSSRSRLPCRRPGWLGTVLTTLPWVSSKSTADML

SEQ ID NO: 1432 - protein, 991 aa, Wiebesia pumilae
MRNGRDDRGYPHGVRSRVAGSTADRRRAPRGLLVTREPTGDQRELIALANAAADLEQLERAATRVAEHLAKLLPVDEGRGENRGRHRTGRGGGPRETREQPPVNPAVGAPFVGDSGERDRWVRSAKRIQALFRSNRKRAVQEVLAGPNHRCEISVEEVQRYFRDVHAVRESVGAPPDLYPVNEPSAESGESLVRPFEAACVSRRLGRTKNSSPGPDGITYAHLKRADPGCHVLSAIYNACLRLGEVPRCWGKSSTVLLYKKGDPESLANWRPIAMGDTIARLFAALIADRLTDWAVTNGRLSPSQKGFLRHEGCHEHNYVLQEILRDAQKGTKEVVVAWLDLANAFGSIPHAAIHGALRLHGVPAPIRDIVASAYDGATTTIATTEGTTEPIQILAGVRQGCPLSPIIFNLTLEPLVRAITAEGHGYGLWGQTYNNLLYADDAALISACPTGMGALLRRAEGVAAAIGLKFNPAKCATLHIKGGGGQRVRPTCFRLQVEEVRVLKPGEPYEHLGTPTGFQVRQTPTEALMDIGEDLRAVHRSLLAPWQKIETVANFILPRLDFCLRGSHVEKGPLTETDKVIRKLAKSWMGLPQRASAEVVYLPPYMGGGGLVPLADMADVLTVAHAFRILHSGDATVRTIAMSSLGATVSKRLGRSAQNADIARYLSGAMDGDMARPSGDSESLWSRARNAARRLAPRIGLGWRWTPERREFAIACPRSGGRMIVVPPGAKAQVVARLRGAVVEHYRARLLAKKDQGKVFEVTSRSRVSNHFLRGGSFTRFAEWRFVHRARLNCLPLNGARHWAPGGDRRCRRCGRDLETLPHVVQHCRPHFVAITKRHDAVVRRLVEACHAPGDLTVNQTVRGAEGENASLRPDIVIRDDARKRIVMLDVAVPFENRRTAFDEAREEKLRKYHSLAENLRRNGYVVEVEAFLVGALGGWGPSNDAAMGLLKVNSRYAVMMRRLMVSDTIRWSRDIYVEHVSGVRQYQDQ

SEQ ID NO: 1433 - protein, 1512 aa, Fasciola gigantica
MSWLNGHSRDHNPMLPSLQQRVVAVETLGIQPSVGEPETSWLEDAKACDCGMNSTAGEFLNEGEGVPKWPSFSCGPYTGSSVFYRDRTEVHGRSSMVRKSGHVPRDSYILPPKESVTWTLQHRMSTVECCGLAQRVRLMVFPTPHTMMLYPLRDRVTPLIWDETLRLCFFSSSTSISGLFHLGHLPVTRPITESSTAVLRREVGSDNAVPRDGCVAADLAPRGGFFTLGSSTAVLRREVGSDNAVPRDGCVAADLAPRGGFFTLGSSTAVLRREVGSDNAVPRDGCVAADLAPRGGFFTLGSSTAVLRREVGSDNAVPRDGCVAADLAPRGGFFTLGSSTAVLRRGVGSDNAVPRDGCVAADLAPRGGFFTLGSPTAVLRREVGSDNAVPRDGCVAADLAPRGGFFALGNPHEMEAVDLDRSVSPPAVLDIAGVDTDGNHRCAVCSMRFNTARSLGQHNRHRHPAWVNARRVLELPTGKLVWTEQDITVLHNLADEVASFHTTRKSLSVALSELLPGRTPAAILKRLALSRWDGALNCNMPTGRRRRVAITRRSPVVPPPRPPSPIPVTRPPRPVRRIEPDRSPWRLWTGVELGTLLALVRQHAPTCNTLGDLVRTISPSFPSRSFAALAKQVVSVAEAPIRPTPRIGLPEAIQPLLPVTEGGPMRSTLLEASRELLRVGNDVRLGQERLRAIANNPEGIAESLALHALDRFPRLWVPSRPRRSHPPPRNYRALRRAQYASLQRILHTNPKDAATHILDGSWRLLHQNRALPPDLHSYWTEVFLAPSFSDSRPVNAITQPEWSLISPITCEEVKKAVVGMGGTAPGLDRLTPANLKSFGLTPLTGYLNLILCYGCPASLAAARVTLIPKVPDATRPEQYRPLAVSSVLVRCLHKILAYRWASVLKLSSLQLAFMQRDGCLEATTILQGVFRDVHTRCRPISIAFLDVSKAFDTVLHDSIFRAAATYGAPPLLLQYLRKLYSQGAVTLGETDVIPKRGVRQGDPLSPLLFILAMEEILMAANPNDGYQLPSSTISTLAYADDLVLFAHSPGALGLKLERVAAALRLAGMEINAAKSITFTISANTHSKNLCLDNIGYTLDGVSIAAADMETRVKYLGLQFTWKGQISYKDTARLAEYCQELTSAPLKPQQRIHILRQVALPKLHHQLVLSSIHRRTLKAMDISCRHYVRRWLKLPNDTSTAFFHAKTRDGGLGLTSLATSIPLWRRSRLTKLITSEHPVVRDVVSICLTKALTVANEPVFVMGTVVNDKEEAALAWKLAMNASLDCADLGIIHETPESSNWTVRSSRMAPSLYIRGLQLRAGTLGTKSRQQRGRAQMDKLCRRGCGQTETLPHILQSCPAAHAARCVRHNRLAKSIAVSLRRKGYQVYEEPIIRTGTTYCKPDIVACQDGLGFVIDVAVVSGHRLHESWDLKIAKYDTEAINAAIVECLPEDLGIRSLIHQPAIISFKGIWFPLSAKRLKTLGLSADCLAGLGLVTIKGSLACFDMFMMGSNG

SEQ ID NO: 1434 - protein, 1519 aa, Fasciola gigantica
MLLPSTGHELVEWAFPDHNPMLPSLQQRVVAVETLGIQPSVGEPETSWLEDAKACDCGMNSTAGEFLNEGEGVPKWPSFSCGPYTGSSVFYRDRTEVHGRSSMVRKSGHVPRDSYILPPKESVTWTLQHRMSTVECCGLAQRVRLMVFPTPHTMMLYPLRDRVTPLIWDETLRLCFFSSSTSISGLFHLGHLPVTRPITESSTAVLRREVGSDNAVPRDGCVAADLAPRGGFFTLGSSTAVLRREVGSDNAVPRDGCVAADLAPRGGFFTLGSSTAVLRREVGSDNAVPRDGCVAADLAPRGGFFTLGSSTAVLRREVGSDNAVPRDGCVAADLAPRGGFFTLGSSTAVLRRGVGSDNAVPRDGCVAADLAPRGGFFTLGSSTAVLRREVGSDNAVPRDGCVAADLAPRGGFFALGNPHEMEAVDLDRSVSPPAVLDIAGVDTDGNHRCAVCSMRFNTARSLGQHNRHRHPAWVNARRVLGLPTGKLVWTEQDITVLHNLADEVASFHTTRKSLSVALSELLPGRTPAAILKRLALSRWDGALNCNMPTGRRRRVAITRRSPVVPPPRPPSPIPVTRPPRPVRRIEPDRSPWRLWTGVELGTLLALVRQHAPTCNTLGDLVRTISPSFPSRSFAALAKQVVSVAEAPIRPTPRIGLPEAIQPLLPVTEGGPMRSTLLEASRELLRVGNDVRLGQERLRAIANNPEGIAESLALHALDRFPRLWVPSRPRRSHPPPRNYRALRRAQYASLQRILHTNPKDAATHILDGSWRLLHQNRALPPDLHSYWTEVFLAPSFSDSRPVNAITQPEWSLISPITCEEVKKAVVGMGGTAPGLDRLTPANLKSFGLTPLTGYLNLILCYGCPASLAAARVTLIPKVPDATRPEQYRPLAVSSVLVRCLHKILAYRWASVLKLSSLQLAFMQRDGCLEATTILQGVFRDVHTRCRPISIAFLDVSKAFDTVLHDSIFRAAATYGAPPLLLQYLRKLYSQGAVTLGETDVIPKRGVRQGDPLSPLLFILAMEEILMAANPNDGYQLPSSTISTLAYADDLVLFAHSPGALGLKLERVAAALRLAGMEINAAKSITFTISANTHSKNLCLDNIGYTLDGVSIAAADMETRVKYLGLQFTWKGQISYKDTARLAEYCQELTSAPLKPQQRIHILRQVALPKLHHQLVLSSIHRRTLKAMDISCRHYVRRWLKLPNDTSTAFFHAKTRDGGLGLTSLATSIPLWRRSRLTKLITSEHPVVRDVVSICLTKALTVANEPVFVMGTVVNDKEEAALAWKLAMNASLDCADLGIIHETPESSNWTVRSSRMAPSLYIRGLQLRAGTLGTKSRQQRGRAQMDKLCRRGCGQTETLPHILQSCPAAHAARCVRHNRLAKSIAVSLRRKGYQVYEEPIIRTGTTYCKPDIVACQDGLGFVIDVAVVSGHRLHESWDLKIAKYDTEAINAAIVECLPEDLGIRSLIHQPAIISFKGIWFPLSAKRLKTLGLSADCLAGLGLVTIKGSLACFDMFMMGSNG

SEQ ID NO: 1435 - protein, 1008 aa, Fasciola gigantica
MLHYRRLYTPIYGPYVRPMLAYTLLCYTIGAYTRLYTARTYGLCWHTRRSPVVPPPRPPSPIPTTRPPRPVRRIEPDRSPWRLWTGVELGTLLALVRQHAPTCNTLGDLVRTISPSFPSRSFAALAKQVVSVAEAPIRPTPRIGLPEAIQPLLPVTEGGPMRSTLLEASRELLRVGNDVRLGQERLRVIANNPEGIAESLALHALDRFPRLWVPSRPRQSHLPPRNYRALRRAQYASLQRLLHTNPKDAATHILDGSWRLLHQNRALPPDLHSYWTEVFQAPSFSDNRPVNAITQPEWSLISPITCEEVKKAVVGMGGTAPGLDRLTPANLKSFGLTPLTGYLNLILCYGCPASLAAARVTLIPKVPDATRPEQYRPLAVSSVIVRCLHKILAYRWASVLKLSSLQLAFMQRDGCLEATTILQGVFRDVHTRCRPISIAFLDVSKAFDTVLHDSIFRAAATYGAPPLLLQYLRQLYSQGAVTLGETDVIPKRGVRQGDPLSPLLFILAMEEILMAANPNDGYQLPSSTISTLAYADDLVLFAHSPGALGLKLERVAAALRLAGMEINAAKSITFTISANTHSKNLCLDNIGYTLDGVSIAAADMETRVKYLGLQFTWKGQISYKDTARLAEYCQELTSAPLKPQQRIHILRQVALPKLHHQLVLSSIHRRTLKAMDISCRHYVRRWLKLPNDTSTAFFHAKIRDGGLGLTSLATSIPLWRRSRLTKLITSEHPVVRDVVSICLTKALTVANEPVFVMGTVVNDKEEAASAWKLAMNASLDCADLGIIHETPESSNWIVRSSQMAPSLYIRGLQLRAGTLGTKSRQQRGRAQMDKLCRRGCGQTETLPHILQSCPAAHAARCVRHNRVAKSIAVSLRRKGYQVYEEPIIRTGTTYCKPDIVACQDGLGFVIDVAVVSGHRLHESWDLKIAKYDTDAINAAIMECLPEDVGIRSLIHQPAIISFKGIWFPLSAKRLKTLGLSADCLAGLGLVTIKGSLACFDMFMMGSNG

SEQ ID NO: 1436 - protein, 1110 aa, Fasciola gigantica
MCIQVYTSVYEMEAVDLDRSVSPPAVLDIAGVDTDGNHRCAVCSMRFNTARSLGQHNRHRHPAWVNARRVLGLPTGKLVWTEQDITVLHNLADEVASFHTTRKSLSVALSELLPGRTPAAILKRLALSRWDGALNCNMPTGRRRRVAITRRSPVVPPPRPPSPIPVTRPPRPVRRIEPDRSPWRLWTGVELGTLLALVRQHAPTCNTLGDLVRTISPSFPSRSFAALAKQVVSVAEAPIRPTPRIGLPEAIQPLLPVTEGGPMRSTLLEASRELLRVGNDVRLGQERLRAIANNPEGIAESLALHALDRFPRLWVPSRPRRSHPPPRNYRALRRAQYASLQRILHTNPKDAATHILDGSWRLLHQNRALPPDLHSYWTEVFLAPSFSDSRPVNAITQPEWSLISPITCEEVKKAVVGMGGTAPGLDRLTPANLKSFGLTPLTGYLNLILCYGCPASLAAARVTLIPKVPDATRPEQYRPLAVSSVLVRCLHKILAYRWASVLKLSSLQLAFMQRDGCLEATTILQGVFRDVHTRCRPISIAFLDVSKAFDTVLHDSIFRAAATYGAPPLLLQYLRKLYSQGAVTLGETDVIPKRGVRQGDPLSPLLFILAMEEILMAANPNDGYQLPSSTISTLAYADDLVLFAHSPGALGLKLERVAAALRLAGMEINAAKSITFTISANTHSKNLCLDNIGYTLDGVSIAAADMETRVKYLGLQFTWKGQISYKDTARLAEYCQELTSAPLKPQQRIHILRQVALPKLHHQLVLSSIHRRTLKAMDISCRHYVRRWLKLPNDTSTAFFHAKTRDGGLGLTSLATSIPLWRRSRLTKLITSEHPVVRDVVSICLTKALTVANEPVFVMGTVVNDKEEAALAWKLAMNASLDCADLGIIHETPESSNWTVRSSRMAPSLYIRGLQLRAGTLGTKSRQQRGRAQMDKLCRRGCGQTETLPHILQSCPAAHAARCVRHNRLAKSIAVSLRRKGYQVYEEPIIRTGTTYCKPDIVACQDGLGFVIDVAVVSGHRLHESWDLKIAKYDTEAINAAIVECLPEDLGIRSLIHQPAIISFKGIWFPLSAKRLKTLGLSADCLAGLGLVTIKGSLACFDMFMMGSNG

SEQ ID NO: 1437 - protein, 822 aa, Gonioctena quinquepunctata
MEFQSKHPHDIFQNYNSNIGCGKFTTLKVTEKEVMKAIKSFRTSSAGGLDSLRPSHLQDLISRSSGCESENLVSSLTKLCNLMLSGKVNQEICPILYGASLIALKKKCGGIRPIAVGTIYRRLTGKLSCMSISAELGDSFQPVQFDFGTPGGCEVVAHSARRFLNQHPDSSSQVFLKLDFKNAFNTLKRNLILQKAEKVIPFIKQCYQTPTYLNFGEKVIMSESGVQQGDPLGPALFCLTIDELTKSIKSAFNCWYFDDGSIGGDRDVVHEEFCRIIRESKNLGLALNFNKCELLTSDNIYFESIAPGIQLMKKRDWTLLGAPLTPESISGCLIQKTKSLDLMSSCPNELPSHIAYFLLRNCLSIPKLLYTLRCSPTWQCQKGLQDFDSILRNSLEQITNNEFDGNTWKQVTLPVKLGGLGIRLATSLPHSCESMVSTVLPTCFLKIQDKYYLECEQKWISTTKVDLPENRKSQKTWDIPMTDSIYEQLLESAAESEFEKARLNAVSSKESGAWLNALPVAFLGTLLDDQSFRIVVGLRLGLSLCVSHRCRCGSIVEENGTHGLSCKFSSGRFSRHHAVNDLIKRALTTAEIPSVLEPVGISRDDGKRPDGMTLIPWKFGKPLVWDFTCVDTVAASHLITTSITKGAAATSAEKLKIRKYSNIEEFYTFYPVAIETYGVFGSHAQELLEEIGKKIIKCTNDSRSYAFLIQRISMAIQRGNAASVMGTLPSSRKLDEIFSQPQKPSIQRREYLDKFKKNTIPDRNYSFDVSINDVCSYNYNNTISPLVNENAQIVGLDGLKNIGNTCFMNSVIQCLSNTRWLL

SEQ ID NO: 1438 - protein, 1184 aa, Meandrusa sciron
METRSKKKLRGPLPEGDRRGAPGADAGCFSMRTVSGEELNRRAPIEKHTTADRGSPLIVSGHNSPVEPYSPSGSSYVPSTRSSPTSISDVDVPVNERIHVGSYTQESSPPPAMDVSMVAPAMRPATTKAGKPRVRMKWDKEINIFLMRTYLEITKLETDLTQYRQQLYLRFTEKYPNVNTTEQRISDQRRVIVRNKLLSDIEMKKIYEEVQLVLESNTNTDIIISPYYVLNSNSSIDTAGNLNNTDNFESPDTQELNSTQNTNTQMSAQSAMVSDISDDLLEKLKNNLEQNLIKYKSTDPGLRPKLPKLRYSFQLNKLLLSFNEYILPHKLNTLENIIDTHTLIYCTALTIITHLNIKIKDNDRRHCNAKPAWQRRLEMDIEKLRVDIGRVTQYKNGNRGKKLVKKVSNILECTKIHSSREDSNKRLNEHLDTLKQKLSVKSHRLARYKKAQYRKDNNKLFTTNEKQFYRKLKESVKVENPPSEQDLADFWGKLWSNDGEHNKNAEWIEKERSRSENIEEMDFEEIGTDELKSIINKTHNWKAAGLDKIQNFWFKYLTTLHSILANQITEIIKGNKTMPEFLAQGITYMLPKSNRTHDPAQYRPITCLPTLYKIITSCLAHKIKVHLERNKIISEEQKGCRENHRGCKEQLIIDSVILKHVQKGRKDLFVTYIDYKKAFDSVPHSWLLEVLHLYKINSTIINFLKNTMQIWKTTLHLRTELAEISTKEINIRKGIFQGDSLSPLWFCLALNPLSNQINNSNLGYDIKSNRKTLHQLTHLLYMDDLKLYSNKEINMTQLLNITTEFSKDIKMELGLEKCRKLNITKGKITEGDYNVGEQESITAMKEGEVYKYLGYNQGRLIEHKAIKDKLKIEYFQRLRLLGKTQLCSKNLFKAINTYAIPILTYSFGIIKWSITELNYLETKTRTILTHNRYHHPKSAIERVTLARRYGGRGLIDITHLHKTQIFNLKTFFNQKKIESKLHDTITKIDTQFTPLNLHSEITEPIDIKEAVEKKLRKWKSKELHGRHMNDLEQSHVHKEATNKWLELGGLFPETEGFMLAIQDQVISTKNYRKFILKEKSIKDDLCRKCHTKPETIQHITGACVTLTQNDYTHRHNQLVNIIHKKIAQKCNLALSHQTPYYKYTPQPVLENHSYKLYYDRTILTDHTIYNNRPDITFVDKKNKH

SEQ ID NO: 1439 - protein, 1311 aa, Limenitis camilla
METRLRKMKRIGPLPGGDRRGAPGADAGCSSMRTVSGEELNRRAPTVKNITAEESVSDEELNRRAPIDNNATADDLDRQIESRYSSPIEPYSPSTISYVPSVRSSLSSSCDTNIIYNTDEHLIVEAQECPTPPVMDVSKVASAMKPATTKAGKPRVRMKWDKETNTFIIRTYLEVTNLETDLTMYRQQLYQKFKEKYPNITTSEQRLSDQRRVIIRNKLLSDSELKSIREEVKCSLHSNLNADINLISSHTLDSPPNDPLIQSTHESKNSEFIITQEPDSIQVVDTQINTNKRDNYNITSSEIEKLKDELEQALIKHRNSDHVLRPRLPKLKPTYEVYKLLKIFNDNILPNKLSTLTDILDTHTIIYCTALTIISHMNIKIKDNSNIIIFKSKPAWEKRLHNNIEQLRKDIGRLTQYQNGNRVNKLVKNVSKILATTNKHSSREDDNKRLEEYIDTLKQKLAVKSHRLARYKKAQARKHSNNLFTNNEKQFYRNLKGDLTVKDPPSEQSLESFWGNLWNNDVEHNRNAEWINRERSRSEKISQMDFDRIQTDELKNIINKTLNWKAAGIDHIHNFWFKKLHSLHSILASQITDIIKGNSLMPEFLAEGLTFMLAKSNQTHDPSQYRPITCLPTLYKIITSCIAHKIKIHLERNKIISEEQKGCRQYHRGCKEQLIIDSAVLKHTQKGRKNLFVAYIDYKKAFDSVPHSWLIEVLNIYKINPIIVNFLKNTMRIWKTTLHLRTEQTDINTGAINIKKGIFQGDSLSPLWFCLALNPLSNELNNSKLGFDIKSGRKILNQITHLLYMGDLKLYSNKDINIDKLLDITTEFSKDIKMEFGLSKCRKINIVKGKVVEGNYNVGEQESILAMQYNEVYKYLGYNQARLIEHNTIKQTLKVEYFNRIRLLCQKQLSSKNLFKAINTYAIPVLTYSFGIIKWSNTELHYLETKTRTILTQYRYHHPKSAIERVTLSRKNGGRGLIDITLLQNTQIQNLKSFFENKSDSSLHITIAEIDTQFPPLNLSIKNTKPIDKKKEIEAKINKWKNKELHGRHLKDLEHPYIEKEASNKWLELGGLFPETEGFMLAIQDQVITTKNYRKSILKEKTLKNDLCRKCKAKSETIQHITGSCTTLTQSDYLHRHNQLVNIIHKKIAQICNLKHDQQSPYYKYIPQTITENKEYKLYYDRTILTDHTIYNNRPDITLVDKRNQSTFIIDISVPNTNNLQSAIAEKIRKYTELQEEIKRMWKMKTVTIVPIIISSTGVVPKNLFKSLDILQLPKLTYLTLQKAAILNTCRIVRKFLQLSSDNDKPTDLLL

SEQ ID NO: 1440 - protein, 1311 aa, Limenitis camilla
METRLRKMKRIGPLPGGDRRGAPGADAGCSSMRTVSGEELNRRAPTVKNITAEKSVSDEELNRRAPIDNNATADDLDRQIESRYSSPIEPYSPSTISYVPSVRSSLSSSCDTNIIYNTDEHLIVEAQECPTPPVMDVSKVASAMKPATTKAGKPRVRMKWDKETNTFIIRTYLEVTNLETDLTMYRQQLYQKFKEKYPNITTSEQRLSDQRRVIIRNKLLSDSELKTIREEVKCSLHSNLNADINLISSHTLDSPPNDPLIQSTHESKNSEFIITQEPDSIQVVDTQINTSKRDNYNITSSEIEKLKDELEQALIKHRNSDHVLRPRLPKLKPTYEVYKLLKIFNDNILPNKLSTLTDILDTHTIIYCTALTIISHMNIKIKDNSNIIIFKSKPAWEKRLHNNIEQLRKDIGRLTQYQNGNRGNKLVKNVSKILATTNKHSSREDDNKRLEEYIDTLKQKLAVKSHRLARYKKAQARKHSNNLFTNNEKQFYRNLKGDLTVKDPPSEQSLESFWGNLWNNDVEHNRNAEWINRERSRPEKISQMDFDRIQTDELKNIINKTLNWKAAGIDHIHNFWFKKLHSLHSILASQITDIIKGNSLMPEFLAEGLTFMLAKSNQTHDPSQYRPITCLPTLYKIITSCIAHKIKIHLERNKIISEEQKGCRKYHRGCKEQLIIDSAVLKHTQKGRKNLFVAYIDYKKAFDSVPHSWLIEVLNIYKINPIIVNFLKNTMRIWKTTLHLRTEQTDINTGAINIKKGIFQGDSLSPLWFCLALNPLSNELNNSKLGFDIKSGRKTLNQITHLLYMDDLKLYSNKDINIDKLLDITTEFSKDIKMEFGLSKCRKINIVKGKVVEGNYNVGEQESILAMQYNEVYKYLGYNQARLIEHNTIKQTLKVEYFNRIRLLCQKQLSSKNLFKAINTYAIPVLTYSFGIIKWSNTELHYLETKTRTILTQYRYHHPKSAIERVTLSRKNGGRGLIDITLLHNTQIQNLKTFFENKSDSSLHITIAEIDTQFTPLNLSIKNTKLIDKKKEIEAKINKWKNKELHGRHLKDLEHPYIEKEASNKWLELGGLFPETEGFMLAIQDQVITTKNYRKSILKEKTLKNDLCRKCKAKPETIQHITGSCTTLTQSDYLHRHNQLVNIIHKKIAQICNLKHDQQSPYYKYIPQTITENKEYKLYYDRTILTDHTIYNNRPDITLVDKRNQSTFIIDISVPNTNNLQSAIAEKIRKYTELQEEIKRMWKMKTVTIVPIIISSTGVVPKNLFKSLDILHLPKLTYLTLQKAAILNTCRIVRKFLQLSSDNDKPTDLPL

SEQ ID NO: 1441 - protein, 935 aa, Limenitis camilla
MNIKIKDNSNIIIFKSKPAWEKRLHNNIEQLRKDIGRLTQYQNGNRGNKLVKNVSKILATTNKHSSCEDDNKRLEEYIDTLKQKLAVKSHRLARYKKAQARKHSNNLFTNNEKQFYRNLKGDLTVKDPPSEQSLESFWGNLWNNDVEHNRNAEWINRERSRSEKISQMDFDRIQTDELKNIINKTLNWKAAGIDHIHNFWFKKLHSLHSILASQITDIIKGNSLMPEFLAEGLTFMLAKSNQTHDPSQYRPITCLPTLYKIITSCIAHKIKIHLERNKIISEEQKGCRQYHRGCKEQLIIDSAVLKHTQKGRKNLFVAYIDYKKAFDSVPHSWLIEVLNIYKINPIIVNFLKNTMRIWKTTLHLRTEQTDINTGAINIKKGIIQGDSLSPLWFCLALNPLSNELNNSKLGFDIKSGRKILNQITHLLYMDDLKLYSNKDINIDKLLDITTEFSKDIKMEFGLSKCRKINIVKGKVVEGNYNVGEQESILAMQYNEIYKYLGYNQARLIEHNTIKQTLKVEYFNRIRLLCQKQLSSKNLFKAINTYAIPVLTYSFGIIKWSNTELHYLETKTRTILTQYRYHHPKSAIERVTLSRKNGGRGLIDITLLHNTQIQNLKTFFENKSDSSLHITIAEIDTQFTPLNLSIKNTKPIDKKKEIEAKINKWKNKELHGRHLKDLEHPYIEKEASNKWLELGGLFPETEGFMLAIQDQVITTKNYRKSILKEKTLKNDLCRKCKAKPETIQHITGSCTTLTQSDYLHRHNQLVNIIHKKIAQICNLKHDQQSPYYKYIPQTITENKEYKLYYDRTILTDHTIYNNRPDITLVDKRNQSTFIIDISVPNTNNLQSAIAEKIRKYTELQEEIKRMWKMKTVTIVPIIISSTGVVPKNLFKSLDILQLPKLTYLTLQKAAILNTCRIVRKFLQLSSDNDKPTDLLL

SEQ ID NO: 1442 - protein, 1256 aa, Boloria selene
MELRNRQKRIMSLPGGDRRGAPGADAGCYSMRAVGGKELSGRTLTGNEPEEATSSQISVDPTPEYQTPPALDVSTVASAMKPATTKAGKPRVRMKWDKELNIFIMRTYFQITNLETDFTQYRQQLHQHFLSKYPNSDVSEQRLSDQRRAIIRNKFLSDNEIESIRKEVQYVLNKNSNSNHLVMSDTLENLPNPSTIITQSQNTSNLYESRDTQETFNEVIDTQTTDTNNVITHSTNKFDFKPECIEKLKNNLENNLLKYNNNDATLRPSLPKLRNSYKLSKIINIFNDNILPNKLNTLDNLHDTHTLVYCTALTISTFFNAKVLDNNSTRTRKPKQFWQIRLEKDIEQLRKDIGRLTQYKNGNRSKKLDKKVKEILNKTRKHSTYENFNKRLEEYLDTLKQKLSVKSHRLARYNKAKFRKDNNKLFVTNEKQFYRKLKGSIKIEKTPSVEALKDYWENIWNNSTEHNKDAEWISREKLRYETITEMDFENIEIDEFKSIINKTQSWKTPGVDHVQNFWYKKLHILHHILAKQITNIIKGNRIIPDFLTEGVTYMLPKSNRTHDPSQYRPITCLPTIYKIITSCITYKINKHLEINKILTEEQKGCKKLHKGCKEQLIIDSVVLKHVQKGRKDLFISYIDYKKAFDSVPHSWLLEILNIYKIHPTIISFLKNTMQNWKTTLHLRTDSKDINTNKINIKRGIFQGDSLSPLWFCLALNPLSHELIDSNLGFDIKNSRKKLHQLTHLLYMDDLKLYSNTETNMTQLLDITLNFSKDIKMDFGLDKCKKLNIVKGKIVTGDYNINEQDCIIAMKDNELYKYLGYNQARVLDHKSIRDRLQLEYFNRIRLLSKTQLSSKNLFKAINTYAIPVLTYSFGVVKWSNTALKRLETKTRTILTQHRYHHPKSAIERITLPRKYGGRGLIDITQLYIKQVTNLKNHFHEKKITSNLHETIVTIDKFFTPLNLCDETTEPIHNPQGIEDKLGNWKAKELHGRHPKELEQPHVHKEASNKWLDLGGLFPETEGFLMAIQDQVISTKNYRKYIIKDRTVQNDLCRKCHHKPETIQHITGACATLTQNDYTHRHNQLVNIIHQKLVLKYKLTNDPHTPYYKYTPRPILENQAYKIYYDRTILTDHTIYNNRPDITFVDKNNKHTYIIDIAVPNTNNLQATITEKIRKYTELQEEIRRVWKMSNVTIVPIIVSTTGVVPKHLFNSLNILSLPKFTYLTLQKAAILNTCRTVRKFLQLSSDSDETFHQATQN

SEQ ID NO: 1443 - protein, 1258 aa, Fabriciana adippe
MELRNKEKRLMPLPGGNRRGAPGADAGCYSMRAVGGKELSGRTLTGDEPEEATSSQMFKDPTQESQTPPALDVSRVASAMRPATTKAGKPRVRMKWEKEVNIFIMRTYFQITNLETDLTQYRQQLYQHFLNKYPDSNVSEQRLSDQRRAIIRNKLLSDNEIESIRKEVQNTLDKNSNTIHLIPNDKFENLPNTSTSITQDTQSQNTNNYNESLATQEILNEVIDTQTTDTYNVITHNTSKSDLNPECIEKLKDNFENNLLKYNNNDTTLRPTLPKLRNSYKLSKIINIFNESILPSKLNTLENIHDTHTLVYCTALTISMYFNANVKDYSTRTRRHKPFWQIRLEKDIEPLRKDIGRLTQYKNGNKSKKLVKKVKEILEKTRKHSTHDDFNKRLEEYLDTLKQKLSVKSHRLARYNKAQVRKENNKLFANNEKQFYRKLKCSTKIEHPPSVEALKEYWENIWSNNTEHNKDAEWILREKLRFETINEMDFEEIEVDELKNIISKTHSWKAPGADYVQNFWYKKLHILHHTLAKQITNIIKGNSILPEFLTEGVTYMLPKSNRTHDPSQYRPITCLPTIYKIITSCITYKINKHLEINKILTEEQKGCKKLHKGCKEQLIIDSVVLKHVQKGRKDLFISYIDYKKAFDSVPHSWLIEILQIYKIHPIIITFLKNTMQNWRTTLHLRTDSKDINTSKINIKRGIFQGDSLSPLWFCLALNPLSNELIDSKLGFDIKNNRKKLHQLTHLLYMDDLKLYSNKETNMTQLLDITLKFSKDIKMDFGLDKCKKLNIVKGKIVSGDYNISEQDSITAMKDNELYKYLGYHQARLLDHKSIRDRLQLEYFNRIRLLSKTKLCSKNLFKAINTYAIPVLTYSFGIVKWSNTDLKRLETKTRTILTQHRYHHPKSAIERITLPRKYGGRGLIDITQLYTKQVSNLRKHFQEKKITSKLHETIIGIDKIFTPLNLNSETTEPIHNTQEIEVKIKNWKTKELHGRHPKDLDQSHVHTEASNKWLDLGGLFPETEGFLMAIQDQVISTKNYRKYILKDRTLQNDLCRKCHLKPETIQHITGACPTLTQNDYTHRHNQLTNIIHQKLVQKYKLTNDPHTPYYKYTPQPVLENQTYKIYYDRTILTDHTIYNNRPDITFVDKNNKHTYIIDIAVPNTNNLQATISEKIRKYTELQEEIRRVWKMTNVTIVPIIVSTTGVVPKHLFNSLSILSLPKFTYLTLQKAAILNTCRIVRKFLQLSSDNDEIVQQATQN

SEQ ID NO: 1444 - protein, 1234 aa, Boloria selene
MELRNRQKRIMSLPGGDRRGAPGADAGCYSMRAVGGKELSGRTLTGNEPEEATSSQISVDPTPEYQTPPALDVSTVASAMKPATTKAGKPRVRMKWDKELNIFIMRTYFQITNLKTDFTQYRQQLHQHFLSKYPNSDVSEQRLSDQRRAIIRNKFLSDYEIESIRKEVQYVLNKNSNSNHLVMSDTLENLPNPSTIITQTQNTRNLYESRDTQETFNEVIDTQTTDTNNVITHSTNKFDFKPECIEKLKNNLENNLLKYNNNDATLRPSLPKLRNSYKLSKIINIFNDNILPNKLNTLDNLNDTHTLVYCTALTISTFFNAKVLDNNSTRTRKPKQFWQIRLEKDIEQLRKDIGRLTQYKNGNRSKKLDKKVKEILNKTRKHSTYENFNKRLEEYLDTLKQKLSVKSHRLARYNKAKFRKDNNKLFVTNEKQFYRKLKGSIKIEKTPSVEALKDYWENIWNNSTEHNKDAEWISREKLRYETITEMDFENIEIEEFKSIINKTQSWKAPGVDHVQNFWYKKLHILHHILTKQITNIIKGNSIIPEFLTEGVTYMLPKSNRTHDPSQYRPITCLPTIYKIITSCITYKINKHLEINKILSEEQKGCKKLHKGCKEQLIIDSVVLKHVQKGRKDLFISYIDYKKAFDSVPHSWLLEILNIYKIHPTIISFLKNTMQNWKTTLHLRTDSKDVNTNKINIKRGIFQGDSLSPLWFCLALNPLSHELIDSNLGFDIKNSRKKLHQLTHLLYMDDLKLYSNTETNMTQLLDITLNFSKDIKMDFGLDKCKKLNIVKGKIVTGDYNINEQDCIIAMKDNELYKYLGYNQARVLDHKSIRDRLQLEYFNRIRLLSKTQLSSKNLFKAINTYAIPVLTYSFGVVKWSNTALKRLETKTRTILTQNRYHHPKSAIERITLPRKYGGRGLIDITQLYIKQVTNLKNHFHEKKITSNLHETIVTIDKFFTPLNLCDETIEPIHNPQGIEDKLSNWKTKELHGRHPKELDQPHVHKEASNKWLDLGGLFPETEGFLMAIQDQVISTKNYRKYIIKDRTVQNDLCRKCHHKPETIQHITGACATLTQNDYTHRHNQLVNIIHQKLVLKYKLTNDPHTPYYKYTPRPVLENQAYKIYYDRTILTDHTIYNNRPDITFVDKNNKHTYIIDIAVPNTNNLQATITEKIRKYTELQEEIRRVWKMSNVTIVPIIVSTTGVVPKHLFNSLNICREIDIINLHNSVTSIKIASE

SEQ ID NO: 1445 - protein, 1258 aa, Fabriciana adippe
MELRNKEKRLMPLPGGNRRGAPGADAGCYSMRAVGGKELSGRTLTGDEPEEATSSQMFKDPTQESQTPPALDVSRVASAMRPATTKAGKPRVRMKWEKEVNIFIMRTYFQITNLETDLTQYRQQLYQHFLNKYPDSNVSEQRLSDQRRAIIRNKLLSDNEIESIRKEVQNTLDKNSNTIHLIPNDKFENLPNTSTSITQDTQSQNTNNYNESLATQEILNEVIDTQTTDTYNVITHNTSKSDLNPECIEKLKDNFENNLLKYNNNDTTLRPTLPKLRNSYKLSKIINIFNESILPSKLNTLENIHDTHTLVYCTALTISMYFNANVKDYSTRTRRHKPFWQIRLEKDIEQLRKDIGRLTQYKNGNKSKKLVKKVKEILEKTRKHSTHDDFNKRLEEYLDTLKQKLSVKSHRLARYNKAQVRKENNKLFANNEKQFYRKLKCSTKIEQPPSVEALKEYWENIWSNNTEHNKDAEWILREKLRFETINEMDFEEIEVDELKNIISKTHSWKAPGADYVQNFWYKKLHILHHTLAKQITNIIKGNSILPEFLTEGVTYMLPKSNRTHDPSQYRPITCLPTIYKIITSCITYKINKHLEINKILTEEQKGCKKLHKGCKEQLIIDSVVLKHVQKGRKDLFISYIDYKKAFDSVPHSWLIEILQIYKIHPIIITFLKNTMQNWRTTLHLRTDSKDINTSKINIKRGIFQGDSLSPLWFCLALNPLSNELIDSKLGFDIKNNRKKLHQLTHLLYMDDLKLYSNKETNMTQLLDITLKFSKDIKMDFGLDKCKKLNIVKGKIVSGDYNISEQDSITAMKDNELYKYLGYHQARLLDHKSIRDRLQLEYFNRIRLLSKTKLCSKNLFKAINTYAIPVLTYSFGIVKWSNTDLKRLETKTRTILTQHRYHHPKSAIERITLPRKYGGRGLIDITQLYTKQVSNLRKHFQEKKITSKLHETIIGIDKIFTPLNLNSETTEPIHNTQEIEVKIKNWKTKELHGRHPKDLDQSHVHTEASNKWLDLGGLFPETEGFLMAIQDQVISTKNYRKYILKDRTLQNDLCRKCHLKPETIQHITGACPTLTQNDYTHRHNELTNIIHQKLVQKYKLTNDPHTPYYKYTPQPVLENQTYKIYYDRTILTDHTIYNNRPDITFVDKNNKHTYIIDIAVPNTNNLQATISEKIRKYTELQEEIRRVWKMTNVTIVPIIVSTTGVVPKHLFNSLSILSLPKFTYLTLQKAAILNTCRIVRKFLQLSSDNDEIVQQATQN

SEQ ID NO: 1446 - protein, 1258 aa, Fabriciana adippe
MELRNKEKRLMPLPGGNRRGAPGADAGCYSMRAVGGKELSGRTLTGDEPEEATSSQMFKDPTQESQTPPALDVSRVASAMRPATTKAGKPRVRMKWEKEVNIFIMRTYFQITNLETDLTQYRQQLYQHFLNKYPDSNVSEQRLSDQRRAIIRNKLLSDNEIESIRKEVQNTLDKNSNTIHLIPNDKFENLPNTSTSITQDTQSQNTNNYNESLATQEILNEVIDTQTTDTYNVITHNTSKSDLNPECIEKLKDNFENNLLKYNNNDTTLRPTLPKLRNSYKLSKIINIFNESILPSKLNTLENIHDTHTLVYCTALTISMYFNANVKDYSTRTRRHKPFWQIRLEKDIEQLRKDIGRLTQYKNGNKSKKLVKKVKEILEKTRKHSTHDDFNKRLEEYLDTLKQKLSVKSHRLARYNKAQVRKENNKLFANNEKQFYRKLKCSTKIEQPPSVEALKEYWENIWSNNTEHNKDAEWILREKLRFETINEMDFEEIEVDELKNIISKTHSWKAPGADYVQNFWYKKLHILHHTLAKQITNIIKGNSILPEFLTEGVTYMLPKSNRTHDPSQYRPITCLPTIYKIITSCITYKINKHLEINKILTEEQKGCKKLHKGCKEQLIIDSVVLKHVQKGRKDLFISYIDYKKAFDSVPHSWLIEILQIYKIHPIIITFLKNTMQNWRTTLHLRTDSKDINTSKINIKRGIFQGDSLSPLWFCLALNPLSNELIDSKLGFDIKNNRKKLHQLTHLLYMDDLKLYSNKETNMTQLLDITLKFSKDIKMDFGLDKCKKLNIVKGKIVSGDYNISEQDSITAMKDNELYKYLGYHQARLLDHKSIRDRLQLEYFNRIRLLSKTKLCSKNLFKAINTYAIPVLTYSFGIVKWSNTDLKRLETKTRTILTQHRYHHPKSAIERITLPRKYGGRGLIDITQLYTKQVSNLRKHFQEKKITSKLHETIIGIDKIFTPLNLNSETTEPIHNTQEIEVKIKNWKTKELHGRHPKDLDQSHVHTEASNKWLDLGGLFPETEGFLMAIQDQVISTKNYRKYILKDRTLQNDLCRKCHLKPETIQHITGACPTLTQNDYTHRHNQLTNIIHQKLVQKYKLTNDPHTPYYKYTPLPVLENQTYKIYYDRTILTDHTIYNNRPDITFIDKNNKHTYIIDIAVPNTNNLQATISEKIRKYTELQEEIRRVWKMTNVTIVPIIVSTTGVVPKHLFNSLSILSLPKFTYLTLQKAAILNTCRIVRKFLQLSSDNDEIVQQATQN

SEQ ID NO: 1447 - protein, 771 aa, Boloria selene
MDFENIEIDEFKSIINKTQSWKTPGVDHVQNFWYKKLHILHHILAKQITNIIKGNRIIPDFLTEGVTYMLPKSNRTHDPSQYRPITCLPTIYKIITSCITYKINKHLEINKILTEEQKGCKKLHKGCKEQLIIDSVVLKHVQKGRKDLFISYIDYKKAFDSVPHSWLLEILNIYKIHPTIISFLKNTMQNWKTTLHLRTDSKDINTNKINIKRGIFQGDSLSPLWFCLALNPLSHELIDSNLGFDIKNSRKKLHQLTHLLYMDDLKLYSNTETNMTQLLDITLNFSKDIKMDFGLDKCKKLNIVKGKIVTGDYNINEQDYTIAMKDNELYKYLGYNQARVLDHKSIRDRLQLEYFNRIRLLSKTQLSSKNLFKAINTYAIPVLTYSFGVVKWSNTALKRLETKTRTILTQHRYHHPKSAIERITLPRKYGGRGLIDITQLYIKQVTNLKNHFHEKKITSNLHETIVTIDIFFTPLNLCDETTEPIHNPQGIEDKLGNWKAKELHGRHPKELEQPHVHKEASNKWLDLGGLFPETEGFLMAIQDQVISTKNYRKNIIKDRTVQNDLCRKCHHKPETIQHITGACATLTQIDYTHRHNQLVNIIHQKLVLKYKLTNDPHTPYYKYTPRPILENQAYKIYYDRTILTDHTIYNNRPDITFVDKNNKHTYIIDIAVPNTNNLQATITEKIRKYTELQEEIRRVWKMSNVTIVPIIVSTTGVVPKHLFNSLNILSLPKFTYLTLQKAAILNTCRTVRKFLQLSSDSDETFHQATQN

SEQ ID NO: 1448 - protein, 902 aa, Heliconius himera
MRLKADIDELRRDIGRLTQYKNGNRGKYLMKKINKILEKTKKHSSHDDNNKHVIEYLDTLKQKLAVKCHRLARYNKAQSRKDNNKLFSFNEKQFYRKLKGKTEVHQPPSSESFQNYWENIWSHSIKHNKDAEWINNEKIQSETITEMEIQNIELAEFRNIVNKTHSWKAPGVDYIQNFWFKKLHILHYKLIDQITDIIKGNTILPEFLTKGVTYMIPKSNKTNNPSQYRPITCLPTLYKIITSCITYRISKHLETNKILTEEQKGCKKLHRGCKEQLIIDSTVLKHVQKSQKSLFISYIDYKKAFDSIPHTWLIEILEIYKISPIIINFLKKTMQNWKTTIHLKSNFVNISTRIININRGIFQGDSLSPLWFCVALNPLSKLLNISKLGFEIKSNRKTLHRLSHLLYMDDLKLYSSKEANMVKLLDITTNFSADIRMNFGLDKCRKLNIVKGKITEGDYKLSEQDSITAMKSNELYKYLGYNQARLLDHKSIKDKLKKEYFSRINLLGKRQLCSKNLFKALNTYAIPVLTYSFGIIKWSNTDIKQLESKTRTTLTQNRFHHPKSAIERVTLAREVGGRGLIDITYLHDKQLVNLKQFFYHKKNESKLHETIIAIDNNFTPLNLKNESTESINKKDRIYEKTSNWKKKELHGRHPNNLEQLHVDKDASNKWLSLGGLFTETEGFMLAIQDQVITTKNYRKYIVKDRILDNDLCRKCQTKPETIQHITGACISLTQNDYTHRHNQLVNIIHQKLVLKFKLTSDPHTPYYKYIPRSVLENLSYTLYYDRTILTDHTIYNNRPDITFVDKNNKHTYLIDIAVPNTNNLQSTISEKIRKYTELQQEIKRVWKMDNVTIVPIVISTTGVGPKALLNSLKNLDLPKFTYITLQKAAILNTCRIVRKFLQ

SEQ ID NO: 1449 - protein, 768 aa, Boloria selene
MDFENIEIEEFKSIINKTQSWKAPGVDHVQNFWYKKLHILHHILTKQITNIIKGNSIIPEFLTEGVTYMLPKSNRTHDPSQYRPITCLPTIYKIITSCITYKINKHLEINKILSEEQKGCKKLHKGCKEQLIIDSVVLKHVQKGRKDLFISYIDYKKAFDSVPHSWLLEILNIYKIHPTIISFLKNTMQNWKTTLHLRTDSKDVNTNKINIKRGIFQGDSLSPLWFCLALNPLSHELIDSNLGFDIKNSRKKLHQLTHLLYMDDLKLYSNTKTNMTQLLDITLNFSKDIKMDFGLDKCKKLNIVKGKIVTGDYNINEQDCIIAMKDNELYKYLGYNQARVLDHKSIRDRLQLEYFNRIRLLSKTQLSSKNLFKAINTYAIPVLTYSFGVVKWSNTALKRLETKTRTILTQNRYHHPKSAIERITLPRKYGGRGLTQLYIKQVTNLKKHFHEKKITSNLHETIVTIDKFFTPLNLCDETIEPIHNPQGIEDKLSNWKTKELHGRHPKELDQPHVHKEASNKWLDLGGLFPETEGFLMAIQDQVISTKNYRKYIIKDRTVQNDLCRKCHHKPETIQHITGACATLTQNDYTHRHNQLVNIIHQKLVLKYKLTNDPHTPYYKYTPRSVLENQAYKIYYDRTILTDHTIYNNRPDITFVDKNNKHTYIIDIAVPNTNNLQATITEKIRKYTELQEKIRRVWKMSNVTIVPIIVSTTGVVPKHLFNSLNILSLPKFTYLTLQKAAILNTCRTVRKFLQLSSDSDETFHQATQN

SEQ ID NO: 1450 - protein, 1262 aa, Heliconius numata
MELRSKVKRLMPLPGGDRRGVPGADAGCHSMRTVGGKGISRRILTGNVPEEVTSSHISINPIHESSTPLALDVSMVASAMRPETTKAGKPRVRMKWDKEINIFIMRTYLKITNLETDLTQYRQKLHHHFTTKYSNTHVSEQRLSDQLRAIIRNKYLSDDEIKVLREEVKSILETNTKENMTNVSTSHYSKGSSNSFTNTSLHIDIRHTSNSESFNTHQTSREIDKQNNCSQNTITQIPSIQLDTHLHSHCTETLKSLLEESLSKYTNSDPTLRPRLPKLTNSSKLSHIIKIFNESILPEKINSLNNIIDTHTLIYCTAITITTYLNFKVDNRTNNNIHRPEPAWQIRLKSDIDELRRNIGRLTQYKIGNRSKHLVKSVNKILATTKKHSSREDNNKHLSEYMDTLKQKLAVKSHRLARYKKAQDRKNNNKIFTQNEKQFYRKLKSNTEIQHPPSEESLKKYWENIWAQSVEHNKDAEWIKEEKNNSETVTEMEFKNIEIDEFRQIVNKTHNWKSPGVDHIQNFWIKKLHILHNKLTQQITDIIKGNSILPNFLTRGITYMLAKSDRTDDPSQYRPITCLPTLYKIITSCISHRINKHLEANKIMTEEQKGCRKSHRGCKEQLIIDFVLLKYVQKNRKSLFVSYIDYKKAFDSIPHTWLIEILQIYKINPTIVNFLKNTMRNWQTTLHLKTNFDNISTDTINIKRGIFQGDSLSPIWFCLALNPLSKQLNLCRLGFDLKKNRKTLYQLSHLLYMDDLKLYSNKETHMTQLLDITSNFSKDIKMNFGLDKCRKLNIAKGKITEGNYILNEQDSIAAMKDNELYKYLGYNQGRLIEHKNIKDKLRKEYFNRIYLLSKRQLYSKNLFKAINTYAIPVLTYSFGIIKWSNTDIKQLESKTRTTLTQHRYHHPKSAIERITLARKDGGRGLIDITFLHNRQLINLKQFFYIKKSESKLHESIIAIDNNFTPLNLKNETIVQVNKLDTIKEKIHNWKKKELHGRHPNDLELSHVDKDASNKWLCLGGLFPETEGFMLAIQDQVITTKNYRKYIIKDRTLDSDLCRKCNNKPETIQHITGGCISLTQNDYTHRHNQLVNIIHQKLVLKFKLTSDPHTPYYKYTPRPVLENQSYTLYYDRTILTDHTIYNNRPDITFVDKINKHTYIIDIAVPNTNNLQSTISEKIRKYTELQEEIKRVWKMDCVTIVPIVISTTGVIPKNLTWSLNVLNLPRFTYLTLQKAALLNTCRTVRKFLHLGSDSDAVINQNSQT

SEQ ID NO: 1451 - protein, 1262 aa, Heliconius numata
MELRSKVKRLMPLPGGDRRGAPGADAGCHSMRTVGGKGISRRILTGNVPEEVTSSHTSINPIHESSTPLALDVSMVASAMRPETTKAGKPRVRMKWDKEINIFIMRTYLRITNLETDLTQYRQKLHHHFTTKYSNTHVSEQRLSDQLRAIIRNKYLSDDEIKVLREEVKSILETNTNENTTNVSTSHNSKGSSNSFTNTPLHIDIRHTSNTESFNTQQTSREIDKQNNCSQNTITQIPSIQLDTHLHSHCTETLKSLLEENLSKYTNSDPTLRPRLPKLTNSSKLSHIIKIFNESILPEKINSLNNIIDTHTLIYCTAITITTYLNFKVDNRTNNKIHRPEPAWQIRLKSDIDELRRNIGRLTQYKIGNRSKHLVKSVNKILATTKKHSSREDNNKSLSEYMDTLKQKLAVKSHRLARYKKAQDRKNNNKIFTQNEKQFYRKLKSNTEIQHPPSEESLKKYWENIWAQSAEHNKDAEWIKEEKNNSETVTEMEFKNIEIDEFRQIVNKTHNWKSPGVDHIQNFWIKKLHILHNKLTQQITDIIKGNSFLPNFLTRGITYMLAKSDRTDDPSQYRPITCLPTLYKIITSCISHRINKHLEANKIMTEEQKGCRKSHRGCKEQLIIDSVLLKYVQKNRKSLFVSYIDYKKAFDSIPHTWLIEILQIYKINPTIVNFLKNTMRNWQTTLHLKTNFGNISTDTINIKRGIFQGDSLSPIWFCLALNPLSKQLNLCRLGFDLKKDRKTLYQLSHLLYMDDLKLYSNKETHMTQLLDITSNFSKDIKMNFGLDKCRKLNIVKGKITEGNYILNEQDSIAAMKDNELYKYLGYNQGRLIEHKNIKDKLRKEYFNRIYLLSKRQLYSKNLFKAINTYAIPVLTYSFGIIKWSNTDIKQLESKTRTTLTQHRYHHPKSAIERITLARKDGGRGLIDMTFLHNRQLINLKQFFYIKKSESKLHESIIAIDNNFTPLNLKNETIVQVNKLDTIKEKIHNWKKKELHGRHPNDLELSHVDKDASNKWLCLGGLFPETEGFMLAIQDQVITTKNYRKYIIKDRTLDSDLCRKCNNKPETIQHITGGCISLTQNDYTHRHNQLVNIIHQKLVLKFKLTSDPHTPYYKYTPRPVLENQSYTLYYDRTILTDHTIYNNRPDITFVDKINKHTYIIDIAVPNTNNLQSTISEKIRKYTELQEEIKRVWKMDCVTIVPIVISTTGVIPKNLTWSLNVLNLPRFTYLTLQKAALLNTCRTVRKFLHLGSDSDAVINQISQT

SEQ ID NO: 1452 - protein, 960 aa, Heliconius melpomene
MPLPGGDRRGAPGADAGCHSMRTVGGKGISRRILTGNVPEEVTSSHTSINPIHESSTPLALDVSMVASAMRPETTKAGKPRVRMKWDKEINIFIMRTYLKITNLETDLTQYRQKLHHHFTTKYSNTHVSEQRLSDQLRAIIRNKYLSDDEIKVLREEVKSILETNTNDNTTNVSTSHNSKGSSNSFTNTSLHIDIRHTSNTESFNTQQTSREIDKQNNCSQNTIKCRAQQRRIQRLKEEKNNSETVTEMEFKNIEIDEFRQIVNKTHNWKAPGVDHIQNFWIKKLHILHNKLTQQITDIIKGNSILPNFLTRGITYMLAKSDRTDDPSQYRPITCLPTLYKIITSCISHRINKHLEANKIMTEEQKGCRKSHRGCKEQLIIDSVLLKYVQKNRKSLFVSYIDYKKAFDSVPHTWLIEILQIYKINPTIVNFLKNTMRNWQTTLHLKTNFDNISTHTINIKRGIFQGDSLSPIWFCLALNPLSKQLNLCRLGFDLKKNRKTLYQLSHLLYMDDLKLYSNKETHMTQLLDITSNFSKDIKMNFGLDKCRKLNIVKGKITEGNYILNEQDSIAAMKDNELYKYLGYNQGRLIEHKNIKDKLRKEYFNRIYLLSKRQLYSKNLFKAINTYAIPVLTYSFGIIKWSNTDIKQLESKTRTTLTQHRYHHPKSAIERITLARKDGGRGLIDITFLHNKQLINLKQFFYIKKSESKLHESIIAIDNNFTPLNLKNETIVQINKLDTIKEKIHNWKKKELHGRHPNDLELSHVDKDASNKWLCLGGLFPETEGFMLAIQDQVITTKNYRKYIIKDRTLDSDLCRKCNNKPETIQHITGGCISLTQNDYTHRHNQLVNIIHQKLVLKFKLTSDPHTPYYKYTPRPVLENQSYTLYYDRTILTDHTIYNNRPDITFVDKINKHTYIIDIAVPNTNNLQSTISEKIRKYTELQEEIKRVWKMDCVTIVPIVI

SEQ ID NO: 1453 - protein, 1262 aa, Heliconius cydno
MELRSKVKRLMPLPGGDRRGAPGADAGCHSMRTVGGKGISRRILTGNVPEEVTSSHTSINPIHESSTPLALDVSMVASAMRPETTKAGKPRVRMKWDKEINIFIMRTYLKITNLETDLTQYRQKLHHHFTTKYSNTHVSEQRLSDQLRAIIRNKYLSDDEIKVLREEVKSILETNTNDNTTSVSTSHNSKGSSNSFTNTSLHIDIRHTSNTESFNTQQTSREIDKQNNCSQNTITQIPSIQLDTHLHSHCTETLKSLLEENLSKYTNSDPTLRPRLPKLTNSSKLSHIIKIFNESILPEKTNSLNNIIDTHTLIYCTAITITTYLNFKVDNRTNNKIHRPEPAWQIRLKSDIDELRRNIGRLTQYKIGNRSKHLVKSVNKILATTKKHSSREDNNKHLSEYMDTLKQKLAVKSHRLARYKKAQDRKNNNKIFTQNEKQFYRKLKSNTEIQNPPSEESLKKYWENIWAQSVEHNKDAEWIKEEKNNSETVTEMEFKNIEIDEFRQIVNKTHNWKAPGVDHIQNFWIKKLHILHNKLTQQITDIIRGNSILPNFLTRGITYMLAKSDRTDDPSQYRPITCLPTLYKIITSCISHRINKHLEANKIMTEEQKGCRKSHRGCKEQLIIDSVLLKYVQKNRKSLFVSYIDYKKAFDSVPHTWLIEILQIYKINPTIVNFLKNTMRNWQTTLHLKTNFDNISTHTINIKRGIFQGDSLSPIWFCLALNPLSKQLNLCRLGFDLKKNRKTLYQLSHLLYMDDLKLYSNKETHMTQLLDITSNFSKDIKMDFGLDKCRKLNIVKGKITEGNYILNEQDSIAAMKDNELYKYLGYNQGRLIEHKNIKDKLRKEYFNRIYLLSKRQLYSKNLFKAINTYAIPVLTYSFGIIKWSNTDIKQLESKTRTTLTQHRYHHPKSAIERITLARKDGGRGLIDITFLHNKQLINLKQFFYIKKSESKLHESIIAIDNNFTPLNLKNETIVQINKLDTIKEKIHNWKKKELHGRHPNDLELSHVDKDASNKWLCLGGLFPETEGFVLAIQDQVITTKNYRKYIIKDRTLDSDLCRKCNNKPETIQHITGGCISLTQNDYTHRHNQLVNIIHQKLVLKFKLTSDPHTPYYKYTPRPVLENQSYTLYYDRTILTDHTIYNNRPDITFVDKINKHTYIIDIAVPNTNNLQSTISEKIRKYTELQEEIKRVWKMDCVTIVPIVISTTGVIPKNLTWSLNVLNLPRFTYLTLQKAALLNTCRTVRKFLHLGSDSDAVINQISQT

SEQ ID NO: 1454 - protein, 825 aa, Heliconius numata
MDTLKQKLAVKSHRLARYKKAQDRKNNNKIFTQNEKQFYRKLKSNTEIQHPPSEESLKKYWENIWAQSVEHNKDAEWIKEEKNNSETVTEMEFKNIEIDEFRQIVNKTHNWKSPGVDHIQNFWIKKLHILHNKLTQQITDIIKGNSILPNFLTRGITYMLAKSDRTDDPSQYRPITCLPTLYKIITSCISHRINKHLEANKIMTEEQKGCRKSHRGCKEQLIIDSVLLKYVQKNRKSLFVSYIDYKKAFDNIPHTWLIEILQIYKINPTIVNFLKNTMRNWQTTLHLKTNFDNISTDTINIKRGIFQGDSLSPIWFCLALNPLSKQLNLCRLGFDLKKNRKTLYQLSHLLYMDDLKLYSNKETHMTQLLDITSNFSKDIKMNFGLDKCRKLNIAKGKITEGNYILNEQDSIAAMKDNELYKYLGYNQGRLIEHKNIKDKLRKEYFNRIYLLSKRQLYSKNLFKAINTYAIPVLTYSFGIIKWSNTDIKQLESKTRTTLTQHRYHHPKSAIERITLARKDGGRGLIDITFLHNRQLINLKQFFYIKKSESKLHESIIAIDNNFTPLNLKNETIVQVNKLYTIKEKIHNWKKKELHGRHPNYLELSHVDKDASNKWLCLGGLFPETEGFMLAIQDQVITTKNYRKYIIKDRTLDSDLCRKCNNKPETIQHITGGCISLTQNDYIHRHNQLVNIIHQKLVLKFKLTSDPHTPYYKYTPRPVLENQSYTLYYDRTILTDHTIYNNRPDITFVDKINKHTYIIDIAVPNTNNLQSTISEKIRKYTELQEEIKRVWKMDCVTIVPIVISTTGVIPKNLTWSLNVLNLPRFD

SEQ ID NO: 1455 - protein, 1262 aa, Heliconius elevatus
MELRSKVKRLMPLPGGDRRGAPGADAGCHSMRTVGGKGISRRILTGNVPEEVTSSHTSINPIHESSTPLALDVSMVASAMRPETTKAGKPRVRMKWDKEINIFIMRTYLKITNLETDLTQYRQKLHHHFTTKYSNTHVSEQRLSDQLRAIIRNKYLSDDEIKVLREEVKSILETNTNDNTTNVSTSHNSKGSSNSFTNTSLHIDIRHTSNTESFNTQQTSREIDKQNNCSQNTIAQIPSIQLDTHLHSHCTETLKSLLEENLSKYTNSDPTLRPRLPKLTNSSKLSHIIKIFNESILPEKTNSLNNIIDTHTLIYCTAITITTYLNFKVDNRTNNKIHRPEPAWQIRLKSDIDELRRNIGRLTQYKIGNRSKHLVKSVNKILATTKKHSSHEDNNKHLSEYMDTLKQKLAVKSHRLARYNKAQDRKNNNKIFTQNEKQFYRKLKSNTEIQHPPSEESLKKYWENIWAQSVEHNKDAEWIKEEKNNSETVTEMEFKNIEIDEFRQIVNKTHNWKSPGVDHIQNFWIKKLHILHNKLTQQITDIIKGNSILPNFLTRGITYMLAKSDRTDDPSQYRPITCLPTLYKIITSCISHRINKHLEANKIMTEEQKGCRKSHRGCKEQLIIDSVLLKYVQKNRKSLFVSYIDYKKAFDSIPHTWLIEILQIYKINPTIVNFLKNTMRNWQTTLHLKTNFDNISTHTINIKRGIFQGDSLSPIWFCLALNPLSKQLNLCRLGFDLKKNRKTLYQLSHLLYMDDLKLYSNKETHMTQLLDITSNFSKDIKMNFGLDKCRKLNIVKGKITEGNYILNEQDSIAAMKDNELYKYLGYNQGRLIEHKIIKDKLRKEYFNRIYLLSKRQLYSKNLFKAINTYAIPVLTYSFGIIKWSNTDIKQLESKTRTTLTQHRYHHPKSAIERITLARKDGGRGLIDITFLHNRQLINLKQFFYIKKSESKLHESIIAIDNNFTPLNLKNETIVQINKLDTIKEKIHNWKKKELHGRHPNDLELSHVDKDASNKWLCLGGLFPETEGFMLAIQDQVITTKNYRKYIIKDRTLDSDLCRKCNNKPETIQHITGGCISLTQNDYTHRHNQLVNIIHQKLVLKFKLTSDPHTPYYKYTPRPVLENQSYTLYYDRTILTDHTIYNNRPDITFVDKINKHTYIIDIAVPNTNNLQSTISEKIRKYTELQEEIKRVWKMDCVTIVPIVISTTGVIPKNLTWSLNVLNLPKFTYLTLQKAALLNTCRTVRKFLHLGSDSDAVINQISQT

SEQ ID NO: 1456 - protein, 1166 aa, Junonia evarete
MKWNDDINRFIMRTYYFITKLETDKTMYCKKLYDQFKTKYPEIDISQQRIADQRRVIIRNKLISEEELNHIKIEVTQALNSEVNTQPVTYENFQPDLFSITQQKEHTQILETVEPKTNTQLTNRQSQTEPRTIALSDENYESNSHEIDINLSTEQLIHELETTLAQYSGTDPISRPKLPRLKESQKLYILLNTFNTLILDKYYSLDSDLTELHTLIYCSAVVISRQLGYKIGLQIATHSKQNEDSKPPWQIRLEKDIEKLRADIGKLTQYMNGNKSRKVVAKVELIFKNTKVHSSHERDNLKPEEFLDTLKQKLRVKSHRISRYKKALKRKEDNKLFIKNEKIFYRHLNTQNDKNIELPTEDNLKNYWADLWQKDVNFNQQANWIDDEVEKWKEVDEMGFTQILERDIEIVVKKMNNWKAPGVDGVHSFWYKKFTSLHGILAKTITDLIHGISQPPIFLTKGITYMIPKSSNTTNPSQFRPITCLPTIYKLITACLSNKITQHLDQNNMIAEEQKGCRQNHKGCKEQLIIDSAILKQANLQKRNLHLSYIDYKKAFDSVPHSWLLHVLRLYKINPVIIKFLKQTMNDWRTTLHLSNNNITISTTEIKIKTGIFQGDSLSPLWFCLALNPLSNLLNKSKCGYKLSDSATITHLLYMDDIKLFAKSEEELNKLINITTQFSKDINMTFGIDKCKKIHLKRGKITQSRTTDFTEETDFGTMDNNDTYKYLGIHESNTIDHTKIKQNLTKEYNRRLKLICKQQLNSKNMFKAINTYAIPILIYSFGIIRWTKTDLNKLEISTRVTLTKHNYLHPKSAIERMTVKRDMGGRGLIDLQKLRNTQIHNLKSFFYQKSGNSILHKAIVEIDDNYTPLNLKQNNSITNVEPTETDNAKLASWRQKELHGRHIHDIEQPHIDLEATNKWLKFGSLFPETEGFIIAIQDQVINTKNYKKYIIKDPKIKDDKCRKCHRLPETIQHITGACPSLTQNDYTHRHNQIVNIVHQKLAIKYKLLSEKPLPYYQYTPKPVLENSDHLLYYDRTLLTDRTIHHNRPDITLIDKNNKVTYLIDVAIPNTHNLTKTITEKIHKYTELQEEIQNIWKMNKVYIVPLVLSSTGVIPKHLRQALRTIDLSHNTYILMQKAAILNTCRIVRKFLQHEPSNHLPENETHLA

SEQ ID NO: 1457 - protein, 1166 aa, Junonia oenone
MKWNDDINRFIMRTYYFITKLETDKTMYCKKLYDQFKTKYPEIDVSQQRIADQRRVIIRKKLISEEELNQIKIEVTQALNSELNTQPVTYENLQPELFSITQQKENTQILETVEPKTNTQLTNRESQTETRTIALSDQNYDSTSYEINNNLSTEQLIHELETTLAQYGGTDPTSCPKLPRLKESQKLYTLLYTFNTLILDKYYSLDSDLTKLHTLIYCSAVVISRQLGYKIGLQITTHSKQNNDSKPPWLIRLEKDIENLRADIGKLTQYMNGNKSRKVVAKVELIFKNTKFHSSHERDNLKPEEFLDTLKQKLRVKSHRLSRYKRALKRKEDNKLFTKNEKIFYRQLNAQNDKNIELPTEDNLKNYWAGLWQKDVNFNQQANWIDDEVEKWKEVDEMEFTQISERDVEIVVKKMNNWKAPGVDGVHSFWYKKFTCLHGILAKTITDLIHGTSQPPIFLTKGITYMIPKSSNTTNPSQFRPITCLPTIYKLITACLSNKITQHLDQNNMIAEEQKGCRQNHKGCKEQLIIDSAILKQANLQKRNLHLSYIDYKKAFDSVPHSWLLHVLRLYKINPIIIKFLQKTMNDWRTTLHLSNNNTTISTTEIKIKTGIFQGDSLSPLWFCLALNPLSNLLNKSKCGYKLSDSATITHLLYMDDIKLFAKSEEELNKLINITTQFSRDINMTFGIDKCKEIHLKRGKITQSSTRDFTEETDFGTMDINDTYKYLGIHQSNTIDHTKIKQNLTKEYNRRLKLICKQQLNSKNMFKAINTYAIPVLIYSLGIIKWTKTDLNKLEISTRVTLTKHNYLHPKSAIEKMTVKRDMGGRGLIDLQKLRNTQIHNLKTFFYQKSRNSILHKAIVEIDDNYTPLNLKQNNSITNVEPTETDNAKLASWRQKELHGRHIHDIEQPHIDLEATNKWLKFGSLFPETEGFIIAIQDQVINTKNYKKYIIKDPKIKDDKCRKCHRLPETIQHITGACPSLTQNDYTHRHNQIVNIVHQKLAIKYKLLSVKPIPYYQYTPKPVLENSNHLLYYDRTLLTDRTIHHNRPDITLIDKNNKVTYLIDVAIPNTHNLIKTITEKIHKYTELQEEIQNIWKMNKVYIVPLVLSSTGVIPKHLRQALRTIDLSHNTYILMQKAAILNTCRIVRKFLQCDPSNHLPENETHLA

SEQ ID NO: 1458 - protein, 1275 aa, Junonia vestina
MNNFNCISNTANKEVLPIKMETRNKRLRLMSLPGGERRGAPGADAGCYSMRSIGGLELNRRTPTDKNTTADTQLTQSNSTNTVTPTADVSQEASAIQPVTTKAGKPRVRMKWNDDINRFIMRTYYFITKLETDKTMYCKKLYDQFKTKYPEIDVSQQRIADQRRVIIRNKLISEEELNHIKIEVTQALNSELNTQPVTYENLQPDLFSITQQKEHTQILETVEPKTNTQLTNRESQTEPRTIALSDENYDSNSHEIDINLSTEQLIHELETTLAQYSGTDPISRPKLPRLKESQKLYILLNTFNTLILDKYYSLDSDLTELHTLIYCSAVVISRQLGYKIGLQIATHSKQNKDSKPPWQIRLEKDIEKLRADIGKLSQYMNGNKSRKVVAKVELIFKNTKVHSSHERDNLKPEEFLDTLKQKLRVKSHRLSRYKKALKRKEDNKLFIKNEKIFYRHLNTQNDKNIELPTEDSLKNYWADLWQKDVNFNQQANWIDDEVEKWKEVDEMEFTQISERDIEIVVKKMNNWKAPGVDGVHSFWYKKFTSLHGILAKTITDLIHGISQPPIFLTKGITYMIPKSSNTTNPSQFRPITCLPTIYKLITACLSNKITQHLDQNNMIAEEQKGCRQNHKGCKEQLIIDSAILKQANLQKRNLHLSYIDYKKAFDSVPHSWLLHVLRLYKINPLIIKFLKQTMNDWRTTLHLSNNNTTISTTEIKIKTGIFQGDSLSPLWFCLALNPLSNLLNKSKCGYKLSDSATITHLLYMDDIKLFAKSEEELNKLINITTQFSKDINMTFGIDKCKKIHLKRGKITQSSTTDFTEETDFGTMDINDTYKYLGIHQSNTIDHTKIKQNLTKEYNRRLKLICKQQLNSKNMFKAINTYAIPILIYSFGIIKWTKTDLNKLEISTRVTLTKHNYLHPKSAIERMTVKRDMGGRGLIDLQKLRNTQIHNLKSFFYQKSGNSILHKAIVEIDDNYTPLNLKQTNSITNVEPTETDNAKLASWRQKELHGRHIHDIEQPHIDLEATNKWLKFGSLFPETEGFIIAIQDQVINTKNYKKYIIKDPKIKDDKCRKCHRLPETIQHITGACPSLTQNDYTHRHNQIVNIVHQKLAIKYKLLSEKPLPYYQYTPKPVLENSNHLLYYDRTLLTDRTIHHNRPDITLIDKNNKVTYLIDVAIPNTHNLTKTITEKIHKYTELQEEIQNIWKMNKVYIVPLVLSSTGVIPKHLRQALRTIDLSHNTYILMQKAAILNTCRIVRKFLQHEPSNHLPENETHLA

SEQ ID NO: 1459 - protein, 1258 aa, Junonia vestina
METRNKRLRLMSLPGGERRGAPGADAGCYSMRSIGGLELNRRTPTDKNTTADTQLTQSNSTNTVTPTADVSQEASAIQPVTTKAGKPRVRMKWNDDINRFIMRTYYIVTKLETDRTMYCKKLYDHFKTKYPEIEVSEQRIADQRRVIIRNKLISVEELNKIKQEVAQILHTELNTETDNRENVQSDLTLNLNTQQQEYNQILKSPEPNNNPQLTNSASQTETRTIELSNQTHDNVNFETNNNLSTQQLIDELETALAQYTGTDPTNRPKLPRLKENKQLYFLLNIFNTSILDKYYSLDTDLTKLHTLIYCCALVISRQLGYKVGLKITTHNKQNKDNKPPWQIRLEKDIEKLRADIGRLTQYINGNKSKKVAARVELIFINVKVHSSHERDNLRPEEFLDTLKQKLRVKTHRLSRYIKALKRKEDNKLFKRNEKIFYRNLNTQNDRNIELPNEDTLKNYWADLWQKDVNFNQQASWIDDEVRKWGEVDEMEFTQISETDVKAVVKRMKNWKAPGVDGIHSFWYKKFTSLHDILAKIITDLIHGTSQPPIFLTKGITYMIPKSNDTTNPSQFRPITCLPTVYKLITACISNKITKHLNQNNMLAEEQKGCRQNHKGCKEQLIIDSAILKQANIHKRNLHLSYIDYKKAFDSVPHSWLLHVLQVYKINPIIIKFLERTMKDWRTTLHLSNSNTTITTTEIKIKTGIFQGDSLSPLWFCLALNPLSNLLNRSNCGYKITDTATITHLLYMDDIKLFAKSEKELNKLINITAQYSKDINMTFGIEKCKKIHLKRGKITQSSSTEFIEEADFGVMNSSDTYKYLGIHQSNTIDHKKIKHNITKEYHRRLKLICKQQLNSKNMFKAINTYAIPVLIYSLGVIKWTKTDLHKLEISTRVTLTKHNYLHPKSAIERMTIKRDKGGRGLIDLQNLLTTQIHNLISFFQQKSKNSELHKAIVEIDTNYTPLNLQQHKNDTNIEIVDTDATKMASWRHKELHGRHIHDIEQPHIDLEASNKFLKFGTLFPETEGFIIAIQDQVINTKNYKKYIIKDPKVKEDKCRKCHRLPETIQHITGACPSLTQNDYTHRHNQIVNIVHQKLAIKYNLLPKKSVPYYQYSPKPVLENSNHQLYYDRTLLTDKTIHHNRPDITLIDKSNKITYLIDIAIPNSHNLTKTITEKIHKYTELQEEIQNIWNMHKVYIVPLVLSSTGVIPKHLLQALRTIDLSPNTYILMQKAAILNTCRIVRKFLQCETSNYHPENENHLA

SEQ ID NO: 1460 - protein, 1256 aa, Hypolimnas misippus
METRNRKLRLMSLPGGDRRGASGADAGCHSMRSIGGLELNRRTPTIKNATADQSCTHLNSTNTVTPIVDVSQEASAIQPVTTKAGKTRVRMKWDDDINRFIMRTYYFITKLDTDKTMYCKKLHDQFKIKYPEIDVSQQRIADQRRVILRNKLLSETELKKIKQEVTQILNTEHSAQTEVEENIHTGLLFTFNTQQEENNKIIETIEQNTNIQLNHTEIQTQLSTLSNQTNDNNNPEININLSTQQVIDELEAALAQYSGTDPTNRPKLPRLKECQKLYWLVNIFNTSILSKYFSSDSDLTELHTLIYCSALVISRQLGYKIRLDRRTHNKQHKENKPPWPIRLERDIEKLRADIGRLTQYINGNKSRKVVTKVDLIFRHTKVHSSHERDNLRPEEFLDTLKQKLSVKSHRLSRYKKALKRKEDNKVFIGNEKIFYRKLNAQTDKNIELPTEDALKNYWADLWQKDVSFNQQASWIEDEVRKWRDVNEMEFTQISDRDIEVVVARMKNWKASGVDGVHSFWFKKFTSLHDILAKTITDLICGISQPPIFLTKGVTCMVPKSNNTTDPSQFRPITCLPTIYKLITACLSNKINEHLEQNKMLAEEQKGCRRNHKGCKEQLIIDSTILKQANLHKRNLHLAYIDYKKAFDSVPHSWLLHVLQVYKINPIIIKFLGRTMNDWRTTLYLSNSSTTITTTEIKIKTGIFQGDSLSPLWFCLALNPLSNLLNRSNCGYKLTDTATITHLLYMDDIKLFAKSEKELNKIINITTQYSKDINMTFGLDKCKKIHLQKGKITQNSTTEFIEEADFGIMDNNDTYKYLGIYQSNTIDHTKIKRSLTKEYLRRLKLICKQQLNSKNTFKAINTYAIPVLIYSLGVIKWTKTDLQKLERATRVTLTKHNYLHPKSAIERMTVKRDKGGRGLIDLQKLRSTQIHNLKTFFYLKSENSDIHKAIVEIDAKYTPLNLKQNRNDTNIQPTDIDKAKLASWRQKELHGRHIHDIEQPHVDLEATNKWLKLGSLFPETEGFIIAIQDQVINTKNYKKYIIKDPKVKDDKCRKCHRLPETIQHITGACPSLTQNDYTHRHNQIVNIIHQKLAVKHNLLSNKQVPYYQYSPKPVLENTSHKLYYDRTLMTDKTIHHNRPDITLIDKHKKNTYLIDISIPNTHNLTKTITEKIYKYTELQEEIQNIWNMNKVYIVPLVLSSTGVIPKHLLQALRTIDLSHNSYILMQKAAILNTCRIVRKFLQCEPPNHEPVNGNHLA

SEQ ID NO: 1461 - protein, 1225 aa, Junonia zonalis
MRSIGGLELNRRTPTDKNTTADPSFSQSNSTNTVTPTADVSQEASAIQPVTTKAGKPRVRMKWNDDINRFIMRTYYFITKLETDKTMYCKKLYDQFKTKYPEIDVSQQRIADQRRVIIRNKLISEEELNHIKIEVTQALNSELNTRPVTYENLQPDLFSITQQKEHTQILETVEPKTNTQLTNRESQTEPRTIALSDENYSNSHEIDINLSTEQLIHELETTLAQYSGTDPISRPKLPRLKESQKLYILLNTFNTLILDKYYSLDSDLTELHTLIYCSALVISRQLGYKIGLQIATHSKQNEDSKPPWQIRLEKDIEKLRADIGKLTQYMNGNKSRKVVAKVELIFKNTKVHSSHERDNLKPEEFLDTLKQKLRVKSHRISRYKKALKRKEDNKLFIKNEKIFYRHLNTQNDKNIELPTEDSLKNYWADLWQKDVNFNQQANWIDDEVEKWKEVDEMEFTQISERDIEIVVKKMNNWKAPGVDGVHSFWYKKFTSLHGILAKTITDLIHGISQPPIFLTKGITYMIPKSSNTTNPSQFRPITCLPTIYKLITACLSNKITQHLDQNNMIAEEQKGCRQNHKGCKEQLIIDSAILKQANLQKRNLHLSYIDYKKAFDSVPHSWLLHVLRLYKINPVIIKFLKQTMNDWRTTLHLSNNNTTISTTEIKIKTGIFQGDSLSPLWFCLALNPLSNLLNKSKCGYKLSDSATITHLLYMDDIKLFAKSEKELNKLINITTQFSKDINMTFGIDKCKKIHLKRGKITQSRTTDFTEETDFGTMDNNDTYKYLGIHESNTIDHTKIKQNLTKEYNRRLKLICKQQLNSKNMFKAINTYAIPILIYSFGIIKWTKTDLNKLEISTRVTLTKHNYLHPKSAIERMTVKRDMGGRGLIDLQKLRNTQIHNLKSFFYQKSGNSILHKAIVEIDDNYTPLNLKQNNSITNVEPTETDNAKLASWRQKELHGRHIHDIEQPHIDLEATNKWLKFGSLFPETEGFIIAIQDQVINTKNYKKYIIKDPKIKDDKCRKCHRLPETIQHITGACPSLTQNDYTHRHNQIVNIVHQKLAIKYKLLSEKPLPYYQYTPKPVLENSDHLLYYDRTLLTDRTIHHNRPDITLIDKNNKVTYLIDVAIPNTHNLTKTITEKIHKYTELQEEIQNIWKMNKVYIVPLVLSSTGVIPKHLRQALRTINLSHNTYILMQKAAILNTCRIVRKFLQHEPSNHLPENETHLA

SEQ ID NO: 1462 - protein, 1154 aa, Junonia grisea
MRTYYFITKLETDKTMYCKKLYDQFKTKYPEIDVSQQRIADQRRVIIRNKLISEEELNHIKIEVTQALNSELNTQPVTYENLQPDLFSITQQKEHTQILETVEPKTNTQLTNRESQTEPRTIALSDENYSNSHEIDINLSTEQLIHELETTLAQYSGTDPISRPKLPRLKESQKLYILLNTFNTLILDKYYSLDSDLTELHTLIYCSAVVISRQLGYKIGLQIATHSKQNEDSKPPWQIRLEKDIEKLRADIGKLTQYMNGNKSRKVVAKVELIFKNTKVHSSHERDNLKPEEFLDTLKQKLRVKSHRISRYKKALKRKEDNKLFIKNEKIFYRHLNTQNDKNIELPTEDSLKNYWADLWQKDVNFNQQANWIDDEVEKWKEVDEMEFTQISERDIEIVVKKMNNWKAPGVDGVHSFWYKKFTSLHGILAKTITDLIHGVSQPPIFLTKGITYMIPKSSNTTNPSQFRPITCLPTIYKLITACLSNKITQHLDQNNMIAEEQKGCRQNHKGCKEQLIIDSAILKQANLQKRNLHLSYIDYKKAFDSVPHSWLLHVLRLYKINPVIIKFLKQTMNDWRTTLHLSNNNTTISTTEIKIKTGIFQGDSLSPLWFCLALNPLSNLLNKSKCGYKLSDSATITHLLYMDDIKLFAKSEEELNKLINITTQFSKDINMTFGIDKCKKIHLKRGKITQSRTTDFTEETDFGTMDNNDTYKYLGIHESNTIDHTKIKQNLTKEYNRRLKLICKQQLNSKNMFKAINTYAIPILIYSFGIIKWTKTDLNKLEISTRVTLTKHNYLHPKSAIERMTVKRDMGGRGLIDLQKLRNTQIHNLKSFFYQKSGNSILHKAIVEIDDNYTPLNLKQNNSVTNVEPTETDNAKLASWRQKELHGRHIHDIEQPHIDLEATNKWLKFGSLFPETEGFIIAIQDQVINTKNYKKYIIKDPKIKDDKCRKCHRLPETIQHITGACPSLTQNDYTHRHNQIVNIVHQKLAIKYKLLSEKPLPYYQYTPKPVLENSDHLLYYDRTLLTDRTIHHNRPDITLIDKNNKVTYLIDVAIPNTHNLTKTITEKIHKYTELQEEIQNIWKMNKVYIVPLVLSSTGVIPKHLRQALRTIDLSHNTYILMQKAAILNTCRIVRKFLQHEPSNHLPENETHLA

SEQ ID NO: 1463 - protein, 1258 aa, Junonia stemosa
METRNKRLRLMSLPGGERRGAPGADAGCYSMRSIGGLELNRRTPTDKNTTADTQLTQSNSTNIVTPTEDVSQEASAIQPVTTKAGKPRVRMKWNDDINRFIMRTYYIITKLETDRTMYCKKLYDHFKTKYPEIEVSEQRIADQRRVIIRNKLIPVEELNKIKQEVAQILHTEFNTETDNRENVQSDLSLNLITQQQEYNEILKSPEPNNNPQLTNSASQTETRTIELSNQTHDNINLETNNNLSTQQLIDELETALAQYTGTDPTSRPKLPRLKENKQLYFLLNVFNTSILDKYYSLDTDLTKIHTLIYCCALVISRQLGYKVGLKITTQNKQNKDNKPPWQIRLEKDIEKLRADIGRLTQYINGNKSKKVAARVELIFISVKVHSSHERDNLRPEEFLDTLKQKLRVKTHRLSRYIKALKRKEDNKLFIRNEKIFYRNLNTQKDRNIELPNEDTLKNYWADLWQKDVNFNQEASWIDDEVRKWREVDEMEFTQISETDVKAVVKRMKNWKAPGADGIHSFWYKKFTSLHDILAKIITDLIHGTSQPPIFLTKGITYMIPKSNDTTNPSQFRPITCLPTVYKLITACISNKITKHLNQNNMLAEEQKGCRQNHKGCKEQLIIDSAILKQANIHKRNLHLSYIDYKKAFDSVPHSWLLHVLQVYKINPIIIKFLERTMKDWRTTLHLSNSNTTIATTEIKIKTGIFQGDSLSPLWFCLALNPLSNLLNRSNCGYKITDTATITHLLYMDDIKLFAKSEKELNKLINITAQYSKDINMTFGIEKCKKIHLKRGKITQSSSTEFIEEADFGVMNSSDTYKYLGIHQSNTIDHKKIKHNITKEYHRRLKLICKQQLNSKNMFKAINTYAIPVLIYSLGVIKWTKTDLHKLEISTRVTLTKHNYLHPKSAIERMTIKRDKGGRGLIDLQKLLTTQIHNLISFFQQKSKTSELHKAIVEIDTNYTPLNLQQHKNETNIEIVDTDATKMASWRHKELHGRHIHDIEQPHIDLEASNKFLKFGTLFPETEGFIIAIQDQVINTKNYKKYIIKDPKVKEDKCRKCHRLPETIQHITGACPSLTQSDYTHRHNQIVNIIHQKLAIKYNLLPKKSVPYYQYSPKPVLENSNHQLYYDRTLLTDKTIHHNRPDITLIDKSNKITYLIDIAIPNSHNLTKTITEKIHKYTELQEEIQNIWNMNKVYIVPLVLSSTGVIPKHLLQALRTIDLSPTTYILMQKAAILNTCRIVRKFLQCETSNYHPENENHLA

SEQ ID NO: 1464 - protein, 1258 aa, Junonia evarete
METRNKRLRLMSLPGGERRGAPGADAGCYSMRSIGGLELNRRTPTDKNTTADTQLTQSNSTNTVTPTADVSQEASAIQPVTTKAGKPRVRMKWNDDINRFIMRTYYIITKLETDRTMYCKKLYDHFKTKYPEIEVSEQRIADQRRVIIRNKLISVEELNKIKQEVAQILHTELNTETDNRENVQSDLSLNLNTQQQEYNQSLKSPEPNNNPQLTNSASQTETRTIELSIQTHDNVNFETNNNLSTQQLIDELETALAQYTGTDPTNRPKLPRLKENKQLYFLLNIFNTSILDKYYSLDTDLTKLHTLIYCCALVISRQLGYKVGLKITNHNKQNKDNKPPWQIRLENDIEKLRADIGRLTQYINGNKSKKLAARVELIFINVKVHSSHERDNLRPEEFLDTLKQKLRVKTHRLSRYIKALKRKEDNKLFKRNEKIFYRNLNTQNDRNIELPNEDTLKNYWADLWQKDVNFNQQASWIDDEVRKWGEVDEMEFTQISETDVKAVVKRMKNWKAPGVDGIHSFWYKKFTSLHDILAKIITDLIHGTSQPPIFLTKGITYMIPKSNDTTNPSQFRPITCLPTVYKLITACISNKITKHLNQNNMLAEEQKGCRQNHKGCKEQLIIDSAILKQANIHKRNLHLSYIDYKKAFDSVPHSWLLHVLQVYKINPIIIKFLERTMKDWRTTLHLSNSNTTIATTEIKIKTGIFQGDSLSPLWFCLALNPLSNLLNRSNCGYKITDTATITHLLYMDDIKLFAKSEKELNKLINITAQYSKDINMTFGIEKCKKIHLKKGKITQSSSTEFIEEADFGVMDSSDTYKYLGIHQSNTINHKKIKHNITKEYHRRLKLICKQQLNSKNMFKAINTYAIPVLIYSLGVIKWTKTDLHKLEISTRVALTKHNYLHPKSAIERMTIKRDKGGRGLIDLQNLLTTQLHNLISFFQQKSKNSELHKAIVEIDTNYTPLNLQQHKNDTNIEIVDTDATKMASWRHKELHGRHIHDIEQPHIDLEASNKFLKFGTLFPETEGFIIAIQDQVINTKNYKKYIIKDPKVKEDKCRKCHRLPETIQHITGACPSLTQNDYTHRHNQIVNIIHQKLAIKYNLLPKKSVPYYQYSPKPVLENSNHQLYYDRTLLTDKTIHHNRPDITLIDKSNKITYLIDIAIPNSHNLTKTITEKIHKYTELQEEIQNIWNMNKVYIVPLVLSSTGVIPKHLLQALRTIDLSPNTYILMQKAAILNTCRIVRKFLQCETSNYHPENENHLA

SEQ ID NO: 1465 - protein, 1258 aa, Junonia neildi
METRNKRLRLMSLPGGERRGAPGADAGCYSMRSIGGLELNRRTPTDKNTTADTQLTQSNSTNTVTPTADVSQEASAIQPVTTKAGKPRVRMKWNDDINRFIMRTYYIITKLETDRTMYCKKLYDHFKTKYPEIEVSEQRIADQRRVIIRNKLIPVEELNKIKQEVAQILHTEFNTETDNRENVQSDLSLNLITQQQEYNEILKSPEPNNNPQLTNSASQTETRTIELSNQTHDNINLETNNNLSTQQLIDELETALAQYTGTDPTSRPKLPRLKENKQLYFLLNIFNTSILDKYYSLDTDLTKIHTLIYCCALVISRQLGYKVGLKITTQNKQNKDNKPPWQIRLEKDIEKLRADIGRLTQYINGNKSKKVAARVELIFINVKVHSSHERDNLRPEEFLDTLKQKLRVKTHRLSRYIKALKRKEDNKLFKRNEKIFYRNLNTQNDRNIELPNEDTLKNYWADLWQKDVNFNQEASWIDDEVRKWREVDEMEFTQISETDVKAVVKRMKNWKAPGADGIHSFWYKKFTSLHDILAKIITDLIHGTSQPPIFLTKGITYMIPKSNDTTNPSQFRPITCLPTVYKLITACISNKITKHLNQNNMLAEEQKGCRQNHKGCKEQLIIDSAILKQANIHKRNLHLSYIDYKKAFDSVPHSWLLHVLQVYKINPIIIKFLEQTMKDWRTTLHLSNSNTTITTTEIKIKTGIFQGDSLSPLWFCLALNPLSNLLNRSNCGYKITDNATITHLLYMDDIKLFAKSEKELNKLINITAQYSKDINMTFGIEKCKKIHLKRGKITQSSSTEFTEEADFGVMNSSDTYKYLGIHQSNTIDHKKIKHNITKEYHRRLKLICKQQLNSKNMFKAINTYAIPVLIYSLGVIKWTKTDLHKLEISTRVTLTKHNYLHPKSAIERMTIKRDKGGRGLIDLQNLLTTQIHNLISFFQQKSKNSELHKAIVEIDTNYTPLNLQQHKNDTNIEIVDTDATKMASWRHKELHGRHIHDIEQPHIDLEASNKFLKFGTLFPETEGFIIAIQDQVINTKNYKKYIIKDPKVKEDKCRKCHRLPETIQHITGACPSLTQNDYTHRHNQIVNIIHQKLAIKYNLLPKKSVPYYQYSPKPVLENSNHQLYYDRTLLTDKTIHHNRPDITLIDKSNKITYLIDIAIPNSHNLTKTITEKIHKYTELQEEIQNIWNMHKVYIVPLVLSSTGVIPKHLLQALRTIDLSPTTYILMQKAAILNTCRIVRKFLQCETSNYHPENENHLA

SEQ ID NO: 1466 - protein, 1257 aa, Junonia grisea
METRNKRLRLMSLPGGERRGAPGADAGCYSMRSIGGLELNRRTPTDKNTTADTQLTQSNSTNIVTPTEDVSQEASAIQPVTTKAGKPRVRMKWNDDINRFIMRTYYIITKLETDRTMYCKKLYDHFKTKYPEIEVSEQRIADQRRVIIRNKLIPVEELNKIKQEVAQILHTGFNTETDNRENVHDLSLNLITHQQEYNQILKSPEPNNNPQLTNSASQTETRTIELSNQTHDNINLETNNNLSTQQLIDELETALAQYTGTDPTSRPKLPRLKENKQLYFLLNIFNTSILNKYYSLDTDLTKIHTLIYCCALVISRQLGYKVGLKITTQNKQNKDNKPPWQIRLEKDIEKLRADIGRLTQYINGNKSKKVAARVELIFISVKVHSSHERDNLRPEEFLDTLKQKLRVKTHRLSRYIKALKRKEDNKLFIRNEKIFYRNLNTQKDRNIELPNEDTLKNYWADLWQKDVNFNQEASWIDDEVRKWREVDEMEFTQISETDVKAVVKRMKNWKAPGADGIHSFWYKKFTSLHDILAKIITDLIHGTSQPPIFLTKGITYMIPKSNDTTNPSQFRPITCLPTVYKLITACISNKITKHLNQNNMLAEEQKGCRQNHKGCKEQLIIDSAILKQANIHKRNLHLSYIDYKKAFDSVPHSWLLHVLQVYKINPIIIKFLERTMKDWRTTLHLSNSNTTIATTEIKIKTGIFQGDSLSPLWFCLALNPLSNLLNRSNCGYKITDTATITHLLYMDDIKLFAKSEKELNKLINITAQYSKDINMTFGIEKCKKIHLKRGKITQSSSTEFIEEADFGVMNSSDTYKYLGIHQSNTIDHKKIKHNITKEYHRRLKLICKQQLNSKNMFKAINTYAIPVLIYSLGVIKWTKTDLHKLEISTRVTLTKHNYLHPKSAIERMTIKRDKGGRGLIDLQKLLTTQIHNLISFFQQKSKNSELHKAIVEIDTNYTPLNLQQHKNDTNIEIVDTDATKMASWRHKELHGRHIHDIEQPHIDLEASNKFLKFGTLFPETEGFIIAIQDQVINTKNYKKYIIKDPKVKEDKCRKCHRLPETIQHITGACPSLTQSDYTHRHNQIVNIIHQKLAIKYNLLPKKSVPYYQYSPKPVLENSNHQLYYDRTLLTDKTIHHNRPDITLIDKSNKITYLIDIAIPNSHNLTKTITEKIHKYTELQEEIQNIWNMHKVYIVPLVLSSTGVIPKHLLQALRTIDLSPNTYILMQKAAILNTCRIVRKFLQCETSNYHPENENHLA

SEQ ID NO: 1467 - protein, 1258 aa, Junonia coenia
METRNKRLRLMSLPGGERRGAPGADAGCYSMRSIGGLELNRRTPTDKNTTADTQLTQSNSTNTVTPTADVSQEASAIQPVTTKAGKPRVRMKWNDDINRFIMRTYYIITKLETDRTMYCKKLYDHFKTKYPEIEVSEQRIADQRRVIIRNKLIPVEELNKIKQEVAQILHTEFNTGTDNRENVQSDLSLNLITQQQEYNEILKSPEPNNNPQLTNSASQTETRTIELSNQTHDNINLETNNNLSTQQLIDELETALAQYTGTDPTSRPKLPRLKENKQLYFLLNIFNTSILDKYYSLDTDLTKIHTLIYCCALVISRQLGYKVGLKITTQNKQNKDNKPPWQIRLEKDIEKLRADIGRLTQYINGNKSKKVAARVELIFISVKVHSSHERDNLRPEEFLDTLKQKLRVKTHRLSRYIKALKRKEDNKLFIRNEKIFYRNLNTQKDRNIELPNEDTLKNYWADLWQKDVNFNQEASWIDDEVRKWREVDEMEFTQISETDVKAVVKRMKNWKAPGADGIHSFWYKKFTSLHDILAKIITDLIHGTSQPPIFLTKGITYMIPKSNDTTNPSQFRPITCLPTVYKLITACISNKITKHLNQNNMLAEEQKGCRQNHKGCKEQLIIDSAILKQANIHKRNLHLSYIDYKKAFDSVPHSWLLHVLQVYKINPIIIKFLERTMKDWRTTLHLSNSNTTIATTEIKIKTGIFQGDSLSPLWFCLALNPLSNLLNRSNCGYKITDTATITHLLYMDDIKLFAKSEKELNKLINITAQYSKDINMTFGIEKCKKIHLKRGKITQSSSTEFIEEADFGVMNSSDTYKYLGIHQSNTIDHKKIKHNITKEYHRRLKLICKQQLNSKNMFKAINTYAIPVLIYSLGVIKWTKTDLHKLEISTRVTLTKHNYLHPKSAIERMTIKRDKGGRGLIDLQKLLTTQIHNLISFFQQKSKTSELHKAIVEIDTNYTPLNLQQHKNETNIEIVDTDATKMASWRHKELHGRHIHDIEQPHIDLEASNKFLKFGTLFPETEGFIIAIQDQVINTKNYKKYIIKDPKVKEDKCRKCHRLPETIQHITGACPSLTQNDYTHRHNQIVNIIHQKLAIKYNLLPKKSVPYYQYSPKPVLENSNHQLYYDRTLLTDKTIHHNRPDITLIDKSNKITYLIDIAIPNSHNLTKTITEKIHKYTELQEEIQNIWNMHKVYIVPLVLSSTGVIPKHLLQALRTIDLSPTTYILMQKAAILNTCRIVRKFLQCETSNYHPENENHLA

SEQ ID NO: 1468 - protein, 1168 aa, Junonia vestina
MKWNDDINRFIMRTYYIITKLETDRTMYCKKLYDHFKTKYPEIEVSEQRIADQRRVIIRNKLISVEELNKIKQEVAQILHTELNTETDNRENEQSDLSLNLNTQQQEYNQILKSPEPNNNPQLTNSASQTETRTIELSNQTHDNVNFETNNNLSTQQLIDELETALAQYTGTDPTNRPKLPRLKENKQLYFLLNIFNASILDKYYSLDTDLTKLHTLIYCCALVISRQLGYKVGLKITTHNKQNKDNKPPWQIRLEKDIEKLRADIGRLTQYINGNKSKKVAARVELIFINVKVHSSHERDNLRPEEFLDTLKQKLRVKTHRLSRYIKALKRKEDNKLFKRNEKIFYRNLNTQNDRNIELPNEDTLKNYWADLWQKDVNFNQQASWIDDEVRKWGEVDEMEFTQISETDVKAVVKRMKNWKAPGVDGIHSFWYKKFTSLHDILAKIITDLIHGTSQPPIFLTKGITYMIPKSNDTTNPSQFRPITCLPTVYKLITACISNKITKHLNQNNMLAEEQKGCRQNHKGCKEQLIIDSAILKQTNIHKRNLHLSYIDYKKAFDSVPHSWLLHVLQVYKINPIIIKFLEQTMKDWRTTLHLSNSNTTITTTEIKIKTGIFQGDSLSPLWFCLALNPLSNLLNRSNCGYKITDTATITHLLYMDDIKLFAKSEKELNKLINITAQYSKDINMTFGIEKCKKIHLKKGKVTQSSSTEFIEEADFGVMDSSDTYKYLGIHQSNTINHKKIKHNITKEYHRRLKLICKQQLNSKNMFKAINTYAIPVLIYSLGVIKWTKTDLHKLEISTRVALTKHNYLHPKSAIERMTIKRDKGGRGLIDLQNLLTTQIHNLISFFQQKSKNSELHKAIVEIDTNYTPLNLQQHKNDTNIEIVDTDATKMASWRHKELHGRHIHDIEQPHIDLEASNKFLKFGTLFPETEGFIIAIQDQVINTKNYKKYIIKDPKVKEDKCRKCHRLPETIQHITGACPSLTQNDYTHRHNQIVNIIHQKLAIKYNLLPKKSVPYYQYSPKPVLENSNHQLYYDRTLLTDKTIHHNRPDITLIDKSNKITYLIDIAIPNSHNLTKTITEKIHKYTELQEEIQNIWNMNKVYIVPLVLSSTGVIPKHLLQALRTIDLSPNTYILMQKAAILNTCRIVRKFLQCETSNYHPENENHLA

SEQ ID NO: 1469 - protein, 769 aa, Junonia genoveva
MEFTQISETDVKAVVKRMKNWKAPGADGIHSFWYKKFTSLHDILAKIITDLIHGTSQPPIFLTKGITYMIPKSNDTTNPSQFRPITCLPTVYKLITACISNKITKHLNQNNMLAEEQKGCRQNHKGCKEQLIIDSAILKQANIHKRNLHLSYIDYKKAFDSVPHSWLLHVLQVYKINPIIIKFLEQTMKDWRTTLHLSNSNTTITTTEIKIKTGIFQGDSLSPLWFCLALNPLSNLLKRSNCGYKITDTATITHLLYMDDIKLFAKSEKELNKLINITAQYSKDINMTFGIEKCKKIHLKKGKITQSSSTEFIEEADFGVMDSSDTYKYLGIHQSNTINHKKIKHNITKEYHRRLKLICKQQLNSKNMFKAINTYAIPILIYSFGIIKWTKTDLNKLEISTRVTLTKHNYLHPKSAIERMTVKRDMGGRGLIDLQKLRNTQIHNLKSFFYQKSGNSILHKAIVEIDDNYTPLNLKQTNSVTNVEPTETDNAKLASWRQKELHGRHIHDIEQPHIDLEATNKWLKFGSLFPETEGFIIAIQDQVINTKNYKKYIIKDPKIKDDKCRKCHRLPETIQHITGACPSLTQNDYTHRHNQIVNIVHQKLAIKYKLLSEKPLPYYQYTPKPVLENSDHLLYYDRTLLTDRTIHHNRPDITLIDKNNKVTYLIDVAIPNTHNLTKTITEKIHKYTELQEEIQNIWKMNKVYIVPLVLSSTGVIPKHLRQALRTIDLSHNTYILMQKAAILNTCRIVRKFLQHEPSNHLPENETHLA

SEQ ID NO: 1470 - protein, 896 aa, Junonia stemosa
MNGNKSRKVVAKVELIFKNTKVHSSHERDNLKPEEFLDTLKQKLRVKSHRISRYKKALKRKEDNKLFIKNEKIFYRHLNTQNDKNIELPTEDSLINYWADLWQKDVNFNQQANWIDDEVEKWKEVDEMEFTQISERDIEIVVKKMNNWKAPGVDGVHSFWYKKFTFLHGILAKTITDLIHGISQPPIFLTKGITYMIPKSSNTTNPSQFRPITCLPTIYKLITACLSNKITQHLDQNNMIVEEQKGCRQNHKGCKEQLIIDSAILKQANLQKINLHLSYINYKKAFDSVPHSWLLHVLRLYKINPVIIKFLKQTMNDWRTTLHLSNNNTTISTTEIKIKTGIFQGDSLSPLWFCLALNPLSNLLNKSKCGYKLLDSATITHLLYMDDIKLFAKSEEELNKLINITTQFSKDINMTFGIDKCKKIHLKRGKITQSRTTDFTEETDFGTMDNNDTYKYLGIHESNTIDHTKIKQNLAKEYNRRLKLICKQQLNSKNMFKAINTYAIPILIYSFGIIKWTKTDLNKLEISTRVTLTKHNYLHPKSAIERMTVKRDMGGRGLIDLQKLRNTQIYNLKSFFYQKSGNSILHKAIVEIDDNYTPLNLKQNNSITNVEPTKTDNAKLASWRQKELHGRHIHDIEQPHIDLEATNKWLKFGSLFPETEGFIIAIQDQVINTKNYKKYIIKDPKIKDDKCRKCHRLPETIQHITGACPSLTQNDYTHRHNQIVNIVHQKLAIKYKLLSEKPLPYYQYTPKPVLENSDHLLYYDRTLLTDRTIHHNRPDITLIDKNNKVTYLIDVAIPNTHNLTKTITEKIHKYTELQEEIQNIWKMNKVYIVPLVLSSTGVIPKHLRQALRTIDLSHNTYILMQKAAILNTCRIVRKFLQHEPSNHLPENETHLA

SEQ ID NO: 1471 - protein, 769 aa, Junonia pacoma
MEFTQISETDVKAVVKRMKNWKAPGADGIHSFWYKKFTSLHDILAKIITDLIHGTSQPPIFLTKGITYMIPKSNDTTNPSQFRPITCLPTVYKLITACISNKITKHLNQNNMLAEEQKGCRQNHKGCKEQLIIDSAILKQANIHKRNLHLSYIDYKKAFDSVPHSWLLHVLQVYKINPIIIKFLERTMKDWRTTLHLSNSNTTIATTEIKIKTGIFQGDSLSPLWFCLALNPLSNLLNRSNCGYKITDTATITHLLYMDDIKLFAKSEKELNKLINITAQYSKDINMTFGIEKCKKIHLKRGKITQSSSTEFIEEADFGVMNSSDTYKYLGIHQSNTIDHKKIKHNITKEYHRRLKLICKQQLNSKNMFKAINTYAIPVLIYSLGVIKWTKTDLHKLEISTRVTLTKHNYLHPKSAIERMTIKRDKGGRGLIDLQKLLTTQIHNLISFFQQKSKTSELHKAIVEIDTNYTPLNLQQHKNETNIEIVDTGATKMASWRHKELHGRHIHDMEQPHIDLEASNQFLKFGTLFPETEGFIIAIQDQVINTKNYKKYIIKDPKVKEDKCRKCHRLPETIQHITGACPSLTQSDYTHRHNQIVNIIHQKLAIKYNLLPKKSVPYYQYSPKPVLENSNHQLYYDRTLLTDKTIHHNRPDITLIDKSNKITYLIDIAIPNSHNLTKTITEKIHKYTELQEEIQNIWNMNKVYIVPLVLSSTGVIPKHLLQALRTIDLSPTTYILMQKAAILNTCRIVRKFLQCETSNYHPENENHLA

SEQ ID NO: 1472 - protein, 1001 aa, Dusona sp.
MKDTPTQWRGMKKRIEALTRDGNPGRRNYVWSEDETERLRTLDRLYGNTPIANIYQQLAPFFPGKTAKQISSKRKHLRDEVQRPIVAAPEVSESSEDEWAEALEEQPVPETQHDRWTELMDRAINDEQIGIEDEISRWVGDLREAWQEFKTESHTLEPKINELIERLTSILLPANEQEMGVSHTRPRNPTNVDESATNRRRRRPRQKRPANTSRRKRFAYARCQELFDKCPQKLAEMAVQGEFSFAELRREPPPTRDILTLYTDLWGQMGPHIEVRERAPRREAADVLQPVKPEDVKARIAKIKPTSAPGVDNIKRAHLQKRRVSGALAILFNILLREGLFPACWKKNRTTLIPKEGKDPSDVKNWRPITVSSMIARIFSAIIDQKIRAFVVQTPRQKGFTTEDGCCLNIMILNEALTEMKEQTGGVVTILDVSKAFDTVPHSCIQGALERKGIPLELSTYVAKMYDGCTTSIKGSDGSVSIELKRGVKQGDPLSPLIFNLAIEGIIDRLDQGMEGLTMSEAQVSVLAFADDLVLLGTNEVAAQRQLKRVHTGLTKLGMSLAATKCSSFQIVAKAKTWYLKDPELKIEGVRIPNIGPDDSLRYLGVKMGPWKGIIKGSEVPTIMTAVKNVRRLKLKPAQKVELIQTYILPKFIHAMTNNRPSKGTLKMLDQGIRQELKEILHLVSSTPTVLFYTTRARGGLGILSFERTIQLAKMRVGINITGSSDPIVNEIQRRGKIDKAAREAAISMGLRQPRSKEELAAAKKRIAQRTVEDWESMVTQHGINEFKNDHLGNAWLRNPALLLDSRYTDALRLRTNTFGTRDVLSRAKAGIDARCRRCGVHRETLGHILGLCMHTKAARIKRHDDIKEFVAKKIRQRHTVIVEPTINELGELKKPDLVIKMGDEVIVADVTVRYEKGTYLADAAKEKLEKYQLTAELIRIKTGCLTSSVMPLVVGCRGAIPRQTRLNLKKLGLTRMDIVTISMTALRSSIEMANKFLDYD

SEQ ID NO: 1473 - protein, 1033 aa, Chymomyza costata
MYPQYSHLSLQRLADQKRTILTNNRLTAMQLEHIKSEIAIELNNLDNVNTSPVDPAPETIQPDIGAANTPQTNNSQNNTNELQPTTHQTNAANCITANTLLEHLREQITANIAQWEGIDPNKRPFLPKLKINKSILTKIDIINKQILPTLINEQTTISDLHLTVYAIAQTTLALNNQNAQNTNQPRQFKKPKWMIRIEGKINTLRKELGRLTQYMNGNRTKKLLRHITTLQALHEVPIEEITDVKKQKLKVYAARLKRYKESYQRQQDNKTFQNNEKSFYKKLTATNTATDITTPSKTEITKYWQDIWSKSVEHSPHAKWLQQEELSQAHIQTQQDYLITLQETIETIKKTHNWKCSGLDNIHNFWYKKLTTIHSHITRTINQIIENPITIPKFLTIGKTFIQPKNNDTSNPANYRPITCLATLYKIITATISNKIDYHLTQQNIITNEQKGCTKHSQGCKEQLIIDTVITRQATLKNRNLHTCYIDYKKAFDSVPHSWLLKVLEIYKIHPKFISLLKHLTENWKTTINLLTPKNIVQTDEIKINRGIFQGDSLSALWFCLSLNPLSNTLNSIPYGFNIKQNSVNTHRINHILYMDDINLYAGTETQLTNLLSFTEQFTTDIHMEFGIKKCKTQHIERGKWKETTENRTLDGEMLESMDQNETYKYLGFQQSTKIDHTIVKKELTSLYRKRIKLLLKTYLNSKNLFKAINTYAIPILTYSFGIIKWSVTDLNNIEIITRKLLTINRKLHPNSCIERITLPRYEGGRGMIDIHNLHNKQITNLRQYFHHHPSNLHKSITKADLQYTPLNLQDLTSNTPENNSQEKINRWCEKSLHGKHPYIMRDSNVDKSSSYSWLKFGDLQSETEGFLFAIQDHVIATRNYLKHICKDPNVTNDKCRKCLQQTETIEHITSGCQVITGTDYTERHNNLAKIIHQQLAHKLNLISDTIPYYKYQPDKILENQTHKLYWDTTILTDKTTTNNRPDITLLNKINKTTHLIEISVPCDNNIHKKYLEKLNKYCLLAEEIKRIWNQKM

SEQ ID NO: 1474 - protein, 1123 aa, Chymomyza costata
MRWTNDMNINLMRCYYKATKLENIQIGYREELHILFTEMYPQYSHLSLQRLADQKRTILTNNRLTAMQLEHIKSEIAIELNNLDNVNTSPVDPAPETIQPDIGAANTPQTNNSQNNTNELQPTTHQTNAANCITANTLLEHLREQITANIAQWEGIDPNKRPFLPKLKINKSILTKIDIINKQILPTLINEQTTISDLHLTVYAIAQTTLALNNQNAQNTNQPRQFKKPKWMIRIEGKINTLRKELGRLTQYMNGNRTKKLLRHITTLQALHEVPIEEITDVKKQKLKVYAARLKRYKESYQRQQDNKTFQNNEKSFYKKLTATNTATDITTPSKTEITKYWQDIWSKSVEHNPHAKWLQQEELSQAHIQTQQDYLITLQETIETIKKTHNWKCPGLDNIHNFWYKKLTTIHSHITRTINQIIENPITIPKFLTIGKTFIQPKNNDTSNPANYRPITCLATLYKIITATISNKIDYHLTQQNIITNEQKGCTKHSQGCKEQLIIDTVITRQATLKNRNLHTCYIDYKKAFDSVPHSWLLKVLEIYKIHPKFISLLKHLTENWKTTINLLTPKNIVQTDEIKINRGIFQGDSLSALWFCLSLNPLSNTLNSIPYGFNIKQNSVNTHRINHILYMDDIKLYAGTETQLTNLLSFTEQFTTDIHMEFGIKKCKTQHIERGKWKETTENRTLDGEMLESMDQNETYKYLGFQQSTKIDHTIVKKELTSLYRKRIKLLLKTYLNSKNLFKAINTYAIPILTYSFGIIKWSVTDLNNIEIITRKLLTINRKLHPNSCIERITLPRYEGGRGMIDIHNLHNKQITNLRQYFHHHPSNLHKSITKADLQYTPLNLQDLTSNTPENNSQEKINRWCEKSLHGKHPYIMRDSNVDKSSSYSWLKFGDLQSETEGFLFAIQDHVIATRNYLKHICKDPNVTNDKCRKCLQQTETIEHITSGCQVITGTDYTERHNNLAKIIHQQLAHKLNLISDTIPYYKYQPDKILENQTHKLYWDTTILTDKTTTNNRPDITLLNKINKTTHLIEISVPCDNNIHKKYLEKLNKYCLLAEEIKRIWKQKNVKIIPIIISATGIIHKSLLPNLTEINLHTNLHYNLQKAAILKKCNIVRKFVT

SEQ ID NO: 1475 - protein, 1186 aa, Lordiphosa collinella
MVPVLRSQASDERRYDRVRRGNPQPDHDANQINSIQAAQNVLTVMPLTTRAGLPRQRMKWTTEMNTTLMRCYYKATKLDTIKIGYREEFHNLFIEKYPQYNNLSQQRLADQKRAILTNNRLTAIQLENIKSEIALELNIRDNEPVTTESTTSESNNRAISPANVANTEHNNSILGIQPRRSNTSEYHTAETTIENTTIENIRRGIISNIIRWDGMDPNKRPILPKLKINKTTLATIDTINKEILPTILNEESTLQNLHLTVFAIAYTTLTLNNQDPERQLNGTYTKHSKPKWMIRIENKINSLRKNLGRLTQYLHGNKTRNIIKHISKLQEQYKKPVEEIADIKKQKLNVYAARLKRYKESHQRRIDNKTFLNSERTFYRKLSSANTIKELIPPTKADITNYWKDIWSNPIHHNSRAKWIEQEEHNQTHLQTQEEYTITLEETTEIIKKTSNWKCPGLDNIHNFWYKKLTTLHPYITILINEIIEDPTKIPEFLTTGKTYIKPKNDQTSNPANYRPITCLSTLYKIITATIKRKIDNHLTQQNIITNEQKGCKKHSQGCKEQLIIDAVITKQTIIKNRNLHYCYIDYKKAFDSVPHSWLLKVLEIYKIHEKIRIVLEHLMQKWKTTINLITPTTNIQTDEIKINRGIFQGDSLSALWFCLSLNPLSNTLNNIPYGFNIKQDSNTIHKINHLLYMDDIKLYAGTATQLKSLLEFTEQFTTDIQMEFGISKCKAQHIERGKWKETSNDIILNGEVLDNMSANETYKYLGFQQSTKIDHSKIKKELTHLYRQRTKLLTKTYLNSKNLFKAINTFAIPILTYSFGIIKWSNTDLNNIEIITRKLLTIHRKLHPNSCIQRITIPRQEGGRGMIDIHNLHNNQIANLRKYFHNHPSNLHQSIAKTDINYTPLNLQNHLYTTPRNNDQEKKDMWSEKALHGKHPYIMRDDNLDKLNSYTWLKIGDLHAETEGFVLAIQDNVIATRNYLKYIVKDPNVSNDKCRKCLQQMETIDHITSGCQVIAGTEYTERHNNIAKIIHQEIAFNLKLLTEKTPYYKYEPINILESETHKLYWDITINTDKTIINNRPDITLLNKTEKTTYLIEISVPNDNNIHKKYIEKITKYSQLTEELRRIWKQKSVKTIPIIISATGILHKSVIPNLKELDLNQHLHHNMQKAAILKTCNIVRKFLNNI

SEQ ID NO: 1476 - protein, 1123 aa, Chymomyza costata
MRWTNDMNINLMRCYYKATKLENIQIGYREELHILFTEMYPQYSHLSLQRLADQKRTILTNNRLTAMQLEHIKSEIAIELNNLDNVNTSPVDPAPETIQPDIGAANTPQTNNSQNNTNELQPTTHQTNTANCITANTLLEHLREQITANIAQWEGIDPNKRPFLPKLKINKSILTKIDIINKQILPTLINEQTTISDLHLTVYAIAQTTLALNNQNAQNTNQPRQFKKPKWMIRIEGKINTLRKELGRLTQYMNGNRTKKLLRHITTLQALHEVPIEEITDVKKQKLKVYAARLKRYKESYQRQQDNKTFQNNEKSFYKKLTATNTATDITTPSKTEITKYWQDIWSKSVEHNPHAKWLQQEELSQAHIQTQQDYLITLQETIETIKKTHNWKCPGLDNIHNFWYKKLTTIHSHITRSINQIIENPITIPKLLTIGKTFIQPKNNDTSNPANYRPITCLATLYKIITATISNKIDYHLTQQNIITNEQKGCTKHSQGCKEQLIIDTVITRQATLKNRNLHTCYIDYKKAFDSVPHSWLLKVLEIYKIHPKFISLLKHLTENWKTTINLLTPQNIVQTDEIKINRGIFQGDSLSALWFCLSLNPLSNTLNSIPYGFNIKQNSVNTHRINHILYMDDIKLYAGTETQLTNLLSFTEQFTTDIHMEFGIKKCKTQHIERGKWKETTENRTLDGEMLESMDQNETYKYLGFQQSTKIDHTIVKKELTSLYRKRIKLLLKTYLNSKNLFKAINTYAIPILTYSFGIIKWSVTDLNNIEIITRKLLTINRKLHPNSCIERITLPRYEGGRGMIDIHNLHNKQITNLRQYFHHHPSNLHKSITKADLQYTPLNLQDLTSNTPENNSQEKINRWCEKSLHGKHPYIMRDSNVDKSSSYSWLKFGDLQSETEGFLFAIQDHVIATRNYLKHICKDPNVTNDKCRKCLQQTETIEHITSGCQVIAGTDYTERHNNLAKIIHQQLAHKLNLISDTIPYYKYQPDKILENQTHKLYWDTTILTDKTTTNNRPDITLLNKINKTTHLIEISVPCDNNIHKKYLEKLNKYCLLAEEIKRIWKQKNVKIIPIIISATGIIHKSLLPNLTEINLHTNLHYNLQKAAILKTCNIVRKFVT

SEQ ID NO: 1477 - protein, 892 aa, Chymomyza costata
MIRIEGKINTLRKELGRLTQYMNGNRTKKLLRHITTLQALHEVPIEEITDVKKQKLKVYAARLKRYKESYQRQQDNKTFQNNEKSFYKKLTATNTATDITTPSKTEITKYWQDIWSKSVEHNPHAKWLQQEELSQAHIQTQQDYLITLQETIETIKKTHNWKCPGLDNIHNFWYKKLTTIHSHITRTINQIIENPITIPKFLTIGKTFIQPKNNDTSNPANYRPITCLATLYKIITATISNKIDYHLTQQNIITNEQKGCTKHSQGCKEQLIIDTVITRQATLKNRNLHTCYIDYKKAFDSVPHSWLLKVLEIYKIHPKFISLLKHLTENWKTTINLLTPKNIVQTDEIKINRGIFQGDSLSALWFCLSLNPLSNTLNSIPYGFNIKQNSVNTHRINHILYMDDIKLYAGTETQLTNLLSFTEQFTTDIHMEFGIKKCKTQHIERGKWKETTENRTLDGEMLESMDQNETYKYLGFQQSTKIDHTIVKKELTSLYRKRIKLLLKTYLNSKNLFKAINTYAIPILTYSFGIIKWSVTDLNNIEIITRKLLTINRKLHPNSCIERITLPRYEGGRGMIDIHNLHNKQITNLRQYFHHHPSNLHKSITKADLQYTPLNLQDLTSNTPENNSQEKINRWCEKSLHGKHPYIMRDSNVDKSSSYSWLKFGDLQSETEGFLFAIQDHVIATRNYLKHICKDPNVTNDKCRKCLQQTETIEHITSGCQVITGTDYTERHNNLAKIIHQQLAHKLNLISDTIPYYKYQPDKILENQTHKLYWDTTILTDKTTTNNRPDITLLNKINKTTHLIEISVPCDNNIHKKYLEKLNKYCLLAEEIKRIWKQKNVKIIPIIISATGIIHKSLLPNLTEINLHTNLHYNLQKAAILKTCNIVRKFVT

SEQ ID NO: 1478 - protein, 1136 aa, Lordiphosa collinella
MPLTTSAGLPRQRMKWTTEMNTNLMRCYYKATKLDTIKIGYREEFHNLFIEKYPQYNNLSQQRLADQKRAILTNNRLTAIQLENIKSEIALELNIRDNESVTTESTTSESNNRAISPANVANTKHNHLNNNSILGIQPRRSNISEYHTAETTIENTTIAKIRRAIISNIVRWDGIDPNKRPILPKLKINKTTLATIDTINKEILPTILNEESTLQNLHLTVFAIAYTTLTLNNQDPERQLNGTYTKHSKPKWMIRIENKINSHRKNLGRLTHNLHGNKTRNIIKHISTLQEQYKKPVEEIADIKKQKLNVYAARLKRYKESHQRRVDNKTFLNSERTFYRKLSSVNTIKELIPPTKTDITNYWKDIWSNPIHHNSRAKWIEQEEHNQTHLQTQEEYTITLEETTEIIKKTSNWKCPGLDNIHNFWYKKLATLHPYITILINEIIEDPTKIPEFLTTGKTYIKPKNDQTSNPANYRPITCLSTLYKIITATIKRKIDNHLTQQNIITNEQKGCKKHSQGCKEQLIIDAVTTKQTIIKNRNLHYCYIDYKKAFDSVPHSWLLKVLEIYKIHEKIRIVLEHLMQKWKTTINLITPTTNIQTDEIKINRGIFQGDSLSALWFCLSLNPLSNTLNNIPYIFNIKQDSNTIHKINHLLYMDDIKLYAGTATQLKSLLEFTEQFTTDIQMEFGKSKCKAQHIERGKWKETSNNIILNGEVLDNMSANETYKYLGFQQSTKIDHSKIKKELTHLYRQRIKLLTKTYLNSKNLFKAINTFAIPILTYSFGIIKWSNTDLNNIEIITRKLLTIHRKLHPNSCIQRITIPRQEGGRGMIDIHNLHNNQIANLRKYFHNHPSNLHHSIAKTDLNYTPLNLQNHLYTTPRNNDQEKKDMWSEKALHGKYPYIMRDDNLDKLNSYTWLKIGDLHAETEGFVLAIQDNVIATRNYLKYIVKDPNVSNDKCRKCLQQCQVIAGTEYTERHNNIAKIIHQEIAFNLKLLTEKTPYYKYEPINILESETHKLYWDITINTDKTIINNRSDITLLNKTEKTIYLIEIRVPNDNNIHKKYIEKITKYSQLTEELRRIWKQKSVKTIPIIISATGILHKSVIPNLKELDLNQHLHHNMQKAVILKTCNIVRKFLNNI

SEQ ID NO: 1479 - protein, 1207 aa, Lordiphosa mommai
MTGLTTPRTPVNRQLEANHPLTCKMVPVLRSQASDERRYGRVRRGNIQPDHDANQINNTQTAQNVLTESTVTTRAGLPRQRMKWTTEMNTNLMRCYYKATKLDTIKIGFREELHTLFINKYPQYNHLTQQRIADQKRAILTNNRLTAIQLENIKSEIALELNLRDNELNPIETDSSATNQRATLNIATTEENHLNNNEATAAQPRNTISEDRTNETSTTEYIRTAIITNLIRWDGMDPNKRTLLPKLRTNKTILTTINTINNEILPTLLNEETSLQDLHLTVYSIAHTTLTLNKQDPERQANRTSTKQTKPKWMIRLENKISTLRKHLGRLTQYIQGSRTRNIIKHISKLQDQFKKPIEEIADTNKQKLKVYAARLKRYKESHQRRIDNKTFLNSERTFYRKLNSKNIIDETVPPTKTDITNYWKNIWSKPIQHNSTAKWIQQEEHNQSHLQTQTEYIITIEETTEIIKKTHNWKCPGLDNIHNFWYKKLTTTHPYITKQINEIIEEPTKIPEFLTVGKTFIKPKNDQTSNPANYRPITCLSTLYKIITATIKRKIDNHLTQHNIITNEQKGCTKHSQGCKEQLIIDAVITKQTIIKNRNLHYCYIDYKKAFDSVPHSWLLKVLEIYKIHQKIRNLLEHLMQKWTTTINLITPTLNIQTDEIKINRGIFQGDSLSALWFCLSLNPLSNILNSIPYGFTLKQDSIALHKINHLLYMDDIKLYAGSETQLKGLLQFTEQFTLDIQMEFGISKCKAQHIERGKWRETSNDIALNGEILDNMNANETYKYLGFQQSTKIDHGTIKKELTQLYRQRIKLLTKSFLNSRNLFKAINTYAIPILTYSFGVIKWSNTDLNNIEIITRKLLTVHRKLHPNSCIQRITIPRQEGGRGMIDIHELHNSQIHNLRKYFHSHASNLHQSIAKTDRNYTPLNLQDHLYTTPISNSQEKKDKWSEKALHGKHPFVMRDDNIDKPNSYTWLKIGDLHAETEGFALAIQDHVIATRNYLKYIVKDPNVSNDKCRRCLQQMETIEHITSGCQVIAGTEYTERHNSIAKIIHQQLANNLNLLTEKTPYYIYEPVNILENETYKLYWDITIHTDKTIINNRPDITLINKAEKTTYLIEISVPNDNNVHKKYVEKITKYTLLTEELKRIWKQNSVKTIPIIISATGILHKSVIPNLKDLDINPYIHHKMQKAAILKTCNIVRKFLNNS

SEQ ID NO: 1480 - protein, 1208 aa, Lordiphosa clarofinis
MTGLTTPRSPVNRQLEANHPLTSKMVPVLRSQASDERRYDRVRRGNTQPDHDANQSNSLQTAQNVLTDIPLTTRAGLPRQRMKWTTEMNTNLMRCYYKATKLDTIKIGYREEFHKLFIEKYPQYNNLTQQRIADQKRAILTNNRLTAIQLQNIKSDIALELNITNNESRITEYNSSETSRTQSTTNVTNTERNQSNNSRNIEIQPSSTIFEYRTAENITLEQIRAEIITTIIRWNGIDPNKRPFIPKLKINKNILATINTINKEILPTLLNEETNLQDLHLTVFSIAYTTLTLNKQDPERQLNVTYTKNSKPKWMIRIENRINALRKHLGRLTQYIQGNKTRNIIKHISKLQDQYKKPIEEIADIKKQKLKVYAARLKRYKESHQRRIDNKTFLNSERTFYRKLTSENTIEQSVPPTESDITNYWKDIWSNPLQHNPRAKWIEQEEHNQTHLQTQAECIITLEETTEIIKKTHNWKCPGLDNIHNFWYKKLTTTHPYITKLINEIIEDPTKIPDFITIGKTYIKPKNNQTSNPANYRPITCLSTLYKIITATIKEKIDNHLSQQNIITNEQKGCKKHSQGCKEQLIIDAVITKQTIIKNRNLHYCYIDYKKAFDSVPHSWLLKVLEIYKIHEKIRNFLEHLMQKWKTTINLTTPTANIQTDEIKINRGIFQGDSLSALWFCLSLNPLSNTLNSIPYGFNIKQDSTTIHKINHLLYMDDIKLYAGTETQLKNLLQFTEQFTSDIQMEFGISKCKAQHIDRGKWKETPNDIVLNGETLGNMSANETYKYLGFQQSTKIDHTQVKKELTQLYRHRIKLLTKTYLNSKNLFKAINTFAIPILTYSFGIIKWSNTDLNNIEIITRKLLTIHRKLHPNSCIQRITIPRQEGGRGMIDIHDLYSNQITNLRNYFHSHPSNLHQSIAKSDRNYTPLNLQELRYTSPPNNTQVNKDLWREKSLHGKHPYIMRDDNIDKPNSYTWLKTGDLHAETEGFALAIQDHVIATRNYLKYIVKDPNISNDKCRKCLQQAETVEHITSGCQVIAGTEYTERHNNIAKIVHQELAINLKLLTEKTPYYKYEPINILENETHKLYWDITINTDKTIINNRPDITLLNKTEKTTYLIEISVPNDNNIHKKYIEKISKYSLLTEELRRIWKQKCVKTIPIIISATGILHKSVIPNLKELSISYHIHHTMQKAAILKTCNIVRKFLNNS

SEQ ID NO: 1481 - protein, 1104 aa, Homarus americanus
MAVSKPERCEKHFLECCRNSCPDSFDETLSCTLPSKDRSKTPPRADPKMHQCDVCGRTFLSARGLTQHTRLTHKEMYNKALKPAKRVPYSPQEVALIAEEEVRILLSGRKTTFINQLLLESLPGGSIGLERLKAMRRISKYKTAVQESLANINQQRLHPHPDLGDDDAPNPQNLPQGGNDPNPSDPDDSSSESEEEELDHELEARRRLWEYLRTLSEEEEEANTLISDLNQVLHYIPAPEDLTEGDYGAVLDGLETALRQHRPRLFTGRRQPRRSTTTNNQPREQHLPRKVRKKREYARTQRAYQRNPKELAKKIIDAVEFEGETPTVAEFDSEYRPRFSAPSPPDNLPYTRKNNDNMLNTLLPISKEDILAALRGPETATGPENPELDSKALQRLGSGVLGRVFNVWLYLARVPPWTKMSRTTMLPKKSPLGNPSNWRPITIGSHFLRVYCKILAHRLSKNADTSISQKAFREVDGCGENLALIEGIIRHARREKRNVYIAFIDVAKAFDTISHSSLNRALRRLDTPQHILGVVQDLYDGLETQICVNGEESETISITRGVKQGCPLSPFLFCSVVDEYLASLGQATGYRFDEHTNVAVTGFADDLVEVSESNLGMRRNLAMLDDFLQARGLAAQPAKCATISLERAAGNRNGVRLRVVTESSFHLRHPDTGEAIPIPSIQPDEYIQYLGLRVGPSGLEKPGRQVNSEKAALVTIMDRIGKCPLKPLQKLKILKQHVIPKLQYKYVKGSSSLNLLRCLDKKINLRVRQWFHLPHTLHTALIGLPLKDGGMGVPSLVESVTHMKMGLLHRLQTSSDPTVRFIAAEGLWGREVTAMARHFGVEHISINTIRQMKKEVKEKKRVEWSRSWQGKGAENFYGKQACNGVLKKDLGPGRKPIDLLRLRSQSISCRVSRAIGRMPSEELTRLTCRRCGEGQEDLMHLLQSCRAAQNHRVKRHDVILKKLGQWLEREGYDVKTEPRIPTNHTFVKPDLLLQKNGRYTMLDLCIPYESDEHALHKAEQFKIDKYQAYEAEVKEYIVSKELATPVGDITFLGTAVGARGGIRTATTKLLGKMGIRGPGIAILTTMAIEGSIKILRTLRVSASG

SEQ ID NO: 1482 - protein, 1285 aa, Homarus americanus
MSKAVIAFPPPPRPSAKGAGESRTGRDMGVTEFSHPQAQSWPIYRRIRGVESGVVGTTSDPQPSRERQCLGESTSQSDGALSRVGSKARDGIPGKPPGPLSPLDTMTSDQLEVEDLPNQTSCNQLDAAISLRTGKVITIMYERIGQTKYCDSCTKAYTSITKYARHIKSRHQQRLQVRCSICKRALSETERYDDHLTECIMLSALPEPSCQTPPKHQSSKQDTPTPKPEVNQCCVCGKTYASGRGLTQHTRQAHPGVYNATLQPAKRKTYSAQEMAIVAEEEVRLLRSGKKTTFINQLLLSSLPEGSFKLERLKAMRKTPKYRTLVQEGLDTINNTERPNLRTDEGGERAPNHQDLPPAGDDPNPSDPDDSDGNSDEGPDHELEARRRLWEYLMVLSTEEEVADMLITDLNLVLRNVPAPDSLTEVDTRTALEGLESALRQHRPRLFTGRRQPRRRNTNNNPPREEHLPRRVRKKREYARTQRAYHRNPKELANKIINAVEFEGDTPTIAEFDNEFRPRFSAPSPPDNSPYTSTPNARMLNTLQPISLKDIQEALRGPETAAGPDNPELDTRALRRLGPGVLGRIFNVWLYLAKVPQWTKTSRTTMLPKKSPLGNPSNWRPITIGSHFLRVYCKVMAHRLSLNADTSISQKAFRAVDGCGENLALVEGIIRHARKEKRNVYLTFVDVAKAFDTVSHSSLKRALRRLDTPHHILAIVQDLYDNLETQICVEGAESEAIPITRGVKQGCPLSPFLFCAVVDEFLASLEPAAGYHLNENTSVAVTGFADDLVVISESRLGMARNLAKLDDFLQARGLAAQPAKCATVSLELSAGGRNGRRLRVVTENIFSLRNPDTGRATLLPSIQPDQYVKYLGLQVGPSGLERPGRQINLERDKLVTIMNRIGGSALKPLQKLRLLRQHVIPKLQYKYVKGSSSLNLLRCLDKKINVHVRKWFHLPHTLHKSLTGLPLKDGGLGVPRLLESITRMKMGLLHRLRTSSDPAVRLIAADGLWGKEVTAMARHFGVEHISAESTRRMKKETVEKMRDEWSRSWSGRGAENFYGKQACNGILKNDLGPGRKPIDLLRLRSQSVSCRVSRAIGRVPNEELARLTCRRCGEGQEDLMHLLQSCQAAQNHRIIRHDAILRKLSQWLERENYDVQMEPHIPTGHTFVKPDLLLQKNGRYSVLDLCIPFESDKYALHRAEQFKADKYRAYEADVRRYITRRELATPVGDIAFLGAAIGARGGIRTATAKLLGKMGIRGRGIGILTSMAIEGSIKILRTLRVQPTN

SEQ ID NO: 1483 - protein, 1104 aa, Homarus americanus
MAVSKPERCEKHFLECCRNSCPDSFDETLSCTLPSKDRSKTPPRADPKMHQCDVCGRTFLSARGLTQHTRLTHKEMYNKALKPAKRVPYSPQEVALIAEEEVRILLSGRKTTFINQLLLESLPGGSIGLERLKAMRRISKYKTAVQESLANINQQRLHPHPDLGDEDAPNPQNLPQGGNDPNPSDPDDSSSESEEEELDHELEARRRLWEYLRTLSEEEEEANTLISDLNQVLHNIPAPEDLTEGDYGAVLDGLETALRQHRPRLFTGRRQPRRSTTTNNQPREQHLPRKVRKKREYARTQRAYQRNPKELAKKIIDAVEFEGETPTVAEFDSEYRPRFSAPSPPDNLPYTRKNNDNMLNTLLPISKEDILAALRGPETATGPENPELDSKALQRLGSGVLGRVFNVWLYLARVPPWTKMSRTTMLPKKSPLGNPSNWRPITIGSHFLRVYCKILAHRLSKNADTSISQKAFREVDGCGENLALIEGIIRHARREKRNVYIAFIDVAKAFDTISHSSLNRALRRLDTPQHILGVVQDLYDGLETQICVNGEESETISITRGVKQGCPLSPFLFCSVVDEYLASLGQATGYRFDEHTNVAVTGFADDLVEVSESNLGMRRNLAMLDEFLQARGLAAQPAKCATISLERAAGNRNGVRLRVVTESSFHLRHPDTGEAIPIPSIQPDEYIQYLGLRVGPSGLEKPGRRVNSEKAALVTIMDRIGKCPLKPLQKLKILKQHVIPKLQYKYVKGSSSLNLLRCLDKKINLRVRQWFHLPHTLHTALIGLPLKDGGMGVPSLVESVTHMKMGLLHRLQTSSDPTVRFIAAEGLWGREVTAMARHFGVEHISINTIRQMKKEVKEKKRVEWSRSWQGKGAENFYGKQACNGVLKKDLGPGRKPIDLLRLRSQSISCRVSRAIGRMPSEELTRLTCRRCGEGQEDLMHLLQSCRAAQNHRVKRHDVILKKLGQWLEREGYDVKTEPRIPTNHTFVKPDLLLQKNGRYTMLDLCIPYESDEHALHKAEQFKIDKYQAYEAEVKEYIVSKELATPVGDITFLGTAVGARGGIRTATTKLLGKMGIRGPGIAILTTMAIEGSIKILRTLRVSASG

SEQ ID NO: 1484 - protein, 1104 aa, Homarus americanus
MAVSKPERCEKHFLECCRNSCPDSFDETLSCTLPSKDRSKTPPRADPKMHQCDVCGRTFLSARGLTQHTRLTHKEMYNKALKPAKRVPYSPQEVALIAEEEVRILLSGRKTTFINQLLLESLPGGSIGLERLKAMRRISKYKTAVQESLANINQQRLHPHPDLGDEDAPNPQNLPQGGNDPNPSDPDDSSSESEEEELDHELEARRRLWEYLRTLSEEEEEANTLISDLNQVLHNIPAPEDLTEGDYGAVLDGLETALRQHRPRLFTGRRQPRRSTTTNNQPREQHLPRKVRKKREYARTQRAYQRNPKELAKKIIDAVEFEGETPTVAEFDSEYRPRFSAPSPPDNLPYTRKNNDNMLNTLLPISKEDILAALRGPETATGPENPELDSKALQRLGSGVLGRVFNVWLYLARVPPWTKMSRTTMLPKKSPLGNPSNWRPITIGSHFLRVYCKILAHRLSKNADTSISQKAFREVDGCGENLALIEGIIRHARREKRNVYIAFIDVAKAFDTISHSSLNRALRRLDTPQHILGVVQDLYDGLETQICVNGEESETISITRGVKQGCPLSPFLFCSVVDEYLASLGQATGYRFDEHTNVAVTGFADDLVEVSESNLGMRRNLAMLDEFLQARGLAAQPAKCATISLERAAGNRNGVRLRVVTESSFHLRHPDTGEAIPIPSIQPDEYIQYLGLRVGPSGLEKPGRQVNSEKAALVTIMDRIGKCPLKPLQKLKILKQHVIPKLQYKYVKGSSSLNLLRCLDKKINLRVRQWFHLPHTLHTALIGLPLKDGGMGVPSLVESVTHMKMGLLHRLQTSSDPTVRFIAAEGLWGREVTAMARHFGVEHISINTIRQMKKEVKEKKRVEWSRSWQGKGAENFYGKQACNGVLKKDLGPGRKPIDLLRLRSQSISCRVSRAIGRMPSEELTRLTCRRCGEGQEDLMHLLQSCRAAQNHRVKRHDVILKKLGQWLEREGYDVKTEPRIPTNHTFVKPDLLLQKNGRYTMLDLCIPYESDEHALHKAEQFKIDKYQAYEAEVKEYIVSKELATPVGDITFLGTAVGARGGIRTATTKLLGKMGIRGPGIAILTTMAIEGSIKILRTLRVSASG

SEQ ID NO: 1485 - protein, 1298 aa, Homarus americanus
MFNATTGPCPPSVEPSASKTGESRAFSLAVRQKRLLSKLSVSPEEKEGGGCAGVRGPHTRRVGSVVAGAPREPPPSRERQCLGESTPQSDGALSRGVSLVKDGKPGKPPGPLSPSDTTASVQIEAKDHPNHTSGSQLDASVSRATNEIEYYGCGALVTINCAHCTEVYHNTLKDIRHARAKHHRVVTIRCGNCKMAVSKPERCEKHFLECCRNSCPDSFDKTLSCTLPSKDRSKTPPRADPKMHQCDVCGRTFSSARGLTQHTRLKHKEVYNKTLKPAKRVPYSPQEVALIAEEEARLLLSGRKTTFINQLLLESLPGGSIGLERLKAMRKTSKYKTAVQESLADINQQRLHPHPDLGEDDAPNPQNLPQGGNDPNPSDPDDSSSESEEEELDHELEARRRLWEYLRTLSEEEEEANTLISDLNQVLHNIPAPEDLTEGDYGAVLDGLETALRQHRPRLFTGRRQPRRSTTTNSQPREQHLPRKVRKKREYARTQRAYQRNPKELAKKIIDAVEFEGETPTVAEFDSEYRPRFSAPSPPDNLPYTRKSNDNMLNTLLPISKEDILAALRGPETAAGPENPELDSKALQRLGSGVLGRVFNVWLYLARVPPWTKMSRTTMLPKKSPLGNPSNWRPITIGSHFLRVYCKILAHRLSKNADTSISQKAFREVDGCGENLALVEGIIRHARREKRNVYIAFIDVAKAFDTISHSSLNRALCRLDTPQHILGVVQDLYDDLETQICVNGEESETISITRGVKQGCPLSPFLFCSVVDEYLASLGQATGYRFDEHTNVAVTGFADDLVVVSESNLGMRRNLAMLDDFLQARGLAAQPAKCATISLERAAGNRNGVRLRVVTESSFHLRHPDTGEAIPIPSIQPDEYIQYLGLRVGPSGLEKPGRQVNSEKAALVTIMDRIGKCLLKPLQKLKILKQHVIPKLQYKYVKGSSSLNLLRCLDKKINLRVRQWFHLPHTLHTALIGLPLKDGGMGVPSLVESVTHMKMGLLHRLQTSSDPTVRFIAAEGLWGREVTAMARHFGVEHISINTTRQMKKEVKEKKRVEWSRSWHGKGAENFYGKQACNGVLKKDLGPGRKPIDLLCLRSQSISCRISRAIGRMPSEELTRLTCRRCGEGQEDLMHLLQSCRAAQNHRVKRHDVILKKLGQWLEREGYDVKTEPRIPTNHTFVKPDLLLQKNGRYTVLDLCIPYESDEHALHRAEQFKIDKYQAYEAEVKEYIVSKELATPVGDITFLGTAVGARGGIRTATTKLLGKMGIRGPGIAILTTMAIEGSIKILRTLRVSASG

SEQ ID NO: 1486 - protein, 1300 aa, Homarus americanus
MFNATTGPCPPSVEPSASKTGESRAFSLAVRQKRLLSKLSVSPEEKEGGGCAGVRGPHTRRVGSVVAGAPREPPPSRERQCLGESTPQSDGALSRGVSLVKDGKPGKPPGPLSPSDTTASVQIEAKDHPNHTSGSQLDASVSRATNEIEYYGCGALVTINCAHCTEVYHNTLKDIRHARAKHHRVVTIRCGNCKMAVSKPERCEKHFLECCRNSCPDSFDKTLSCTLPSKDRSKTPPRADPKMHQCDVCGRTFSSARGLTQHTRLKHKEVYNKTLKPAKRVPYSPQEVALIAEEEARLLLSGRKTTFINQLLLESLPGGSIGLERLKAMRKTSKYKTAVQESLADINQQRLHPHPDLGEDDAPNPQNLPQGGNDPNPSDPDDSSSESEEEELDHELEARRRLWEYLRTLSEEEEEEEANTLISDLNQVLHNIPAPEDLTEGDYGAVLDGLETALRQHRPRLFTGRRQPRRSTTTNSQPREQHLPRKVRKKREYARTQRAYQRNPKELAKKIIDAVEFEGETPTVAEFDSEYRPRFSAPSPPDNLPYTRKSNDNMLNTLLPISKEDILAALRGPETAAGPENPELDSKALQRLGSGVLGRVFNVWLYLARVPPWTKMSRTTMLPKKSPLGNPSNWRPITIGSHFLRVYCKILAHRLSKNADTSISQKAFREVDGCGENLALVEGIIRHARREKRNVYIAFIDVAKAFDTISHSSLNRALCRLDTPQHILGVVQDLYDDLETQICVNGEESETISITRGVKQGCPLSPFLFCSVVDEYLASLGQATGYRFDEHTNVAVTGFADDLVVVSESNLGMRRNLAMLDDFLQARGLAAQPAKCATISLERAAGNRNGVRLRVVTESSFHLRHPDMGEAIPIPSIQPDEYVQYLGLRVGPSGLEKPGRQVNSEKAALVTIMDRIGKCLLKPLQKLKILKQHVIPKLQYKYVKGSSSLNLLRCLDKKINLRVRQWFHLPHTLHTALIGLPLKDGGMGVPSLVESVTHMKMGLLHRLQTSSDPTVRFIAAEGLWGREVTAMARHFGVEHISINTTRQMKKEVKEKKRVEWSRSWQGKGAENFYGKQACNGVLKKDLGPGRKPIDLLRLRSQSISCRISRAIGRMPSEELTRLTCRRCGEGQEDLMHLLQSCRAAQNHRVKRHDVILKKLGQWLEREEYDVKTEPRIPTNHTFVKPDLLLQKNGRYTVLDLCIPYESDEHALHRAEQFKIDKYQAYEAEVKEYIVSKELATPVGDITFLGTAVGARGGIRTATTKLLGKMGIRGPGIAILTTMAIEGSIKILRTLRVSASG

SEQ ID NO: 1487 - protein, 1056 aa, Homarus americanus
MHQCDVCGRTFSSARGLTQHTRLMHKEVYNKTLKPAKRVPYSPQEVALIAEEEARILLSGRKTTFINQLLLESLPGGSIGLERLKAMRKTPKYKTAVQESLANINQQRLHPHPDLGDDDAPNPQNLPQGGNDPNPSDPDDSSSESEEEELDRELEARRRLWEYLRTLSEEEEEANTLISDLNQVLLNIPAPEDLTEGDCGAILDGLETALRQHRPRLFTGRRQPRRSTTTNNQPREQHLPRKVRKKREYARTQRAYQRNPKELAKKIIDAVEFEGETPTVAEFDNEYRPRFSAPSPPDNLPYTRKSNDNMLNTLLPISKNDILAALRGPETAAGPENPELDSKALQRLGSGVLGRVFNVWLYLARVPPWTKVSRTTMLPKKSPLGNPSNWRPITIGSHFLRVYCKILAHRLSKNADTSISQKAFREVDGCGENLALVEGIIRHARREKRNVYIAFIDVAKAFDTISHSSLNRALCRLDTPQHILGVVQDLYDNLETQICVNGEESETISITRGVKQGCPLSPFLFCSVVDEYLASLGQATGYRFDEHTNVAVTGFADDLVVVSESNLGMRRNLAMLDDFLQARGLAAQPAKCATISLERAAGSRNGVRLRVVTESSFHLRHPDTGEAIPIPSIQPDEYVKYLGLRVGPSGLEKPGRQVNSEKAALVTIMDRIGKCLLKPLQKLKILKQHVIPKLQYKYVKGSSSLNLLRCLDKKINLRVRQWFHLPHTLHTALIGLPLKDGGMGVPSLVESVTHMKMGLLHRLQTSSDPTVRFIAAEGLWGREVTAMARHFGVEHISINTTRQMKKEVKEKKRVEWSQSWQGKGAENFYGKQACNGVLKKDLGPGRKPIDLLRLRSQSISCRVSRAIGRMPSEELTRLTCRRCGEGQEDLMHLLQSCRAAQNHRVKRHDVILKKLGQWLEREGYDVKTEPRIPTNHTFVKPDLLLQKNGRYTVLDLCIPYESDEHALHRAEQFKIDKYQAYEAEVREYIVSRELATPVGDITFLGTAVGARGGIRTATTKLLGKMGIRGPGIAILTTMAIEGSIKILRTLRVSASG

SEQ ID NO: 1488 - protein, 1105 aa, Homarus americanus
MAVSKPERCEKHFLECCRNSCPDSFDETLSCTLPSKDRSKTPPRADPKMHQCDVCGRTFLSARGLTQHTRLTHKEMYNKALKPAKRVPYSPQEVALIAEEEVRILLSGRKTTFINQLLLESLPGGSIGLERLKAMRRISKYKTAVQESLANINQQRLHPHPDLGDDDAPNPQNLPQGGNDPNPSDPDDSSSESEEEELDHELEARRRLWEYLRTLSEEEEEEANTLISDLNQVLHYIPAPEDLTEGDYGAVLDGLETALRQHRPRLFTGRRQPRRSTTTNNQPREQHLPRKVRKKREYARTQRAYQRNPKELAKKIIDAVEFEGETPTVAEFDSEYRPRFSAPSPPDNLPYTRKNNDNMLNTLLPISKEDILAALRGPETATGPENPELDSKALQRLGSGVLGRVFNVWLYLARVPPWTKMSRTTMLPKKSPLGNPSNWRPITIGSHFLRVYCKILAHRLSKNADTSISQKAFREVDGCGENLALIEGIIRHARREKRNVYIAFIDVAKAFDTISHSSLNRALRRLDTPQHILGVVQDLYDGLETQICVNGEESETISITRGVKQGCPLSPFLFCSVVDEYLASLGQATGYRFDEHTNVAVTGFADDLVEVSESNLGMRRNLAMLDDFLQARGLAAQPAKCATISLERAAGNRNGVRLRVVTESSFHLRHPDTGEAIPIPSIQPDEYIQYLGLRVGPSGLEKPGRQVNSEKAALVTIMDRIGKCPLKPLQKLKILKQHVIPKLQYKYVKGSSSLNLLRCLDKKINLRVRQWFHLPHTLHTALIGLPLKDGGMGVPSLVESVTHMKMGLLHRLQTSSDPTVRFIAAEGLWGREVTAMARHFGVEHISINTIRQMKKEVKEKKRVEWSRSWQGKGAENFYGKQACNGVLKKDLGPGRKPIDLLRLRSQSISCRVSRAIGRMPSEELTRLTCRRCGEGQEDLMHLLQSCRAAQNHRVKRHDVILKKLGQWLEREGYDVKTEPRIPTNHTFVKPDLLLQKNGRYTMLDLCIPYESDEHALHKAEQFKIDKYQAYEAEVKEYIVSKELATPVGDITFLGTAVGARGGIRTATTKLLGKMGIRGPGIAILTTMAIEGSIKILRTLRVSASG

SEQ ID NO: 1489 - protein, 1105 aa, Homarus americanus
MAVSKPERCEKHFLECCRNSCPDSFDETLSCTLPSKDRSKTPPRADPKMHQCDVCGRTFLSARGLTQHTRLTHKEMYNKALKPAKRVPYSPQEVALIAEEEVRILLSGRKTTFINQLLLESLPGGSIGLERLKAMRRISKYKTAVQESLANINQQRLHPHPDLGDDDAPNPQNLPQGGNDPNPSDPDDSSSESEEEELDHELEARRRLWEYLRTLSEEEEEEANTLISDLNQVLHYIPAPEDLTEGDYGAVLDGLETALRQHRPRLFTGRRQPRRSTTTNNQPREQHLPRKVRKKREYARTQRAYQRNPKELAKKIIDAVEFEGETPTVAEFDSEYRPRFSAPSPPDNLPYTRKNNDNMLNTLLPISKEDILAALRGPETATGPENPELDSKALQRLGSGVLGRVFNVWLYLARVPPWTKMSRTTMLPKKSPLGNPSNWRPITIGSHFLRVYCKILAHRLSKNADTSISQKAFREVDGCGENLALIEGIIRHARREKRNVYIAFIDVAKAFDTISHSSLNKALRRLDTPQHILGVVQDLYDGLETQICVNGEESETISITRGVKQGCPLSSFLFCSVVDEYLASLGQATGYRFDEHTNVAVTGFADDLVVVSESNLGMRRNLAMLDDFLQARGLAAQPAKCATISLESAAGNRNGVRLRVVTESSFHLRHPDTGEAIPIPSIQPDEYVQYLGLRVGPSGLEKPGRQVNSEKAALVTIMDRIGKCPLKPLQKLKILKQHVIPKLQYKYVKGSSSLNLLRCLDKKINLRVRQWFHLPHTLHTALIGLPLKDGGMGVPSLVESVTHMKMGLLHRLQTSSDPTVRFIAAEGLWGREVTAMARHFGVEHISINTIRQMKKEVKEKKRVEWSRSWQGKGAENFYGKQACNGVLKKDLGPGRKPIDLLRLRSQSISCQVSRAIGRMPSEELTRLTCRRCGEGQEDLMHLLQSCRAAQNHRVKRHDVILKKLGQWLEREGYDVKTEPRIPTNHTFVKPDLLLQKNGRYTVLDLCIPYESDEHALHKAEQFKIDKYQAYEAEVKEYIVSKELATPVGDITFLGTAVGARGGIRTATTKLLGKMGIRGPGIAILTTMAIEGSIKILRTLRVSASG

SEQ ID NO: 1490 - protein, 1033 aa, Homarus americanus
MHKEVYNKTLKPAKRVPYSPQEVALIAEEEARILLSGRKTTFINQLLLESLPGGSIGLERLKAMRKTPKYKTAVQESLANINQQRLHPHPDLGDDDAPNPQNLPQGGNDPNPSDPDDSSSESEEEELDRELEARRRLWEYLRTLSEEEEEANTLISDLNQVLLNIPAPEDLTEGDCGAILDGLETALRQHRPRLFTGRRQPRRSTTTNNQPREQHLPRKVRKKREYARTQRAYQRNPKELAKKIIDAVEFEGETPTVAEFDNEYRPRFSAPSPPDNLPYTRKSNDNMLNTLLPISKNDILAALRGPETAAGPENPELDSKALQRLGSGVLGRVFNVWLYLARVPPWTKVSRTTMLPKKSPLGNPSNWRPITIGSHFLRVYCKILAHRLSKNADTSISQKAFREVDGCGENLALVEGIIRHARREKRNVYIAFIDVAKAFDTISHSSLNRALCRLDTPQHILGVVQDLYDNLETQICVNGEESETISITRGVKQGCPLSPFLFCSVVDEYLASLGQATGYRFDEHTNVAVTGFADDLVVVSESNLGMRRNLAMLDDFLQARGLAAQPAKCATISLERAAGSRNGVRLRVVTESSFHLRHPDTGEAIPIPSIQPDEYVKYLGLRVGPSGLEKPGRQVNSEKAALVTIMDRIGKCLLKPLQKLKILKQHVIPKLQYKYVKGSSSLNLLRCLDKKINLRVRQWFHLPHTLHTALIGLPLKDGGMGVPSLVESVTHMKMGLLHRLQTSSDPTVRFIAAEGLWGREVTAMARHFGVEHISINTTRQMKKEVKEKKRVEWSQSWQGKGAENFYGKQACNGVLKKDLGPGRKPIDLLRLRSQSISCRVSRAIGRMPSEELTRLTCRRCGEGQEDLMHLLQSCRAAQNHRVKRHDVILKKLGQWLEREGYDVKTEPRIPTNHTFVKPDLLLQKNGRYTVLDLCIPYESDEHALHRAEQFKIDKYQAYEAEVREYIVSRELATPVGDITFLGTAVGARGGIRTATTKLLGKMGIRGPGIAILTTMAIEGSIKILRTLRVSASG

SEQ ID NO: 1491 - protein, 1174 aa, Homarus americanus
MDHPNQTSRSQLDASVSRAANEIEYYGCCALVTINCAHCTEVYHNILKYIRHARAKHHRVVTIRCGNCKMAVSKPERCEKHFLECCRNSCPDSFDETLSCTLPSKDRSKTPPRADPKMHQCDVCGRTFLSARGLTQHTRLTHKEMYNKALKPAKRVPYSPQEVALIAEEEVRILLSGRKTTFINQLLLESLPGGSIGLERLKAMRRISKYKTAVQESLANINQQRLHPHPDLGDDDAPNPQNLPQGGNDPNPSDPDDSSSESEEEELDHELEARRRLWEYLRTLSEEEEEEANTLISDLNQVLHYIPAPEDLTEGDYGAVLDGLETALRQHRPRLFTGRRQPRRSTTTNNQPREQHLPRKVRKKREYARTQRAYQRNPKELAKKIIDAVEFEGETPTVAEFDSEYRPRFSAPSPPDNLPYTRKNNDNMLNTLLPISKEDILAALRGPETAAGPENPELDSKALQRLGSGVLGRVFNVWLYLARVPPWTKMSRTTMLPKKSPLGNPSNWRPITIGSHFLRVYCKILAHRLSKNADTSISQKAFREVDGCGENLALIEGIIRHARREKRNVYIAFIDVAKAFDTISHSSLNKALRRLDTPQHILGVVQDLYDGLETQICVNGEESETISITRGVKQGCPLSSFLFCSVVDEYLASLGQATGYRFDEHTNVAVTGFADDLVVVSESNLGMRRNLAMLDDFLQARGLAAQPAKCATISLERAAGNRNGVRLRVVTESSFHLRHPDTGEAIPIPSIQPDEYVQYLGLRVGPSGLEKPGRQVNSEKAALVTIMDRLGKCPLKPLQKLKILKQHVIPKLQYKYVKGSSSLNLLRCLDKKINLRVRQWFHLPHTLHTALIGLPLKDGGMGVPSLVESVTHMKMGLLHSLQTSSDPTVRFIAAEGLWGREVTAMARHFGVEHISINTIRQMKKEVKEKKRVEWSLSWQGKGAENFYGKQACNGVLKKDLGPGRKPIDLLRLRSQSISCRVSRAIGRMPSEELTRLTCRRCGEGQEDLMHLLQSCRAAQNHRVKRHDVILKKLGQWLEREGYDVKTEPRIPTNHTFVKPDLLLQKNGRYTMLDLCIPYESDEHALHKAEQFKIDKYQAYEAEVKEYIVSKELATPVGDITFLGTAVGARGGIRTATTKLLGKMGIRGPGIAILTTMAIEGSIKILRTLRVSASG

SEQ ID NO: 1492 - protein, 1295 aa, Homarus americanus
MFNATTGPCPPSVEPSASKTGESRAISLAVRQKRFLSKLRVSSEEKEGGGCAGVRGPHTRRVGSVVAGAPHDPPPSRERQYLGESTPQSDGALSRGVSLVKDGKPGKPPGPLSPSDTTASVQIEAKDHPNHTSESQLDASVSKTTNEIEYYGTLVTINCAHCTKVYHNILKYIRHARAKHQRVVTIRCGNCKMAVSKPERCEKHFLECCRNSCPDSFDETLSCTLPSKDRSKTPPRADPKMHQCDVCGRTFSSARGLTQHTRLMHKEVYNKTLKPAKRVPYSPQEVALIAEEEARILLSGRKTTFINQLLLESLPGGSIGLERLKAMRKTPKYKTAVQESLANINQQRLHPHPDLGDDDAPNPQNLPQGGNDPNPSDPDDSSSESEEELDRELEARRRLWEYLRTLSEEEEEANTLISDLNQVLLNIPAPEDLTEGDCGAILDGLETALRQHRPRLFTGRRQPRRRTTTNNQPREQHLPRKVRKKREYARTQRAYQRNPKELAKKIIDAVEFEGETPTVAEFDNEYRPRFSAPSPPDNLPYTRKSNDNMLNTLLPISKNDILAALRGPETAAGPENPELDSKALQRLGSGVLGRVFNVWLYLARVPPWTKVSRTTMLPKKSPLGNPSNWRPITIGSHFLRVYCKILAHRLSKNADTSISQKAFREVDGCGENLALVEGIIRHARREKRNVYIAFIDVAKAFDTISHSSLNRALCRLDTPQHILGVVQDLYDNLETQICVNGEESETISITRGVKQGCPLSPFLFCSVVDEYLASLGQATGYRFDEHTNVAVTGFADDLVVVSESNLGMRRNLAMLDDFLQARGLAAQPAKCATISLERAAGSRNGVRLRVVTESSFHLRHPDTGEAIPIPSIQPDEYVKYLGLRVGPSGLEKPGRQVNSEKAALVTIMDRIGKCLLKPLQKLKILKQHVIPKLQYKYVKGSSSLNLLRCLDKKINLRVRQWFHLPHTLHTALIGLPLKDGGMGVPSLVESVTHMKMGLLHRLQTSSDPTVRFIAAEGLWGREVTAMARHFGVEHISINTTRQMKKEVKEKKRVEWSQSWQGKGAENFYGKQACNGVLKKDLGPGRKPIDLLRLRSQSISCRVSRAIGRMPSEELTRLTCRRCGEGQEDLMHLLQSCRAAQNHRVKRHDVILKKLGQWLEREGYDVKTEPRIPTNHTFVKPDLLLQKNGRYTVLDLCIPYESDEHALHRAEQFKIDKYQAYEAEVREYIVSRELATPVGDITFLGTAVGARGGIRTATTKLLGKMGIRGPGIAILTTMAIEGSIKILRTLRVSASG

SEQ ID NO: 1493 - protein, 1029 aa, Homarus americanus
MYNKALKPAKRVPYSPQEVALIAEEEVRILLSGRKTTFINQLLLESLPGGSIGLERLKAMRRISKYKTAVQESLANINQQRLHPHPDLGDEDAPNPQNLPQGGNDPNPSDPDDSSSESEEEELDHELEARRRLWEYLRTLSEEEEEANTLISDLNQVLHNIPAPEDLTEGDYGAVLDGLETALRQHRPRLFTGRRQPRRSTTTNNQPREQHLPRKVRKKREYARTQRAYQRNPKELAKKIIDAVEFEGETPTVAEFDSEYRPRFSAPSPPDNLPYTRKNNDNMLNTLLPISKEDILAALRGPETATGPENPELDSKALQRLGSGVLGRVFNVWLYLARVPPWTKMSRTTMPPKKSPLGNPSNWRPITIGSHFLRVYCKILAHRLSKNADTSISQKAFREVDGCGENLALIEGIIRHARREKRNVYIAFIDVAKAFDTISHSSLNRALRRLDTPQHILGVVQDLYDGLETQICVNGEESETISITRGVKQGCPLSPFLFCSVVDEYLASLGQATGYRFDEHTNVAVTGFADDLVEVSESNLGMRRNLAMLDDFLQARGLAAQPAKCATISLERAAGNRNGVRLRVVTESSFHLRHPDTGEAIPIPSIQPDEYIQYLGLRVGPSGLEKPGRQVNSEKAALVTIMDRIGKCPLKPLQKLKILKQHVIPKLQYKYVKGSSSLNLLRCLDKKINLRVRQWFHLPHTLHTALIGLPLKDGGMGVPSLVESVTHMKMGLLHRLQTSSDPTVRFIAAEGLWGREVTAMARHFGVEHISINTIRQMKKEVKEKKRVEWSRSWQGKGAENYYGKQACNGVLKKDLGPGRKPIDLLRLRSQSISCRVSRAIGRMPSEELTRLTCRRCGEGQEDLMHLLQSCRAAQNHRVKRHDVILKKLGQWLEREGYDVKTEPRIPTNHTFVKPDLLLQKNGRYTMLDLCIPYESDEHALHKAEQFKIGKYQAYEAEVKEYIVSKELATPVGDITFLGTAVGARGGIRTATTKLLGKMGIRGPGIAILTTMGIEGSIKILRTLRVSASG

SEQ ID NO: 1494 - protein, 1186 aa, Homarus americanus
MFNATIEPCPPSVEPSASKAGESRAFSLAVRQKRVLSKQSVSPEEKEGGDCAGGRGPHTRRAGSVVAGAQRDPPPSWERQYLGESTPQSDGALSRGVSLVKDGKPGKPPGPLSPSDTTASVQIEAMDHPNQTSRSQLDASVSRAANEIEYYGCCALVTINCAHCTEVYHNILKYIRHARAKHHRVVTIRCGNCKMAVSKPERCEKHFLECCRNSCPDSFDETLSCTLPSKDRSKTPPRADPKMHQCDVCGRTFLSARGLTQHTRLTHKEMYNKALKPAKRVPYSPQEVALIAEEEVRILLSGRKTTFINQLLLESLPGGSIGLERLKAMRRISKYKTAVQESLANINQQRLHPHPDLGDEDAPNPQNLPQGGNDPNPSDPDDSSSESEEEELDHELEARRRLWEYLRTLSEEEEEANTLISDLNQVLHNIPAPEDLTEGDYGAVLDGLETALRQHRPRLFTGRRQPRRSTTTNNQPREQHLPRKVRKKREYARTQRAYQRNPKELAKKIIDAVEFEGETPTVAEFDSEYRPRFSAPSPPDNLPYTRKNNDNMLNTLLPISKEDILAALRGPETAAGPENPELDSKALQRLGSGVLGRVFNVWLYLARVPPWTKMSRTTMLPKKSPLGNPSNWRPITIGSHFLRVYCKILAHRLSKNADTSISQKAFREVDGCGENLALIEGIIRHARREKRNVYIAFIDVAKAFDTISHSSLNRALRRLDTPQHILGVVQDLYDGLETQICVNGEESETISITRGVKQGCPLSSFLFCSVVDEYLASLGQATGYRFDEHTNVAVTGFADDLVVVSESNLGMRRNLAMLDDFLQARGLAAQPAKCATISLERAAGNRNGVRLRVVTESSFHLRHPDTGEAIPIPSIQPDEYVQYLGLRVGPSGLEKPGRQVNSEKAALVTIMDRIGKCPLKPLQKLKILKQHVIPKLQYKYVKGSSSLNLLRCLDKKINLRVRQWFHLPHTLHTALIGLPLKDGGMGVPSLVESVTHMKMGLLHRLQTSSDPTVRFIAAEGLWGREVTAMARHFGVEHISINTIRQMKKEVKEKKRVEWSRSWQGKGAENFYGKQACNGVLKKDLGPGRKPIDLLRLRSQSISCRVSRAIGRMPSEELTRLTCRRCGEGQEDLMHLLQSCRAAQNHRVKRHDVILKKLGQWLEREEYDVKTEPRIPTNHTFVKPDLL

SEQ ID NO: 1495 - protein, 1212 aa, Ophraella communa
MERVLRNRTIKPLPEERQGTSGAGAGRDSQRTTSGRGLNRWASAGKPEETTPNTINLEDGKEPGHQVPPAPSVSVASQPPTTKAGKPRQRLKWTTEMNEFIMHCYYTITNLETDLTSYRFDLHTQFTQKYPHMTITEQRVADQRRTIVINNLLPQATLNRIKEEVANILHKHTQIDTLTPAQTEDLQGNITTITYDPPEGTTNNNLDTDTLKKLTDLLSTTLIEYTGTDPILRPKIPKIRKTRELIKTINLMNTYILPKHLHDDTTITDLHTLVYAGAVTIATHLSGRPVEQAEHKQTPKHIPAWQKRLENQILEIRRELGRLTQYTKTNTSLKLNKHLHKIFNKIQTHTKHEKHNIHITEYIDTLKQKLTAKSQRLQRYKTCTQRKQQNTLFTMNEKQFYRQLKTDNSHLQNNGAPTQQELEKYWSSLWSQPVEHNSEAVWIRSEEQNTQNIPQMPFGNITPQELTQIINHTHNWKAPGMDGIQNYWYKKFSCLHSALAKNITHIIYNPTDTPTFLTKGITYMQPKSTDTKNPTKYRPITCLPTLYKIITSCITQKIYAHIDQHNIITEQQKGCRRGHMGCKEQLLIDSVILGQASKRHRHLHAAYIDYKKAFDSTPHSWLIHILKIYKINTTLIRFLQNIMQNWRTTVHLSLNNERIITQDIQIRRGIFQGDSLSPLWFCLALNPLSNALNSTNYGFHIKHNKTTHYQLSHLLYMDDIKLYANTSAHLQQLLNITHKFSQDILMEFGIDKCRTLHIEKGCLCSDQFNIESGTIKSMEEGEVYKYLGFQQAKLIEHKHIKQILTAEYTTRIKNILKTKLNAKNTTKAINTYATPILTYSFGVIKWTHTELESLQRSTRTMLTKYNTHHPKSAIERMTLPRTMGGRGLIDITSLHLKQIETLRNFFYTKQHTSPLHKAISLADTTITPLNLHDTNADVETCISNTQTKIQSWAQKPLHGRFPHELDQTYVDKEVSNMWLTSGKLFRETEGFMMAIQDQVIQTRNYRKYIIKDTTLTDDKCRKCHTTQETIQHITSGCKLLAQTDYLKRHNQIANIIHQELAMKYKLIATYTPYYKYTPQSVMENSTHKLYYDRSIITDKTVPHNRPDIVFIDKLQKTTYIIDVAIPNTHNIEKTYDEKISKYTELKYEIKRLWRMDKVVIVPIVLSSTGVIPHTLHQSLRTINIEHHTYTQLQKAAILNTCHIVRKFLDTDT

SEQ ID NO: 1496 - protein, 909 aa, Paramacrobiotus metropolitanus
MRFKTSRDHAATQNTQSAPALTPISCLKELLNGPRPKISSRIPKAAKQLCTQEFLKRVRRCIQKNDTASWCAVLTFSRSALSLPESKALRTDSLSSTIKRNLRLMEESEVNGLLETNNPAKTAKPRPSKRSGKSDDKQRLRTRVAQMFQNGRTKDIIKFLASEESLAEINEETIAALKEKHPPRPADTTLPHLNPSPAVPRVTPTELLEAVFSIPAGSAGGFMGMKPQHLKDMLNHRDAVESELCLALTNLMDIVIGGKVPEEVRPFLFGANLVALKKPSGGIRPIAVGEVLRRVASKIISTRCQEEMGMKFRPVQMGYGTKGGAEAIVHAARSYLEADHKESRVMVKLDFKNAFNMISRRAVLEAVQAEIPTYLPYFHQAYSPVSHLVCQDTVIGSEWGVQQGDPAGPLLFCLAILPLLKSLKSEFKGGFLDDITLAGTKADVMADIKKIEIEGLALGLVLNYGKCEAFFFGGDEEQRAADKHSLVWEWPDIEILECEKLSLLGAPVTIFAVPSFLRSKIDEINRLVEKLKMLPSQQALYLLRNCLSVPKLLYILRTSQTYECPDLLREFDGLMRNTVVSIVNVAVTDTQWLQMCLPVGRGGLGLRRAEELALSAFIASATSVTQVCSEILPGYRISGLQEAVEAWTDRYLCEVPAEGIRKFQKSWDWAVVEMNYSRVRMQAIRSRNEKEMALLLAASEKESAAWVHALPAACLGTVLNDDQVRIAIGLRFGLPVVAEHECRGCGFKVTPDGHHGLACLYNQGRWSQHVELNSILERGCFAAGIPCELEPKGMLRDNGKRPDGATLVPVREGKQLVWDATCADTLAQSYLKGSAKAAGAAARQAENRKRYNYRLLGDQYWFYPFAVETMGVLGEAAKEVVSFFGRLIRKRQARADPRPFLNSASVWPL

SEQ ID NO: 1497 - protein, 956 aa, Paramacrobiotus metropolitanus
MATSGPPQLRRKKDGSLDMRFKASKDHVASQDAQTAPKQPPPVTGLQELLTGPRVKISARIPKAAKHLCTAEFLKRVRRCVQQNDVASWCAVLNFSRFALALPDSKALRKDSLSTIVKKNLQAMEEGITDATHANSRSTHKAPQRNKGKRIDDTEHLRKRVAQMFQNGRTKDIVKFLSSEETIAQMNDETVAALKDKHPKRPTDEIFPTLAAAPTAIPRVSPAELMDAVFSMPAGSAGGFTGMKPQHLKDMLNRRDDVESELCLAMTRLIDIVLTGKVPTEVRPFLFGAKLIPLKKPTGGIRPIAVGEVLRRIASKIVSARCQEQLGALLSPIQLGYGTKGGAEAIVHAARSYLETDHGGTRVMVKLDFKNAFNMISRSAVLEAVQSVIPVYHPYFDQSYAPVSHLACQEAVIASESGVQQGDPGGPLAYCLGTFPLLCKLRSQFKAGFLDDVTLAGLIEEVMADIRTIEEEGKKIGLELNYSKCEAFIFGGNEEERAAAKHRLVWEWPDFEILETENLTLLGAPVSIVAVPSFLRNKVQQIDRLVERLKLLPSQQALYLLRNCLSVPKLMHTLRSSQCYEHPEVLREFDSLMRGAVTSVVNAHIDDKNWMQMTLPVGRGGLGIRRAEELALSAFIASASSVFPVCQEMLQVNRISGLDQAIEKWVKTYQCEVPLEHVRKYQKSWDWPVVERTYSQLRLQTMASGKPQDMAALLAASEESAAWLHALPAACLGTIVNDEQVRVAVGLRFGLPIVAPHECAGCGFQVTSDGHHGLSCLYSKGRWSQHTELNGILERGCVAAGIPCELEPRGLSRDNGKRPDGLTLVPVREGKQLVWDATFADTLAQSYLKRSAKAAGAAAHQAECRKRYNYRDLGDQFWFYPFAVETLGVLGEAAREMVSFFGRKIKERTGEGRSTAFLKQRISLAIIKGNAAAVLGTLPGKNKVVDNSDFGCFFNS

SEQ ID NO: 1498 - protein, 904 aa, Tomocerus vulgaris
MDTTANSINGKQSQNTEINCTHCGKTCKGTKGLKIHESKAHKDKHLQTILLKYANKDKPTETEDNNDKINESDDNNVTSTNDSFSKIKNSQILNANASLKVERRFLDDIIDKFDSFAFNEHVDNIINILKKANNHLPGPKHPATKYYEARKQASQFKFREVGYAKSTNPIRCSNRARTKRLEKYNQKVMQHLYYNQRKKCVNKLINDSNNVCNIPMDILHSSFNDRWSNANNNVRPCYNQIPNEVQEEIDTDFDTEIYKEEIIQAIGKIRSDSSGGPDNIYPRCLKLTDCSEVLAKIATIMLKYDYVPSALREAYTVLIYKQKGDRNLPENWRPISVCSVIRRVIEKALETRIRMWIRFNPRQKGFIHEPGCHINTSILNGCLQKAKKEKSSLVVTFLDIYQAYDNVGHRHVKNALNEIPMPTSLRNIAVSLQTQNYTRLKVKNGASSPINFKRGLFQGSPLSPVLFNVAIDYVINILSDYEIAEQYGFSVDKSLQNLSVLSFVDDTAPLSKSRIDARELFQIAENAFTETGMKISPKKSTAIIIENGELSENDLVISADVSIHAIKANEQVKYLGVTYQDKQVFDEAKVLGKIKGSLEKLVASHMLYPDQKLNIVNQYLWPVMVYPFQTCPLSKLKNSFLQDVNLMVRTAVKTILGVPDDIPTSMLYSPRKWKGLELPNGQWEAFIQQYNICVTLMRQSDPYVSVCRDLEKEKNTCLKKLNITEDEIITAQIEAKRKAKKTKTSKIMRNILREREFSKWSELKSKGKGVILYNETPYSNFWLTNRKGLTSSEWTSAIKMLGCVAAVNAVPGRNFNTNRCRYPTCDEIETIGHVLGFCPKTELQRNNRHHAVRSIIADAFREKKYKVFEEVHCNSNIGSHRRVDILAIQGDTGYIIDPTIRIET

SEQ ID NO: 1499 - protein, 948 aa, Tomocerus minor
MDTTANSINGKQSQNTEINCTHCGKTCKGTKGLKIHESKAHKDKHLQTILLKYANKDKPTETEDNNDKINESDDNNVTSTNDSFSKIKNSQILNANASLKVERRFLDDIIDKFDSFAFNEHVDNIINILKKANNHLPGPKHPATKYYEARKQASQFKFREVGYAKSTNPIRCSNRARTKRLEKYNQKVMQHLYYNQRKKCVNKLINDSNNVCNIPMDILHSSFNDRWSNANNNVRPCYNQIPNEVQEEIDTDFDTEIYKEEIIQAIGKIRSDSSAGPDNIYPRCLKLTDCSEVLAKIATIMLKYDYVPSALREAYTVLIYKQKGDRNLPENWRPISVCSVIRRVIEKALETRIRMWIRFNPRQKGFIHEPGCHINTSILNGCLQKAKKEKSSLVVTFLDIYQAYDNVGHRHVKNALNEIPMPTSLRNIAVSLQTQNYTRLKVKNGASSPINFKRGLFQGSPLSPVLFNVAIDYVINILSDYEIAEQYGFSVDKSLQNLSVLSFVDDTAPLSKSRIDARELFQIAENAFTETGMKISPKKSTAIIIENGELSENDLVISADVSIHAIKANEQVKYLGVTYQDKQVFDEAKVLGKIKGSLEKLVASHMLYPDQKLNIVNQYLWPVMVYPFQTCPLSKLKNSFLQDVNLMVRTAVKTILGVPDDIPTSMLYSPRKWKGLELPNGQWEAFIQQYNICVTLMRQSDPYVSVCRDLEKEKNTCLKKLNITEDEIITAQIEAKRKAKKTKTSKIMRNILREREFLKWSELKSKGKGVILYNETPYSNFWLTNRKGLTSSEWTSAIKMLGCVAAVNAVPGRNFNTNRCRYPTCDEIETIGHVLGFCPKTELQRNNRHHAVRSIIADAFREKKYKVFEEVHCNSNIGSHRRVDILAIQGDTGYIIDPTIRIETSQSQPADVDLEKKQIYEPCSDFFRQNYHINNVEVIGLMIGIYPC

SEQ ID NO: 1500 - protein, 1924 aa, Amphibalanus amphitrite
MSDETLISPEDGRATMGGSTPRCCKCVSNPCRTCRCVKLGRRCATCRFGDNCPNSVPKLTQLCDIATEIATLKQNSRVLPHIPKGARIAVADELAHLINDAVEQGTEEAWRRLTCFGYSTLSINREARTAEKTSLATQVRLNLSQNSDTNKVRPSKPSKRSHAHRPVGEMTAMSRRVASKLTDGDTRGALRALTSDDSFASPTEEVIKRMQEKHPEPPTDLRNVPLPDDIHVPLVASEADVLKAINSFPPSSSAGLDGIRPAHLRSLLTKHTAEAGARLLTALTALTNLALSGRLPECATPAFFGASLIALRKKDGGLRPIAVGSEYRRIAGKVAATAVSAAIGAQLRPVQLGVATRNGCEAAVYATRAYIDECEASENSRVIVKLDISNAFNTVRRDAMLEAVKSRAPEIYPFVWQGYNNAAPLFIGDSKILSQTGVQQGDPLSSLLFSLTVDSATRAPDTEINTWYLDDGTLAGPPSDVISSIKQVKAEMSEVGLAINAGKCEVTFLGGFTDDTKLSALHMLQSVLPDIREVPVDELELLGAPVHDAQTRRALLQGQLLVEKLIKRLQALDEAHQAFFLLKNYVSLPRLLYLLRSSPAYRHPALLNRIDEAVRRGMEVITNVQLRDISWRQATLPISLGGLGVRRVTDVALPAHLASQVASADTIASINGSAANRVSELTRCLISEWERRTGLPPPEAHRRRYQREWDRAETARISERLLEDSKTDVDRARLRAAAQPHSGAWLNAFPAASVGTLLDPDTLRTAVALRVGADICAPHRCRCGADFDERGLHCLCCQMSAGRFPRHAELNSVIKRGLSTAGMTSVLEPAGLDRGDGRRPDGMTTFPYAEGKCLVWDATCVDTFSVSSVKASAARASSAATVAERRKRHRYADISRRYLFRPVAVETSGALGPDSYSFLKELGRRIVKTTGDRRDFERLMQRVSVAVVRGNATAVRLASVNVRPSHRANIEPKSLPWPPTNSTGTEAKLPPELPTTTSPTTRPAEQEILDPLNMGLPNNGISMCQHVGKSVSLADIKRQLKSNRRIGACDKKVPTPCTAPADGEERSVPSGAQLPHGVWLCMQCGHQGCARHATQHFNTPRSDSHTLAVNAAADWGVWCFTCNEKVSLKSNKKLHEAVQFVKKRQGTLRPGATPSKEDTPPPKSSKGASAKEKQAQADCDNESLPKVKGLINLGNSCYLNSVLQCLSQCHYLTHYLDISSRPGRKVTVSADGETMELVLPEGGPITASLCDFLKKMHITGTGSTVSPSHLLRKIALKVPQFVGCDQQDAHELLRALMEQARLEDLRRHQKQILLGLGLPAKADPKEVPDDMKARAKALGHQVSHTTIDSIFSGQLVSLVVCQACMACTHRMEPFLDLSLPAAEDIIFSLLSELDPPPASVSGDSTEDELNEPPASVSPDPPADEPPASVSPDPPADEPPASVSPDPPADLAAEELSERLSALIVDSAGAAAAADSCGDEPGPLTVNGRPSSPVEADAAPAGLVPLVGESADKAPNGAPETAGADQVGEKQSSVPAENCGEAVEAHENSLGAPNGHCGRAAEEAPREGQSPSPGEVPGGVPTEAVANGQSSTTGVADGGELQSAPNGGTCAPTESAPAEGTGTPSPAAEPSDGPPPPLSRCEWLSRALTTLAPRYQAAAGECSLLTCLNQYTAPELLTGNNKLGCDNCTELRNKRLTAAEKAAEKKLGTVYSNASKQLLIYSPPPVLTIHLKRFEVCSFSLRKMNRHVQFGERLDLAPFCSSISQDLPQMRAGQRRVLYSLFGVVEHSGRLTSGHYTAYVRVRRRHDQLTVNPARLTTLVTDAFAVACERARQRAEQTRPETTDGPSPVRPAEEGREDGEGEDPAAAPQESQTDQKQPAPEPETEPEPQPEAGRWFYVSDTHVTEVTLDKVLKAQAYMLFYERIV

SEQ ID NO: 1501 - protein, 1924 aa, Amphibalanus amphitrite
MSDETLISPEDGRATMGGSTPRCCKCVSNPCRTCRCVKLGRRCATCRFGDNCPNSVPKLTQLCDIATEIATLKQNGRVLPHIPKGARIAVADELAHLINDAVEQGTEEAWRRLTCFGYSTLSINREARTAEKTSLATQVRLNLSQNSDTNKVRPSKPSKRSHAHRPVGEMTAMSRRVASKLTDGDTRGALRALTSDDSFASPTEEVIKRMQEKHPEPPTDLRNVPPPDDIHVPLVASEADVLKAINSFPPSSSAGLDGIRPAHLRSLLTKHTAEAGARLLTALTALTNLALSGRLPECATPAFFGASLIALRKKDGGLRPIAVGSVYRRIAGKVAATAVSAAIGAQLRPVQLGVATRNGCEAAVHATRAYIDECEASENSRVIVKLDISNAFNTVRRDAMLEAVKTRAPEIYPFVWQGYNNAAPLFIGDSKILSQTGVQQGDPLSSLLFSLTVDSATRAPDTEINTWYLDDGTLAGPPSDVISSIKQVKAEMSEVGLAINAGKCEVTFLGGFTDDTKLSALRMLQSVLPDIREVPVDELELLGAPVHDAQTRRALLQGQLLVEKLIKRLQALDEAHQAFFLLKNYVSLPRLLYLLRSSPAYRHPALLNRIDEAVRRGTEVITNVQLRDISWRQATLPISLGGLGVRRVTDVALPAHLASQVASADTIASINGSAANRVSELTRCLISEWERRTGLPPPEAHRRRYQREWDRAETARISERLLEDSKTDVDRARLRAAAQPHSGAWLNAFPAASVGTLLDPDTLRTAVALRVGADICAPHRCRCGADIDERGLHCLCCQMSAGRFPRHAELNSVIKRGLSTAGMTSVLEPAGLDRGDGRRPDGMTTFPYAEGKCLVWDATCVDTFSASSVKASAARASSAATVAERRKRHRYADISRRYLFRPVAVETSGALGPDSYSFLKELGRRIVKTTGDRRDFERLMQRVSVAVVRGNATAVRLASVNVRPSHRANIEPKSLPWPPTNSTGTEAKLPPELPTTTSPTTRPTEQEILDPLNMGLPNNGISMCQHVGKSVSLADIKRQLKSNRRIGACNKKGPTPCTAPADGEERSVPSGAQLPHGVWLCMQCGHQGCARHATQHFNTPRSDSHTLAVNAAADWGVWCFTCNEKVSLKSNKKLHEAVQFVKKKQGTLRPGATPSKEDTPPPKSSKGASAKEKQAQADCDNESLPKVKGLINLGNSCYLNSVLQCLSQCHYLTHYLDISSRPGRKVTVSADGETMELVLPEGGPITASLCDFLKKMHITGTGSTVSPSHLLRKIALKVPQFVGCDQQDAHELLRALMEQARLEDLRRHQKQILLGLGLPAKADPKEVPDDMKARAKALGHQVSHTTIDSIFSGQLVSLVVCQACMACTHRMEPFLDLSLPAAEDIIFSLLSELDPPPASVSGDSTEDELNEPPASVSPDPPADEPPASVSPDPPADEPPASVSPDPPADLAAEELSERLSALIVDSAGAAAAADSCGDEPGPLTVNGRPSSPVEADAAPAGLVPLVGESADKAPNGAPETAGADQVGEKQSSVPAENCGEAVEARENSLGAPNGHCGRAAEEAPREGQSPSPGEVPGGVPTEAVANGQSSTAGVADGGELQSAPNGGTCAPTESAPAEGTGTPSPAADPSDGPPPPLSRCEWLSRALTTLAPRYQAAAGECSLLTCLNQYTAPELLTGNNKLGCDNCTELRNKRLTAAEKAAEKKLGTVYSNASKQLLIYSPPPVLTIHLKRFEVCSFSLRKVNRHVQFGERLDLAPFCSSISQDLPQMRAGQRRVLYSLFGVVEHSGRLTSGHYTAYVRVRRRHDQLTVNPARLTTLVTDAFAVACERARQRAEQTRPETTDGPSPVRPAEEGREDGEGEDPAAAPQESQTDQKQPAPEPETEPEPQPEAGRWFYVSDTHVTEVTLDKVLKAQAYMLFYERIV

SEQ ID NO: 1502 - protein, 1903 aa, Amphibalanus amphitrite
MSDETLISPEDGRATMGGSTPRCCKCVSNPCRTCRCVKLGRRCATCRFGDNCPNSVPKLTQLCDIATEIATLKQNSRVLPHIPKGARIAVADELAHLINDAVEQGTEEAWRRLTCFGYSTLSINREARTAEKTSLATQVRLNLSQNSDTNKVRPSKPSKRSHAHRPVGEMTAMSRRVASKLTDGDTRGALRALTSDDSFASPTEEVIKRMQEKHPEPPTDLRNVPPPDDIHVPLVASEADVLKAINSFPPSSSAGLDGIRPAHLRSLLTKHTAEAGARLLTALTALTNLALSGRLPECATPAFFGASLIALRKKDGGLRPIAVGSVYRRIAGKVAATAVSAAIGAQLRPVQLGVATRNGCEAAVHATRAYIDECEASENSRVIVKLDISNAFNTVRRDAMLEAVKTRAPEIYPFVWQGYNNAAPLFIGDSKILSQTGVQQGDPLSSLLFSLTVDSATRAPDTEINTWYLDDGTLAGPPSDVISSIKQVKAEMSEVGLAINAGKCEVTFLGGFTDDTKLSALHMLQSVLPDIREVPVDELELLGAPVHDAQTRRALLQGQLLVEKLIKRLQALDEAHQAFFLLKNYVSLPRLLYLLRSSPAYRHPALLNRIDEAVRRGMEVITNVQLRDISWRQATLPISLGGLGVRRVTDVALPAHLASQVASADTIASINGSAANRVSELTRCLISEWERRTGLPPPEAHRRRYQREWDRAETARISERLLEDSKTDVDRARLRAAAQPHSGAWLNAFPAASVGTLLDPDTLRTAVALRVGADICAPHRCRCGADIDERGLHCLCCQMSAGRFPRHAELNSVIKRGLSTAGMTSVLEPAGLDRGDGRRPDGMTTFPYAEGKCLVWDATCVDTFSASSVKASAARASSAATVAERRKRHRYADISRRYLFRPVAVETSGALGPDSYSFLKELGRRIVKTTGDRRDFERLMQRVSVAVVRGNATAVRLASVNVRPSHRANIEPKSLPWPPTNSTGTEAKLPPELPTTTSPTTRPAEQEILDPLNMGLPNNGISMCQHVGKSVSLADIKRQLKSNRRIGACDKKVPTPCTAPADGEERSVPSGAQLPHGVWLCMQCGHQGCASHATQHFNTPRSDSHTLAVNAAADWGVWCFTCNEKVSLKSNKELHEAMQFVKKKQGTLRPGATPSKEDTPPPKSSKGASAKEKQAQADCDNESLPKVKGLINLGNSCYLNSVLQCLSQCHYLTHYLDISSRPGRKVTVSADGETMELVLPEGGPITASLCDFLKKMHITGTGSTVSPSHLLRKIALKVPQFVGCDQQDAHELLRALMEQARLEDLRRHQKQILLGLGLPAKADPKEVPDDMKARAKALGHQVSHTTIDSIFSGQLVSLVVCQACMACTHRMEPFLDLSLPAAVDIIFSLLSELDPPPASVSGDSTEDELNEPPASVSPDPPADEPPASVSPDPPADEPPASVSPDPPADLAAEELSERLSALIVDSAGAAAAADSCGDEPGPLTVNGRPLSPVEADAAPAGLLPLVGESADKAPNGAPETAGADLVGEKQSSVPAENCGEAVEARENSLGAPNGQCGRAAEEAPREGQSPSPGEVPGGVPTEAVANGQSSTAGVADGGELQSAPNGGTCAPTESAPAEATGTPSPAADPSDGPPPPLSRCEWLSRALTTLAPRYQAAAGECSLLTCLNQYTAPELLTGNNKLGCDNCTELRNKRLTAAEKAAEKKLGTVYSNASKQLLIYSPPPVLTIHLKRFEVCSFSLRKVNRHVQFGERLDLAPFCSSISQDLPQMRAGQRRVLYSLFGVVEHSGRLTSGHYTAYVRVRRRHDQLTVNPARLTTLVTDAFAVACERARQRAEQTLPETTDGPSPVRPAEEGREDGEGEDPAAAPQESQTDQKQPAPEPETEPEPHPEAGRWFYVTRTSQR

SEQ ID NO: 1503 - protein, 1924 aa, Amphibalanus amphitrite
MSDETLISPEDGRATMGGSTPRCCKCVSNPCRTCRCVKLGRRCATCRFGDNCPNSVPKLTQLCDIATEIATLKQNSRVLPHIPKGARIAVADELAHLINDAVEQGTEEAWRRLTCFGYSTLSINREARTAEKTSLATQVRLNLSQNSDTNKVRPSKPSKRSHAHRPVGEMTAMSRRVASKLTDGDTRGALRALTSDDSFASPTEEVIKRMQEKHPEPPTDLRNVPPPDDIHVPLVASEADVLKAINSFPPSSSAGLDGIRPAHLRSLLTKHTAEAGARLLTALTALTNLALSGRLPECATPAFFGASLIALRKKDGGLRPIAVGSVYRRIAGKVAATAVSAAIGAQLRPVQLGVATRNGCEAAVHATRAYIDECEASENSRVIVKLDISNAFNTVRRDAMLEAVKTRAPEIYPFVWQGYNNAAPLFIGDSKILSQTGVQQGDPLSSLLFSLTVDSATRAPDTEINTWYLDDGTLAGPPSDVISSIKQVKAEMSEVGLAINAGKCEVTFLGGFTDDTKLSALHMLQSVLPDIREVPVDELELLGAPVHDAQTRRALLQGQLLVEKLIKRLQALDEAHQAFFLLKNYVSLPRLLYLLRSSPAYRHPALLNRIDEAVRRGMEVITNVQLRDISWRQATLPISLGGLGVRRVTDVALPAHLASQVASADTIASINGSAANRVSELTRCLISEWERRTGLPPPEAHRRRYQREWDRAETARISERLLEDSKTDVDRARLRAAAQPHSGAWLNAFPAASVGTLLDPDTLRTAVALRVGADICAPHRCRCGADIDERGLHCLCCQMSAGRFPRHAELNSVIKRGLSTAGMTSVLEPAGLDRGDGRRPDGMTTFPYAEGKCLVWDATCVDTFSASSVKASAARASSAATVAERRKRHRYADISRRYLFRPVAVETSGALGPDSYSFLKELGRRIVKTTGDRRDFERLMQRVSVAVVRGNATAVRLASVNVRPSHRANIEPKSLPWPPTNSTGTEAKLPPELPTTTSPTTRPAEQEILDPLNMGLPNNGISMCQHVGKSVSLADIKRQLKSNRRIGACDKKGPTPCTAPADGEERSVPSGAQLPHGVWLCMQCGHQGCARHATQHFNTPRSDSHTLAVNAAADWGVWCFTCNEKVSLKSNKKLHEAVQFVKKKQGTLRPGATPSKEDTPPPKSSKGASAKEKQAQADCDNESLPKVKGLINLGNSCYLNSVLQCLSQCHYLTHYLDISSRPGRKVTVSADGETMELVLPEGGPITASLCDFLKKMHITGTGSTVSPSHLLRKIALKVPQFVGCDQQDAHELLRALMEQARLEDLRRHQKQILLGLGLPAKADPKEVPDDMKARAKALGHQVSHTTIDSIFSGQLVSLVVCQACMACTHRMEPFLDLSLPAAEDIIFSLLSELDPPPASVSGDSTEDELNEPPASVSPDPPADEPPASVSPDPPADEPPASVSPDPPADLAAEELSERLSALIVDSAGPAAAADSCGDEPGPLTVNGRPSSPVEADAAPAGLVPLVGESADKAPNGAPETAGADQVGEKQSSVPAENCGEAVEARENSLGAPNGHCGRAAEEAPREGQSPSPGEVQGGVPTEAVANGQSSTAGVADGGELQSAPNGGTCAPTESAPAEGTGTPSPAADPSDGPPPPLSRCEWLSRALTTLAPRYQAAAGECSLLTCLNQYTAPELLTGNNKFGCDNCTELRNKRLTAAEKAAEKKLGTVYSNASKQLLIYSPPPVLTIHLKRFEVCSFSLRKVNRHVQFGERLDLAPFCSSISQDLPQMRAGQRRVLYSLFGVVEHSGRLTSGHYTAYVRVRRRHDQLTVNPARLTTLVTDAFAVACERARQRAEQTRPETTDGPSPVRPAEEGREDGEGEDPAAAPQESQTDQKQPAPEPETEPEPQPEAGRWFYVSDTHVTEVTLDKVLKAQAYMLFYERIV

SEQ ID NO: 1504 - protein, 1924 aa, Amphibalanus amphitrite
MSDETLISPEDGRATMGGSTPRCCKCVSNPCRTCRCVKLGRRCATCRFGDNCPNSVPKLTQLCDIATEIATLKQNSRVLPHIPKGARIAVADELAHLINDAVEQGTEEAWRRLTCFGYSTLSINREARTAEQTSLATQVRLNLSQNSDTNKVRPSKPSKRSHAHRPVGEMTAMSRRVASKLTDGDTRGALRALTSDDSFASPTEEVIKRMQEKHPEPPTDLRNVPPPDDIHVPLVASEVDVLKAINSFPPSSSAGLDGIRPAHLRSLLTKHTAEAGARLLTALTALTNLALSGRLPECATPAFFGASLIALRKKDGGLRPIAVGSVYRRIAGKVAATAVSAAIGAQLRPVQLGVATRNGCEAAVHATRAYIDECEASENSRVIVKLDISNAFNTVRRDAMLEAVKTRAPEIYPFVWQGYNNAAPLFIGDSKILSQTGVQQGDPLSSLLFSLTVDSATRAPDTEINTWYLDDGTLAGPPSDVISSIKQVKAEMSEVGLAINAGKCEVTFLGGFTDDTKLSALHMLQSVLPDIREVPVDELELLGAPVHDAQTRRALLQGQLLVEKLIKRLQALDEAHQAFFLLKNYVSLPRLLYLLRSSPAYRHPALLNRIDEAVRRGMEVITNVQLRDISWRQATLPISLGGLGVRRVTDVALPAHLASQVASADTIASINGSAANRVSELTRCLISEWERRTGLPPPEAHRRRYQREWDRAETARISERLLEDSKTDVDRARLRAAAQPHSGAWLNAFPAASVGTLLDPDTLRTAVALRVGADICAPHRCRCGADIDERGLHCLCCQMSAGRFPRHAELNSVIKRGLSTAGMTSVLEPAGLDRGDGRRPDGMTTFPYAEGKCLVWDATCVDTFSASSVKASAARASSAATVAERRKRHRYADISRRYLFRPVAVETSGALGPDSYSFLKELGRRIVKTTGDRRDFERLMQRVSVAVVRGNATAVRLASVNVRPSHRANIEPKSLPWPPTNSTGTEAKLPPELPTTTSPTTRPAEQEILDPLNMGLPNNGISMCQHVGKSVSLADIKRQLKSNRRIGACDKKGPTPCTAPADGEERSVPSGAQLPHGVWLCMQCGHQGCARHATQHFNTPRSDSHTLAVNAAADWGVWCFTCNEKVSLKSNKKLHEAVQFVKKKQGTLRPGATPSKEDTPPPKSSKGASAKEKQAQADCDNESLPKVKGLINLGNSCYLNSVLQCLSQCHYLTHYLDISSRPGRKVTVSADGETMELVLPEGGPITASLCDFLKKMHITGTGSTVSPSHLLRKIALKVPQFVGCDQQDAHELLRALMEQARLEDLRRHQKQILLGLGLPAKADPKEVPDDMKARAKALGHQVSHTTIDSIFSGQLVSLVVCQACMACTHRMEPFLDLSLPAAEDIIFSLLSELDPPPASVSGDSTEDELNESPASVSPDPPADEPPASVSPDPPADEPPASVSPDPPADLAAEELSERLSALIVDSAGAAAAADSCGDEPGPLTVNGRPSSPVEADAAPAGLVPLVGESADKAPNGAPETAGADQVGEKQSSVPAENCGEAVEARENSLGAPNGHCGRAAEEAPREGQSPSPGEVPGGVPTEAVANGQSSTAGVADGGELQSAPNGGTCAPTESAPAEGTGTPSPAADPSDGPPPPLSRCEWLSRALTTLAPRYQAAAGECSLLTCLNQYTAPELLTGNNKLGCDNCTELRNKRLTAAEKAAEKKLGTVYSNASKQLLIYSPPPVLTIHLKRFEVCSFSLRKVNRHVQFGERLDLAPFCSSISQDLPQMRAGQRRVLYSLFGVVEHSGRLTSGHYTAYVRVRRRHDQLTVNPARLTTLVTDAFAVACERARQRAEQTRPETTDGPSPVRPAEEGREDGEGEDPAAAPQESQTDQKQPAPEPETEPEPQPEAGRWFYVSDTHVTEVTLDKVLKAQAYMLFYERIV

SEQ ID NO: 1505 - protein, 1924 aa, Amphibalanus amphitrite
MSDETLISPEDGRATMGGSTPRCCKCVSNPCRTCRCVKLGRRCATCRFGDNCPNSVPKLTQLCDIATEIATLKQNSRVLPHIPKGARIAVADELAHLINDAVEQGTEEAWRRLTCFGYSTLSINREARTAEKTSLATQVRLNLSQNSDTNKVRPSKPSKRSHAHRPVGEMTAMSRRVASKLTDGDTRGALRALTSDDSFASPTEEVIKRMQEKHPEPPTDLRNVPLPDDIHVPLVASEADVLKAINSFPPSSSAGLDGIRPAHLRSLLTKHTAEAGARLLTALTALTNLALSGRLPECATPAFFGASLIALRKKDGGLRPIAVGSVYRRIAGKVAATAVSAAIGAQLRPVQLGVATRNGCEAAVHATRAYIDECEASENSRVIVKLDISNAFNTVRRDAMLEAVKSRAPEIYPFVWQGYNNAAPLFIGDSKILSQTGVQQGDPLSSLLFSLTVDSATRAPDTEINTWYLDDGTLAGPPSDVISSIKQVKAEMSEVGLAINAGKCEVTFLGGFTDDTKLSALHMLQSVLPDIREVPVDELELLGAPVHDAQTRRALLQGQLLVEKLIKRLQALDEAHQAFFLLKNYVSLPRLLYLLRSSPAYRHPALLNRIDEAVRRGMEVITNVQLRDISWRQATLPISLGGLGVRRVTDVALPAHLASQVASADTIASINGSAANRVSELTRCLISEWERRTGLPPPEAHRRRYQREWDRAETARISERLLEDSKTDVDRARLRAAAQPHSGAWLNAFPAASVGTLLDPDTLRTAVALRVGADICAPHRCRCGADIDERGLHCLCCQMSAGRFPRHAELNSVIKRGLSTAGMTSVLEPAGLDRGDGRRPDGMTTFPYAEGKCLVWDATCVDTFSASSVKASAARASSAATVAERRKRHRYADISRRYLFRPVAVETSGALGPDSYSFLKELGRRIVKTTGDRRDFERLMQRVSVAVVRGNATAVRLASVNVRPSHRANIEPKSLPWPPTNSTGTEAKLPPELPTTTSPTTRPAEQEILDPLNMGLPNNGISMCQHVGKSVSLADIKRQLKSNRRIGACDKKVPTPCTAPADGEERSVPSGAQLPHGVWLCMQCGHQGCARHATQHFNTPRSDSHTLAVNAAADWGVWCFTCNEKVSLKSNKKLHEAVQFVKKKQGTLRPGATPSKEDTPPPKSSKGASAKEKQAQADCDNESLPKVKGLINLGNSCYLNSVLQCLSQCHYLTHYLDISSRPGRKVTVSADGETMELVLPEGGPITASLCDFLKKMHITGTGSTVSPSHLLRKIALKVPQFVGCDQQDAHELLRALMEQARLEDLRRHQKQILLGLGLPAKADPKEVPDDMKARAKALGHQVSHTTIDSIFSGQLVSLVVCQACMACTHRMEPFLDLSLPAAEDIIFSLLSELDPPPASVSGDSTEDELNEPPASVSPDPPADEPPASVSPDPPADEPPASVSPDPPADLAAEELSERLSALIVDSAGAAAAADSCGDEPGPLTVNGRPSSPVEADAAPAGLVPLVGESADKAPNGAPETAGADQVGEKQSSVPAENCGEAVEAHENSLGAPNGHCGRAAEEAPREGQSPSPGEVPGGVPTEAVANGQSSTTGVADGGELQSAPNGGTCAPTESAPAEGTGTPSPAADPSDGPPPPLSRCEWLSRALTTLAPRYQAAAGECSLLTCLNQYTAPELLIGNNKLGCDNCTELRNKRLTAAEKAAEKKLGTVYSNASKQLLIYSPPPVLTIHLKRFEVCSFSLRKVNRHVQFGERLDLAPFCSSISQDLPQMRAGQRRVLYSLFGVVEHSGRLTSGHYTAYVRVRRRHDQLTVNPARLTTLVTDAFAVACERARQRAEQTRPETTDGPSPVRPAEEGREDGEGEDPAAAPQESQTDQKQPAPEPETEPEPQPEAGRWFYVSDTHVTEVTLDKVLKAQAYMLFYERIV

SEQ ID NO: 1506 - protein, 1911 aa, Amphibalanus amphitrite
MSDETLISPEDGRATMGGSTPRCCKCVSNPCRTCRCVKLGRRCATCRFGDNCPNSVPKLTQLCDIATEIATLKQNSRVLPHIPKGARIAVADELAHLINDAVEQGTEEAWRRLTCFGYSTLSINREARTADKTSLATQVRLNLSQKSDTNKVRPSKPSKRSHAHRPVGEMTAMSRRVASKLTDGDTRGALRALTSDDSFASPTEEVIKRMQEKHPEPPTDLRNVPPPDDIHVPLVASEADVLKAINSFPPSSSAGLDGIRPAHLRSLLTKHTAEAGARLLTALTALTNLALSGRLPECATPAFFGASLIALRKKDGGLRPIAVGSVYRRITGKVAATAVSAAIGAQLRPVQLGVATRNGCEAAVHATRAYIDECEASENSRVIVKLDISNAFNTVRRDAMLEAVKTRAPEIYPFVWQGYNNAAPLFIGDSKILSQTGVQQGDPLSSLLFSLTVDSATRAPDTEINTWYLDDGTLAGPPSDVISSIKQVKAEMSEVGLAINAGKCEVTFLGGFTDDTKLSALHMLQSVLPDIREVPVDELELLGAPVHDAQTRRALLQGQLLVEKLIKRLQALDEAHQAFFLLKNYVSLPRLLYLLRSSPAYRHPALLNRIDEAVRRGMEVITNVQLRDISWRQATLPISLGGLGVRRVTDVALPAHLASQIASADTIASINGSAANRVSELTRCLISEWERRTGLPPPEAHRRRYQREWDRAETARISERLLEDSKTDVDRARLRAAAQPHSGAWLNAFPAASVGTLLDPDTLRTAVALRVGADICAPHRCRCGADIDERGLHCLCCQMSAGRFPRHAELNSVIKRGLSTAGMTSVLEPAGLDRGDGRRPDGMTTFPYAEGKCLVWDATCVDTFSASSVKASAARASSAATVAERRKRHRYADISRRYLFRPVAVETSGALGPDSYSFLKELGRRIVKTTGDRRDFERLMQRVSVAVVRGNATAVRLASVNVRPSHRANIEPKALPWPPTNSTGTEAKLPPELPTTTSPTTRPAEQEILDPLNMGLPNNGISMCQHVGKSVSLVDIKRQLKSNRRIGACDKKVPTPCTAPADGEERPVPSGAQLPHGVWLCMQCGHQGCARHATQHFNTPRSDSHTLAVNAAADWGVWCFTCNEKVSLKSNKKLHEAVQFVKKKQGTLRPGATPSKEDTPPPKSSKGASAKEKQAQADCDNESLPKVKGLINLGNSCYLNSVLQCLSQCHYLTHYLDISSRPGRKVTVSADGETMELVLPEGGPITASLCDFLKKMHITGTGSTVSPSHLLRKIALKVPQFVGCNQQDAHELLRALMEQARLEDLGRHQKQILLGLGLPAKADPKEVPDDMKARAKALGHQVSHTTIDSIFSGQLVSLVVCQACMACTHRMEPFLDLSLPAAEDIIFSLLSELDPPPASVSGDSTEDELNEPPASVSPDPPADEPPASVSPDPPADLAAEEPSERLSALIVDSAGAAAAADSCGDEPGPLTVYGRPSSPVEADSAPAGLVPLVGESADKAPNGAPETAGADQVGEKQSSVPAENCGEAVEARENSLGAPNGHCGRAAEEAPREGQSPSPGEVPGGVPTEAVANGQSSTAGVADGGELQSAPNGGTCAPTESAPAEGTGTPSPAADPSDGPPPPLSRCEWLSRALTTLAPRYQAAAGECSLLTCLNQYTAPELLTGNNKLGCDNCTELRNKRLTAAEKAAEKKLGTVYSNASKQLLIYSPPPVLTIHLKRFEVCSFSLRKVNRHVQFGERLDLAPFCSSISQDLPQMRAGQRRVLYSLFGVVEHSGRLTSGHYTAYVRVRRRHDQLTVNPARLTTLVTDAFAVACERARQRAEQTRPETTDGPSPVRPAEEGREDGEGEDPAAAPQESQTDQKQPAPEPEAEPEPQPEAGRWFYVSDTHVTEVTLDKVLKAQAYMLFYERIV

SEQ ID NO: 1507 - protein, 1073 aa, Platygyra sinensis
MRVTSTVIIGHAPARAVSTGFGPEAKTSQAAGANHSCSLIIRLLKGKMKYGGGRRCPTDDLPGGGAATDAGPFHSCPECLRTFGTVRGLSQHRRRAHPQENHAQNVPAAKLKARWDHEELLILTIRLSGVRNVNQQLARITPGRTLEAIKGVRKSTKYRELLASLEQQEADGSEFVERNPSDPDDDEGAPVDIPDDPIQAPPDESVEWAGQVRNAIYHLGVPDGIDLDAISPGNPNDDTRAMLDAEYAWWLPPLAGSSRQRPPGQRPGAPRVRTGQPGRSARAKRRAAYSRTQRLFKISRKRCARNVLSGTWEEEPSPVPMALQEPYWRSVFKAASKHDNRRPPPKGPVEWSLVAPITVEDVTRAIKGMSDGAPGSDGRTLNDLKRLRREEVAAHYNLWLLAGYPPDKIRRGRTVLIPKESGADSPEKHRPITISDIILRCFHKVLASRFEATLPWNTRQKAFMKGDGVADSIWLLQTVIRHHQRTVQPLNIAFLDIKKAFDSVSHESLLLAAKRMGVPTPMLGYPGELYRDAWTTLHIGSASSEPIRVLRGFRQGDPLSVHLFNATIDWAVDCLDPELGVMVGEVRVNAGAFADDIALIARTPAGLQYLLSDLAAEFALSGLEVSAGLDGKSASLRIDVDGKRKMWICNPHPHLQVFGQPIPAIDITSVQQYLGVPLSPMRTRADIAGKLAEGLGNISSAPLKPQQRLFILNNHLIPSLYHQLVLTASSKKYLKWLDRSVRAAVRSWLKLPHNSPKAYFHAKIFDGGLGIVTLEHQVPLMKIKRIDRLWASNDPVIREMLSTDGAESLLARQREPSRYGGVEVTSGESLRAALATDLHSSVDGRGLRESDLVPHQHRWVAECTGLLSGANYIGALKVRGNLLHSAVRAARGRPHTSVLCGACRRPGSLGHILQVCPRTHGSRVARHDRLVSLVQSAAGKTGWSCIREPAIPTTAGLRRPDLIFFHQDRPTYVLDVTVVADNAVLHEVHERKVRYYDVPDIRNWLARTISSNAVHFSSVSLSWRGLMARASADTLCSDLALGRQVLSLLSAVTCERSLWIWQHFHRSGFVLRG

SEQ ID NO: 1508 - protein, 793 aa, Carpediemonas membranifera
MRLVRHGFVSKAATALVAEDAGLSPQEVDVELKRLQEDYSGLRPDVPFKDVPAEPLQSVEVSARTLKTVLHALKAEAAPGPSGLSFLHIRIAAKVARHDLIAALMPIVQDILNGETYTAVLSHCIIVPVPKGAGKIRGVAIGDSLRRVAAKALAWAVRARLVDVDRTLKDQYGVGEKCGLERLSDSVTRVYEEGGTVVSLDLSNAYGCLSRAFMFDVVRAYMPALMPYLSTMYRQGLLFSTSGGVIRSAEGIHQGDPLSPILFSLGIKPILDVLREAFPGWHLQAYQDDLVATTDRPLQTPGVGREANNLVEIAREKFLEVGLRLNKSKCVVAHRDVTDGNTSGGVPRRRSLNLVGVPVGSAAHAMGELAKVNSRVMQLLNAAGEMVAKEGPEATAPALIIAKYCALTKWEHFFRNVPPATGGVGNGLYEAELGFEKKEAVPAILRILSSEAEVDDDFALRLSMPVERRGLALAMPSVVWAPAFLAATRQLAGLGVTRSPDSVTGAIKCLPPQLNTPSNWPSGLDDVKALDADHTQKNLVRLVEESIATKLSVSAAVSPNVVRSFMMVDPTSLGRSVTDAAVAPIFRNHLGLPAFTPGFDVCPLCRARTVNHQSVVCNATHTLCCPCLRGGLDDERHNAIKDGLVRDLKGYGWRVQSEVWLNKASEWTIDRTKPMKARADILLTKPGVKAIVIDNVVSNHVSQAMTSKRAQYSNWDVKLIPAVTLHNGDVGRVHGRGWTDDLRDELGLKAEQVREMADNAFLACMRGQVHTYAAFIKQCDAAHAAAEDLGLSH

SEQ ID NO: 1509 - protein, 793 aa, Carpediemonas membranifera
MRLVRHGFVSKAATALVAEDAGLSPQEVDVELKRLQEDYSGLRPDVPFKDVPAEPLQSVEVSARTLKTVLHALKAEAAPGPSGLSFLHIRIAAKVARHDLIAALMPIVQDILNGETYTAVLSHCIIVPVPKGAGKIRGVAIGDSLRRVAAKALAWAVRARLVDVDRTLKDQYGVGEKCGLERLSDSVTRVYEEGGTVVSLDLSNAYGCLSRAFMFDVVRAYMPALMPYLSTMYRQGLLFSTSGGVIRSAEGIHQGDPLSPILFSLGIKPILDVLREAFPGWHLQAYQDDLVATTDRPLQTPGVGREANNLVEIAREKFFEVGLRLNKSKCVVAHRDVTDGNTSGGVPRRRSLNLVGVPVGSAAHAMGELAKVNSRVMQLLNAAGEMVAKEGPEATAPALIIAKYCALTKWEHFFRNVPPATGGVGNGLYEAELGFEKKEAVPAILRILSSEAEVDDDFALRLSMPVERRGLALAMPSVVWAPAFLAATRQLAGLGVTRSPDSVTGAIKCLPPQLNTPSNWPSGLDDVKALDADHTQKNLVRLVEESIATKLSVSAAVSPNVVRSFMMVDPTSLGRSVTDAAVAPIFRNHLGLPAFTPGFDVCPLCRARTVNHQSVVCNATHTLCCPCLRGGLDDERHNAIKDGLVRDLKGYGWRVQSEVWLNKASEWTIDRTKPMKARADILLTKPGVKAIVIDNVVSNHVSQAMTSKRAQYSNWDVKLIPAVTLHNGDVGRVHGRGWTDDLRDELGLKAEQVREMADDAFLACMRGQVHTYAAFIKQCDAAHAAAEDLGLSH

SEQ ID NO: 1510 - protein, 1070 aa, Carpediemonas membranifera
MEMSSFSAPQADPGGQMAMRVSITSDWRENALARDVQLLLQTVRTDYAKFVNAEFIDARWCNVETVFDTLCSEAAIVELMKDVNNKKIVRLTVRALKDIVDSFKRLLDAAGVTLSSTPKATPLRSAKTAPSVAAEFFREIRRNVMGNNDPASLLPSVEEVHAPGSQLSSQPSAAAHVTAVGFTASPPTAPPAHPAHRPDVFLPPGQALFLGKIAPPKRGREKFARGLIEKLKRVALVESEDEKRAALRTVLEYPKALYAPPVASKGPKRRPSKWRKVMRLVRHGFVSKAATALVAEDAGLSPQEVDVELKRLQEDYSGLRPDVPFKDVPAEPLQSVEVSARTLKTVLHALKAEAAPGPSGLSFLHIRIAAKVARHDLIAALMPIVQDILNGETYTAVLSHCIIVPVPKGAGKIRGVAIGDSLRRVAAKALAWAVRARLVDVDRTLKDQYGVGEKCGLERLSDSVTRVYEEGGTVVSLDLSNAYGCLSRAFMFDVVRAYMPALMPYLSTMYRQGLLFSTSGGVIRSAEGIHQGDPLSPILFSLGIKPILDVLREAFPGWHLQAYQDDLVATTDRPLQTPGVGREANNLVEIAREKFLEVGLRLNKSKCVVAHRDVTDGNTSGGVPRRRSLNLVGVPVGSAAHAMGELAKVNSRVMQLLNAAGEMVAKEGPEATAPALIIAKYCALTKWEHFFRNVPPATGGVGNGLYEAELGFEKKEAVPAILRILSSEAEVDDDFALRLSMPVERRGLALAMPSVVWAPAFLAATRQLAGLGVTRSPDSVTGAIKCLPPQLNTPSNWPSGLDDVKALDADHTQKNLVRLVEESIATKLSVSAAVSPNVVRSFMMVDPTSLGRSVTDAAVAPIFRNHLGLPAFTPGFDVCPLCRARTVNHQSVVCNATHTLCCPCLRGGLDDERHNAIKDGLVRDLKGYGWRVQSEVWLNKASEWTIDRTKPMKARADILLTKPGVKAIVIDNVVSNHVSQAMTSKRAQYSNWDVKLIPAVTLHNGDVGRVHGRGWTDDLRDELGLKAEQVREMADNAFLACMRGQVHTYAAFIKQCDAAHAAAEDLGLSH

SEQ ID NO: 1511 - protein, 2017 aa, Caenorhabditis remanei
MTKTEWSWRHRSRSRSVGIVVKIDTSDYANVRVHVAADLSNEDGHTSHNNGIILPIPMKPSVDRFCQIQYPPRGYYVPHPQSQKGHDAKPSRHWNEEAQPPYYHNNNHGRRGRSAKPSGRRPPRKPILQEESLAAHPQIPGDTASAVPLYSDVVNNENKSQGKPPQGSHRRSGRPGTKPSVPVGEAEQETNSRPIAPEPIVKFKHDKHGWTTVQGSHSSGRPVPKPSVPVVSEANRFQLLQEGDFPPLTTSESSQEEIKVPNYQRIVSPIPLPSEEDSKLPTKSNYRAPKGRKSRNYKKPQQQNPKKYQQRLPYQPKVNNAPTDRMAPEQLKGGGGKTAHNDIEEMEIEEDTDEKIIQVKRIKIVNKLTPHHFVCMMTYPTDNIYRCFVKGCTATSQGGWGAEDLKYLTVHIRQEHKIKVEWTYECGICGDLSGGAGKHISKWIKPHMRKKHNRDAPTNFKMGSRSSGKPKITELLEESAPSCSNPRRKTLNQKKTAIITQVTPEKLKTGYQTRSVTKALSVLKESRQKELEVLREEEKANAKQKSKLHPFFTKAPHIDGVKPTVRRELSKMITPGGEHKGTKIPMVHTKRGLIQKINRKAKKAKPMHLDESTIIEASQLDVITIDDDDEDDNMTPMRRRFNTWCLDHETTQEAWLTDDVINWYLKDLCFGNEQYMLVDPLVWLIYKMGGMAGVEQRFKSKKTCLFPICEADHWILLVFDETNLCYANSLGSQPNGQVKNFIQQLNRKLCSFEKEVPLQKDSVNCGVHVCLIAKSIVNGQFWYDDSDVRTFRTNAKAALKAQGYELFSEAPKQIENPDSSHREDIKENSMEMCSESLMIVATPQRSEAPMELVDTEPSDLESPKSDRVVYEDCITALSDVSEPRMTPEKSETPEVPVVEERDLDWPKLESPKSDRVVYEDCITDLSDVSEQRMTPEKCETPEAPLVVECVELERLPKDLPVTDRSTVVAIPEAVKLEEKSEVVIPRLMELSYTVPPEPSPVVEYTQPYTHTHTKPKVKATCQMGKKRKVPTGKPDELIQIVRQWFEKEFNDYVTEGRNFQRLEWLTNLLTAAIQKASAGDEETIEKIRKRCPPPEVRENEMSTQTSQRQKPTTTNQKKRSRNTTQSDTQANTYWRNRAKTYNQIIGQDFKQCDIPIAILEEFYKKTTSVTNVPQETLVKVTSRLPRLDIGKWIEDPFTEQEVFGALKKTKDTAPGTDGLRYYHLQWFDPDCKMLSSIYNECQHHLKIPAQWKEAETILLFKSGDESKPDNWRPISLMPTIYKLYSSLWNRRIRTVKGIMSKCQRGFQEREGCNESIGILRSAIDVAKGKRSHLSVAWLDLTNAFGSVPHELIESTLSAYGFPEMVVHIVKDMYKDASIRVKNRTEKSEQIMIKSGVKQGDPISPTLFNMCLETVIRRHLKESSGHKCIDTRIKLLAFADDMAVLAESKEQLQKELTEMDEDCTPLNLIFKPAKCASLIIEFGKVRTHEQIMLKREPIRNLNDDGTYKYLGVHTGADARTSEEELIISVTKEVDLVNRSALTPPQKLDCLKTFTLPKMTYMYANAIPKLTELSAFANMVMRGVKIIHYIPVRGSPLEYIQIPTGKGGLGVPCPRITALITFLVSTMKKLWSDDEYIRKLYNSYLKKVVEAETGIVEVSTKDLAEYLSNKVPSRKHEFGYNCYSRIREVCNGLALNQAAPLYKLEFIEQDNELAVVVQPTEESKERIFTKDHVKKLQSLLKASVNDALLHRFLTTKPVKSEVVQVLQQHPQSNSFVRMGGKVSISVHVWIHRSRLNQLTCNYNIFDPKQPKNCRRCGYKNETQWHILQDCTYGWAKLIRERHDAVHHKVVTMICAGAKKNWGRKIDQELPGFTSLRPDICLTSPDGKEVIFADVCVPYSRTRNIEFAWKEKIRKYTEGYSHLVAQGIKVTVLPIAIGSLGTWWTPTNESLYQLGISKSDIRSAIPLLCSTVMEYSKNAYWNHIYGNSYTSVPLRYGHQKPDGDDWKKELSCEPVLALQQ

SEQ ID NO: 1512 - protein, 1509 aa, Stegodyphus mimosarum
MSEQPDVDFLTPRLPVMPRPPRIPLPTTPGLPLMPTATMLMPGECDASVSPATPAPVHPVSSHSADGRLSATDATPPSLPCPPRPGRHIAPVATPSGPPLLRSGHLRQLLARITAKSPSPVKSCSGATPTSDSSTTVTNAIPGPSTSRACLKDDRDPADKSSRFSSFPCYVCGRIFPKRKRLQKHIATHDPTLHRDAPSSTDSACLSSPAFSPVCQHTRARTAAGHICRSSSCRFSPAQPGTAIDLPSSPVRSYAEAVTSLLPSVSFESTTASPNPAPTSSAPPLESTGRPATTAEVLPTTTPSPVTRMMTDVRPHQVATTSTTWTSIPTSSTTTSLDQGTASTAPGPHDMTSAARFTSDDTADFSVTIRGQQDAPPCLVQGPTSTTRVDDVLHLVFPVSDALKCTENCCHKVFVSSAWAQTRHSLIRHHSIAHNINVQFTTRWCSFCSTTLPDKPSRHSCLRQDGPVTASGRTFRWKCRSCSFSCPTRGGILNHEALHKRERIRARQSLTSRSDTSPGTQQQPPPAAVAPSSEQHSSSSPSPATASSSSAPPLPSALQAPVAADPTSPSSSSPDDLLPPSFSSAADADLGASQLDTASSEIPAPLDANPEVTSPIAHFADTLTDILHDSSPHQWRRFEDCLTQILDTVGHAVRLPPMIASGSQRPPANVRDPRVVQKPYRRNRRRAVRLILDGDSSTCTIPRQDIQDHFSEPASTNDVDLSLFAQLDTPPPTMDLCPFSPAEVAAKLKLCENTAPGPDRISYNHWKSVDPDCVILALILNICMKAHRIPSAWKSSLSVLLYKKGDPHVISNWRPISLSCTLVKLYAGCLARRLSSWILANDVLSHCQKGFLPFNGVYENNYILQQRIHQAKSKKEELCIASLDLTNAFGSVPHSAIRAALSASGAGDALCPIVMSFYEDATTQFITCEGLTDAIPLTRGVRQGCPLSGLLFDLVVDPVIRAIQADSDVHNILAYADDLLLLASSPDELQARINAVTTMCRSLGLELNPGKCFTWHFSGAQPVGSRATTFHIAGSPLHALEDGEGIEFLGKPIGFQLPRDEGTLSSHLDACGRLMDSRLAPWQRLDAIKTFFFPALSFQMRTGRFNKTTWARVDDFLRPRIKATLNLPAKAANEYLYGDQNSACLGIPSAAEDSDIALIDGAFKLLTSKDPAVRALAWSDLRHVVTERIKSEAFHHDLSAFMSAADDGLFRIPASSSSLIWSLARSASRRLGVSWLFDDGDYVSLSHADSSLQASKRTRVFRTLRTNLRKARSEKLLSYPNQGKALECATPSKASCHFFRDGSFTRFADWRFVHRARLNLVPLNGARHGNDAQRGCRRCNYSLETLPHVLCHCMRYSRLYQQRHNTIVERIKKAASGRWHILTENQAIEDLPLRPDLILTRDDSCLILDVTTPFENRLTSFETARREKEQKYRPVVEILKRNYSDVRVGAIIVGTLGSWDTANDRVLNRICSRKYQGLMRKLIVRDTIRASRDIYVEHLTGVRQAASTS

SEQ ID NO: 1513 - protein, 1224 aa, Subanguina moxae
MNRIVAPNRAAASDKTACNTSIGYCEKSATLDGYAGKNGVRWNQAELSTLVRLAAYHWDLEKRKVSGWKSVHEHWKAEMVNKNRTQASLSSMFLKLEKEGKITMVEGRPVLKQSLDHAKAYPETNQTSVVEVSMVAEPEGDDSPPGTNSSMQEEEIGNRGANELIRLEPNSTSERSSGNPLSEIPAEFVDAFKENYRETLRKQGTQRKSIRRWRKVDNDAMKWSDILINHFLYFRDSSPSATKLNVLVYTAGVTVTWWMEKDCNNEIKKKEWFGERQKELKGLAKHIGWITNEVNRRKALRKPTTKERKIFSIIRNRFNARTTVKLTERLDALKMQLALLKQRILVRKNELKRKRTRFAPVRLMMSGNMPKKLSELESANKARQYWKSIIGKTKNFNNDEDLTEWMEKTYNTVPEQQLEGDDLKRWKKVLRKARPWKAPGPDGIPNFLWKHLKSANNALFRWIVNTKESRVSIPSWLPKGRIVLLPKDGDLSDPSNYRPIACLNSQYKLITGMLTLWIKEHLECHKILPIEQLALVNTRGCTHASILDQTITADATSQSGRRKALSMAWVDCRKAFDSISQPYLSALLAKTRIHPRIRNLLCALMHKWSVKYEVRKGWAVDRSLSLKVKNGLLQGDTLSPLLFCLAIAPISSALNKNVQPYETQTGGKTGKNAGQGISCTHLLYMDDIKVFTKTPQDVIKALTIIKRVFKAIGLEMNPRKCAVVHLNSEVADTLDDIPVLGEHSLYKYLGMKQRSKCNEVEAWKDVTEKVLERERAIWDVDNEITMGQKVQLHNICVAPVAMYFGSNLIVGSGTYLSTMHRSHKLDTEIAKILVEQKAKVSSACRSRMYVKANAMGYGMKSIADSIEDSIMRTYTYILLGTNLRTTRLLFESMVNRNKRNIFADARKIIDKRELGDRIRNDAGVIVVDGTEHNNATTASQHICRLMDLHRQKEYQREWQTHPVASAVLPHVDVALSSLWMQRGSLSSRNFRNAIASQEGAMYSRVLADKMNQLCRRCNKARETSDHIVACCEFVRGTLMKARHDSVARVILRAFLVKYGFPTYHYSQEVTAIVENDIAKIYWDCNMVTRRQLKHNRPDIVVYDKLEKKIYIVEVGISYYTRLDMQWKAKYSKYARNSMVEDDSVESIHIDKNLRGELMEREPGFTAFVLPVIIGTSGEITQQTRLTLNKLNLPCEMIPDMIERMERAAAIGTSRIIKAHLSNNC

SEQ ID NO: 1514 - protein, 1833 aa, Lotmaria passim
MSLLGGSPSESSLDEERCAHPLPEEDTAPPAVGSEGENRLFHSPLATPREQRIPVQVPEGTATTTKRHRATPSERTTDSSTDGGEATTRPKQRHELEDTLHAMLAKIAGQNVGGKWSNGPGAALEDVVYKKETWTNIFTRSTRIIETCAACGFVPPTNRTIVRMMLLNAMGADCDKTAEAAIREALDAADPPDTTTQCPGCGAHRQRILDHTTPQAVAFFVTDRRGVSTETPMANIPRIINAPHATSSTVSLGLAAVISTCTAQRPTVYRTKWDAKKRTLSWIRIGERQRHIPVAKNEVAGNILVYLPAATAHQDAATTADTETDSWDADSLWREIAPRKGQHGLAARLFAPAGCTTEGGTTAARPPPTTALEERPWNCVKEQPEPRATPDKRESMRAFLQHLCAGASTVSGRDAVESTLHGAIAEHETWEALFSCGVETERRCQKCGQQDDTDILEDTAVIGIQLPNGVAHATAQEAMGRALGTHTAFSQLQCAACGAKSVITNRRLLRDAAFIVIKDANSNTTTTTAADIPRSVCVTGRGGPPQPMLLAAAACFESAGDAQTRGTGTRVYLAPPRDTEPWDVVGGDGSQGGRKHAADIVAQAFLYTTVAAAPAANATQEHWQTEEEEEEQWWQHQQTQDDRLEETTPQQENEEETAPPSPPPPPPPPHTTTHDRPTREEIIVEDVTATSDNDDLTIDVDTTTVGTETPVVATSTPLHDTTAEQMSEEVFVPATPPPAHSHNDSSKENEEPASDPFLAQTPRSADMTRTEEAADTTGRTHDEQQQFAHGTNMAAAQGGESILCPFCVHQRKWEPKEHGQHKERTLFVQHLNNKHRQAQPDIDLLKAYKIDRCLVCGMFVVATERARAAHRCRRQATTAAPQNSTTEPPEAQSTINAVRDFRGDTASTEDEEWMSTTPSASRWLHKKEWEQWRCTVGRVLTGYTASAAPERWRRQLEMTTVVRNNLGKQRRKNGNTANAPPADTTPTTDQQGGAPQQRTRAARREVTEEDWGAPQAEVTTNNGTAGAKTAAEQQQPPHEDDEADNEDEEDRTAEEEAQQQQKKRILNQLALGALAKAARTLFNTQLPRATVEQSLPQLHDLHPQEDVQQLPLPNETPFVHDVKPERVKAVIVKKLGRAAAPGLDGWTRELLIPITEDNGLLAELTTLVQDILVGNVSSSFATRIRACVLSPFRKEMATLKVRPITPESVLAKLASHIALDSVDKSFRATFKGWQYGVWGDSTEAVKEIRAAYKDDGADTLVALDATNAYNRMSRKHILEAAYAQPALRLAFGAINLTLGAAGTLALYENGARVCELRSTRGVRQGMVLSPLLFANGMASVLAPIMRKHPHVRVVAYLDDITVVGKNAAVQNFLEEAGDELSKIGFDINPAKSHHLSKQSAPPALNIAGTTIPLSRKVVRILGAGFRGDGLPVEEWVWEKTREYDHYFEKLGSEWLPRLSRLQLLRGATVPRMNHLLRTHRPEELNRATTWFDEEVLRTAKSIANVSGHTGPTQCEEQQRESSITELLVRLPLSKGGLGLRSQNAIAQFAAEAVGVKDGQRAQTAVVDATNQTILFSLLTEPDRLLVEANTAAGATRALVDPAVVMPDYAAEIMLKQRLLQRVLPRGCTCVCGKDADNHHVNTCSRIDQGARIERHNMVRDAIVVWAREIGFEARAEPPNRYETTDGIANSRGVSTTIRNSQHKRLDVEIATPTGNMTTDVTITYPGRTETGALPVQEAFANKKRKHGEIQEALHKNFVPLAMESTGGIHRDGFKWLREVAGTRQHPYTTNTALSMVLTRIAQNVHIGNAHIFHVVDKAFLELQRARSTGNVVG

SEQ ID NO: 1515 - protein, 1005 aa, Athalia rosae
MAFKKKTGRGVHEQRKHKAWYDEQQALKGSGNRPRWTEEEKEMMARKEAEIILGHEIVGKKPFVNQELLKFFNGLGLDPDKDRSVEAIKGHRRRPSYKKRVEKFINILRAEREPRSMYSSEDSERLGAGEDLEPAVSDRWIEYFDSLTPLSGSEFNTSRLNTLCFSASTRTREELTVELGLYLRETFASKPRHRARETRGTQGSMGPISKKRARRAEFARVQDLWNKDPSKCVKRILDDQLEHEEGVPQERMVPYWRTVMTKNTGLAPAGLAEPAVSHEHLWDPIVSQEIKVAFPPAKTAVGPDGVAAATLKKVPLELLSRLFNLFMYCGRVPEQLNLSRTVLIPKKKGSRDPGDYRPITVSSVILRTYHKVLANRMKEVELDPRQRGFIDTDGCADNTVLLDIVLRYHREKHKSMYLASLDMRKAFDSVTFESLQEVLRAKGLPGAMVDYIISSYEANKTILQHAEWESKPIHPTCGVKQGDPLSPYLFNFVMDEMIRSLPSEIGVNMEGLKLNILAFADDLILVAQTKTGLQRLISATADFLYCCGLEANSGKCFLVALRSVPKEKKTYVDKNCTFVIRGAAMPALSRVDDWKYLGIPFTPEGRLVVNVVGMLEDKLSRLTAAPLKPQQRLWALRALVVPSIMHQLTLGKVHVGYLRKVDRLIRKSTRLWLHLPHDCPNAYIHSNIKDGGLGVPSVRWKATVDRRRRIYSLLRSNFIEGQVAITYLDKEVERAELRLKDEGGGVLSTAAKVDEWWAKRLHMKVDGAALKSSKLVIGQHAWVGDGTKFLSGRDFINMCKLRINALPTRSRTARGRVKDRQCRAGCGDAETLNHVLQFCARTHPMRIKRHDAIAHYLAKKLRKAEFHVEEEPRFNTDEGLRKPDIAATLGCTTLIIDVGITSDQTDLEKLNRFKISKYADNNSLIEDAKRRYNSRVVITLAAILSCRGVWCKSSAEQLLSRGVICQQDIKILSSRVLVGGSAEWNFFNSSTAMSNRLVSRRTGVG

SEQ ID NO: 1516 - protein, 1034 aa, Ladona fulva
MILLVKLSNLDSPVKGGPHWARHSLMHHPPPDGGPPPQSSEPDPAGPVQFVFDLCNRPFQSSRGLGRHFKSAHPAEANERVVVERVKARWSAEEERLMALYEVEAVRQGAFVNQYIHERLPGRTIEGIKGKRRQAAYKRLVQGLLDATPPFPPRGPALTPPGRETKDSILSEISKLADKCASLLAAWRVPVLCRLGLENVSPQEALHELEGWLKEVLGAKLLRSTRRPSHVPDQRPPSPAVSKRRRRRHEYAAVKELAKKNLAAAIGRTLDDQVRAESSLEELERWWVPLFLQPSKPYPSGSPGRYQESFGVLLRPVSEAEVDANSINANKAPGPDGIPAQRWKSVPVSIKALVFNIFLLLGDCPRMLKASRTVFIPKGPTGVASDFRPISIGSVVLRHFHKVLASRLISLPLFDERQRAFLPREGCLENVITLQAVQSEARTRLRELHAVSLDLRKAFDTVSQEAVLGVLSEVCLPPSFRGYIARLFAESTTILQCRGAVGEPVRVARGIRQGDPLSPLFFNLVMNTVLQQLSDEVGFQLGEVRVNALAYADDLVLIASTIPGMKRQLRLVEERLECVGLEVNAGKCAAVSLVPSGKEKKVKTLTATTFTLGSGAPIVQLGVLDSFRYLGLHLQDQSRFPAKDLLGLYLDKLTRAPLRPQQRLWGLRQVVLPRLQYGLGLGRMTVGRLKELDMSIRRAVRRWLHLPKDVPYGYFYTPVAEGGLGIPALRHTIPVFRWSRAAALLQSGSPITMAVTRTSYFQRWRDWSRQACLEFPEGGDPAVVLHKHLKNLLHQSVDGRELAESAQVRASSSWVDLYSAGIPGREYVQYHHTRINAHPSRVRNSRGRRQNMDISCRAGCGVPETTAHCIQSCWRTHGGRILRHDAIAATLGSALEDKGWTVAREAKMDTDQGLRKPDIIAARGEEVKVIDVHVVGGAQLLPRHQQKKEKYESNAGVWEWLRRNFPGDRRFSFTTCNLSWRGIWCGRSASDLRLMAVTGRTLGGLTTRALQGSHTNWTRFNRICATRVHGRGVT

SEQ ID NO: 1517 - protein, 991 aa, Trichogramma pretiosum
MADPPEDGFACPVCPRVFPTAIGRGQHVKKGHREYANAQINVDRVNRRWLQEDINRLAQAEANLAAGVRILESLQLSMPRRTLDSIKGIRKKPEYKARVAFYKNQVRAACERVQESMEEAERRADEAAQQIRDKLAEVMAALEHRNNNHYSLFAAVEAIVSQQGDPTQDLQQWLTSVADSARVRQRRPGVARHGRVAANAGAINARQQERQLYKRIKALWRKSMRKAAALILDGDSDGSEVPSLEAQVAFWEPVMTLPEAVAGEDQPSLANDEAAQQLWDLWRPITIEEVRRLRPKKDTAAGPDGVSPACWGRIPDVIKALALNCILHLGSCPDAVLNSRTILIPKSEGTMDPALFRPLSIPSIILRHLHRILADRVAVDMPMDRRQRAFMATDGIAQNISLLAAIMLDARKRLKPLHMAVLDVKKAFDTVSRGAIDWAMFCKGVPLPMRQYINNLYERARTKIEVKGESSELFSPAWGVRQGDPLSPVLFNMVMDQVLASIPTTVAYALAGTAVSALAFADDIILLASTREGLQESLDCISRGVRAQGMELMPAKCSTLSIAVDGRGKKRKVVMDNPFRVDDVPVRQLSTEDEFKYLGVTFDCNGPTWKPCDLKEKLHGISRAPIKAQMRLKVLETYLLPRYMHTLTLGRTTHAELKAMDKLVHRSVRSWLRLPHDCPNAFIHAGRNYGGLGVPSLASIVPLIRKNRLEAINESGAFFAEDLIGSEWAQKRIDWCQRAYSSPTRWTKNLHELVDGKELRDTWKAKSSYRWIYDPYCAIPTADYLHYIHVRCNALPSRVRATRGRRGPPVSVMCRAGCPATETTAHVVQNCYDTRGGRSLRHNAVTCSVATALELKGWHVVQEPRFITNEGLRKPDILAYNNEEAVIIDAQIVSGSGDIEETAKRKKEYYRRNHSLIREVARQCDLPQEQVTVEAVTITWRAVWARSSENILKSMGCGQTVLDGISKRILLGSYLNFWAFNKRRRLGLQAY

SEQ ID NO: 1518 - protein, 932 aa, Entamoeba histolytica
MHELQDDMKMISIVMHLYLQNKIIGDKFDEIKEILKKINRLEDLVKGRKWYRIKCIMKLNEHDEEGIKVKALERIKYLKYMMTMIKERIKFNKDERVRINTNKIMFDSNKKIKIKKKDPKNEIYPNNDTTLEYWKSLYETQVKLNKDYWKIKQITSWNERYRNYDNVIITLNELNFSLMRISNWKTPGIDTIYGYYWKRMSSSREAILSIFNEWLNFPENIPLDMVSGKTLLIHKGGDRNDVINYRPISCTNVIMKVFTSILKEKIHRRLNMNCESFKISSNQLGCKLQSLAAKEGIINSYMMKQQKEEKYPKYVESYYDIKKAYDTVNHEWVIESLKYFNVEGVIIDMIESMMTRWKIFIGYKFNEYLGSIKLNRGILQGDSLSPLLFIIQMNVISQIIEEKFPKANHTLYMDDLRIMTQSSEEMGIIHNEIKEIISGIGMEMNEKKSGMVLKNIKEIPNGMQNIPVIEGEDLYKYLGIWQSDEIDDTFNCKIIKEKMMKKMEEINTDDSSNRRYITRINTEVIPIFRYSASVVNWKITDLDKMDLEIRKYLRKAKYIGAGNSKDRLYVPLEEMGEGLINIRDEYVIELVRTVMYYCTRESEIGNNILERWYSKKGIWNRIKKALGHKIPETKIEEIINEGIEKKKEKEVVVEIKKLLTDQYIKKWKCHQISGHFRRWFESKGVDKTTTVKAWKSINIKKNAFLQLTKMQDGAIFCGYKKAKIMKNERLKYCPLCKDKIATIEHILLSCIGHKKSQIEKHDHIGIIIWEGLIRKYTGNKQYKKPPYETVFQYKDITMIWNKQIMSKSDGQYHKRPDIYVLDKKNKTGLLFDMTIVADHNINGAYWKKRNKYKELKNRLMKIEKLKDVRIIPVVISINGLINKESNRLIKELKIDIDIEKEVKKPCNKKHDGCHGILRRSQPNILRRVARRR

SEQ ID NO: 1519 - protein, 932 aa, Entamoeba histolytica; identical to SEQ ID NO: 1518

SEQ ID NO: 1520 - protein, 937 aa, Entamoeba histolytica
MSGSRMHDLQDDMKKISMVMHLYLQNKIIRDKFDEIKEILKKINRLEDLVKGRKWYRIKCIMKLNEHDEEGIKVKALERIKYLKYMMTMIKERIKFNKDERVRINTNKIMFDSNKKIKIKKKDPKNEIYPNNDTTLEYWKSLYETQVKLNKDYWKIKQITSWNERYRNYDNVIITLNELNFSLMRISNWKTPGIDTIYGYYWKRMSSSREAILSIFNEWLNFPENIPLDMVSGKTLLIHKGGDRNDVINYRPISCTNVIMKVFTSILKEKIHRRLNMNCESFKISSNQLGCKLQSLAAKEGIINSYMMKQQKEEKYPKYVESYYDIKKAYDTVNHEWVIESLKYFNVEGVIIDMIESMMTRWKIFIGYKFNEYLGSIKLNRGILQGDSLSPLLFIIQMNVISQIIEEKFPKANHTLYMDDLRIMTQSSEEMGIIHNEIKEIISGIGMEMNEKKSGMVLKNIKEIPNGMQNIPVIEGEDLYKYLGIWQSDEIDDTFNCKIIKEKMMKKMEEINTDDSSNRRYITRINTEVIPIFRYSASVVNWKITDLDKMDLEIRKYLRKAKYIGAGNSKDRLYVPLEEMGEGLINIRDEYVIELVRTVMYYCTRESEIGNNILERWYSKKGIWNRIKKALGHKIPETKIEEIINEGIEKKKEKEVVVEIKKLLTDQYIKKWKCHQISGHFRRWFESKGVDKTTTVKAWKSINIKKNAFLQLTKMQDGAIFCGYKKAKIMKNERLKYCPLCKDKIATIEHILLSCIGHKKSQIEKHDHIGIIIWEGLIRKYTGNKQYKKPPYETVFQYKDITMIWNKQIMPKSDGQYHKRPDIYVLDKKNKTGLLFDMTIVADHNINGAYWKKRNKYKELKNRLMKIEKLKDVRIIPVVISINGLINKESNRLIKELKIDIDIEKEVKKPCNKKHDGCHGILRRSQPNILRRVARRR

SEQ ID NO: 1521 - protein, 932 aa, Entamoeba histolytica
MHELQDDMKMISIVMHLYLQNKIIGDKFDEIKEILKKINRLEDLVKGRKWYRIKCIMKLNEHDEEGIKVKALERIKYLKYMMTMIKERIKFNKDERVRINTNKIMFDSNKKIKIKKKDPKNEIYPNNDTTLEYWKSLYETQVKLNKDYWKIKQITSWNERYRNYDNVIITLNELNFSLMRISNWKTPGIDTIYGYYWKRMSSSREAILSIFNEWLNFPENIPLDMVSGKTLLIHKGGDRNDVINYRPISCTNVIMKVFTSILKEKIHRRLNMNCESFKISSNQLGCKLQSLAAKEGIINSYMMKQQKEEKYPKYVESYYDIKKAYDTVNHEWVIESLKYFNVEGVIIDMIESMMTRWKIFIGYKFNEYLGSIKLNRGILQGDSLSPLLFIIQMNVISQIIEEKFPKANHTLYMDDLRIMTQSSEEMGIIHNEIKEIISGIGMEMNEKKSGMVLKNIKEIPNGMQNIPVIEGEDLYKYLGIWQSDEIDDTFNCKTIKEKMMKKMEEINTDESSNRRYITRINTEVIPIFRYSASVVNWKITDLDKMDLEIRKYLRKAKYIGAGNSKDRLYVPLEEMGEGLINIRDEYVIELVRTVMYYCTRESEIGNNILDRWYSKKGIWNRIKKALGHKIPETKIEEIINEGIEKKKEKEVVVEIKKLLTDQYIKKWKCHQISGHFRRWFESKGVDKTTTVKAWKSINIKKNAFLQLTKMQDGAIFCGYKKAKIMKNERLKYCPLCKDKIATIEHILLSCIGHKKSQIEKHDHIGIIIWEGLIRKYTGNKQYKKPPYETVFQYKDITMIWNKQIMSKSDGQYHKRPDIYVLDKKNKTGLLFDMTIVADHNINGAYWKKRNKYKELKNRLMKIEKLKDVRIIPVVISINGLINKESNRLIKELKIDIDIEKEVKKPCNKKHDGCHGILRRSQPNILRRVARRR

SEQ ID NO: 1522 - protein, 1200 aa, Helobdella robusta
MAVLLQLKFYNVFYFILILLINFIYTINASKCPYCNMSFVNVNRHSWRCTKSTVNFNSNSVRSNGNFNVDNNSSNNFNSNLLNNLPINMDNNNSIFCCCGKKCKNKGGLKLHQRSCKIHQNLKSSNNSNESNSEADPPPPPPQVQCQSNQLQPSHSLPPSPSASALNHYLHSSNAPVEDNNKANSPSSSTQVQQPFQQPSHGPQSASSAPNINFIACCCGKYCKGRKGLIMHHRSCKLHKTLILSNTSKVTESSISPHVQQPVSSSPSNVEKTEIPLPGVKLPRTPAQWSEANAYFQLHQKSLPTYYNIDEFTLAFQTMIYNYFAANYGTIKSQTSLNDNKNKSIKALKKELKQLKSLGHNNHRFDVQISSISKTLRSKLSSRKLPTTKTPDTTNQLKRRFWWFCKRLFTQSKSQGPLFSVDDCKNYFSSALSDDNSKKYQLPNWVPSTSKPTTPCNTSPPSYYEISSIVYKCKAKSSPCPLDQISIIPFKRCPILRTILQQLIAQCWSSSKIPSCWKKGFTILIHKKGDANDPANFRPITLQPTLYKILSTSINNRIYKFLESNSLINKNIQKGFYPKVDGLTEHTQLLTHMLNDAKRHQRTVIVTLLDLRNAFGEVSHNIISSTLDYHHIPSQISNLIKAIYADYTISVSGCDNLTPPIPVRRGVLQGDPVSPLIFNMCFNPLMKLIEKTEYQQCGYIWGPTANLKTNAWLQFADDTAIIANSTDGAQKLIDLNQAWCKATGMNMRIDKCCSFGMRKKNGGYEQFSPRLTIDNKQIPHIDMNGHFEYLGKIYDFKGNNSKAKELLIKKLKNMLSVVNELDTTPQWKLQILRRYIPSQLAFELRTYDMPLTWIGNNLDPMVAESVRNWLSLPISSCISECLSLPFKLGGLEIRSLHFAESLRVKLRNYLRSHDNKDVNCLWSDSYNNYIKIDNMLPDSESVKSTLNALKIRQHEADFDHVSQLSCQGRIIKAVREHIPPIHVTRWSRLTADLPEVLFRFARKALIQQLPTNANLSRWGKSSNALCPLCNALQTNKHVLSNCDSVAALKRFTTRHNKILSLILEKIKSFAKPEVAIFADTMNDEFLPTTSLFKSFRPDIALLRGDTIEILELTICHESNFSSSRDYKRSKYKNLHSNLIDEKKDSKIIINTFEISPLGFFKYFYLSFVDFIWTDQFCNDLINSAITSSYAIYCDRNSIAT

SEQ ID NO: 1523 - protein, 1113 aa, Helobdella robusta
MDNNNSIFCCCGKKCKNKGGLKLHQRSCKVHQNLKSSNNSNESNSEADPPPPPPQVQRQSNQLQPSHSLPPSPSASALNHYLHSSNAPVEDNNRASSPSSSTQVQQPFQQPSHGPQSASSAPNINFIACCCGKYCKGRKGLIMHHRSCKLHKTLILSNTSKVTESSISPHVQQPISSSPSNVEKTEIPLPGVKLPRTPAQWSEANAYFQLHQKSLPAYYNIDEFTLAFQTMIYNYFAANYGTIKSQTSLNDNKNKSIKALKKELKQLKSLGHNNHRFDVQISSISKTLRSKLSSRKLATTKTPDTTNQLKRRFWWFCKRLFTQSKSQGPLFSVDDCKNYFSSALSDDNSKKYQLPNWVPSTSKPTTPCHTSPPSYHEISSIVYKCKAKSSPCPLDQISIIPFKRCPILRTILQQLIAQCWSSSKIPSCWKKGFTILIHKKGDANDPANFRPITLQPTLYKILSTSINNRIYKFLESNSLINKNIQKGFYPKVDGLTEHTQLLTHMLNDAKRHQRTVIVTLLDLRNAFGEVSHNIISSTLDYHHIPSQISNLIKAIYADYTISVSGCDNLTPPIPVRRGVLQGDPVSPLIFNMCFNPLMKLIEKTEYQQCGYIWGPTANLKTNAWLQFADDTAIIANSTDGAQKLIDLNQAWCKATGMNMRIDKCCSFGMRKKNGGYEQFSPRLTIDNKQIPHIDMNGHFEYLGKIYDFKGNNSKAKELLIKKLKNMLSVVNELDTTPQWKLQILRRYIPSQLAFELRTYDMPLTWIGNNLDPMVAESVRNWLSLPISSCISECLSLPFKLGGLEIRSLKHFAESLRVKLRNYLRSHDNKDVNCLWSDSYNNYIKIDNMLPDSESVKSTLNALKIRQHEADFDHVSQLSCQGRIIKAVREHIPPIHVTRWSRLTADLPEVLFRFVRKALIQQLPTNANLSRWGKSSNALCPLCNALQTNKHVLSNCDSVAALKRFTTRHNKILSLILEKIKSFAKPEVAIFADTMNDEFLPTTSLFKSFRPDIALLRGDTIEILELTICHESNFSSSRDYKRSKYKNLHSNLIDEKKDSKIIINTFEISPLGFFKYFYLSFVDFIWTDQFCNDLINSAITSSYAIYCDRNSIAT

SEQ ID NO: 1524 - protein, 1428 aa, Schmidtea mediterranea
MSYFVDPIFSNRHRFTNKTIALKITMALNELFDLKAAMTFHPHDDFKYQNNNYDCGPFICAYAMMISGEWQSFPESFVEIIRKQVHQFKLFPQQKDPKISGGGLPKFMEIIKRNGIKKISSATQAFLLKQNSCVSSLLSEWFKNKNNTTVLSPELTSKVIAQNNRYIRENVTFKQFSGIEHVISVIPNDMNWGLYLFSLVSGISYIFNFRNRILTERLIGIGENMTDYLNKFFISDKKVTFNRDHNIDHISITLDDPHLFASAFIELVEMLIFENQVSRTSISESLNSFKIHQANEICKNLNLLNFKITEEITSKYFKILKLDDNFMLLNATMCSAILDDCTQYLNEYLNYECVIKAQVIFAIVAPPKYREFLLIIDYNTDEYYILNPTTLSETENHLFICKSLRNKLNEIKETPGRVLNIGVFPHDIRGSGLVSKVLICAFMKHYVNDLPLVNLNLREIGNTISSLLPVINVYKKEQNSCTTKLNKVNEGNINLEMRKIKIAILIKKVSNFNVNQIIDVINEQFPNRIKATHKPYLGNKKNTAHKINKSILIANFMTDMKSTVNKLLNNIDVSIRPTFEKIVSNFLIKSPFRGNWNAIFNFSKRSSVILNLEPFTNDEVMFELKKANNTSPGIDGIQYRNLSLLDPEGKLLTLLYNKIISDKTIPDSWKTFKTLLTPKPDKEDKYDDVSSWRPIALLSVIYKVFASCLASRLTRWIDLNELLHIGQKGGSKHDGCVEHNSILSAALEHSKYSTNKPLAIAWLDIKDAFGSVPHEYMWSLLRFIGVSEGFASVIQILYSNTSTFYSCGHIQTPNIPIVQGVKQGCPISMILFALAINPVLEAVSRSDCRPFMIGNSPVKILAYADDIALVACSVSELQKITDIAVATAAEIGFEYRPEKCGYLQMPNVEMDTAISINDIRIKRLESNEFYRYLGVPVGVDTDQNPYEILQKVVSDTKILADSDLLGWQKLKAYKIFVHSRLIFPFRTREIKTYALSKPNGNSNISVNITSQLRNSFRKMLLLPKHSEVCYLYNSTENGGANCVDVLDEYHTQTITHCFRLLTSKCDFARKINTDSLKFVTGPRLGIKEPTLQEGLDWLNGKDSIPLHSGKKTRFQRVRIAIAFFARTHQIDISFAMTNHETSLYITTAMRGTMILTSDLRQTTSKVLHMALCDSYLVKWETGCTSNIIASAIRLSPMINKAIFRGDLSEFAWNFIHRARTNTLSVNAKPYNNGEKRLCRRCNSEEETMSHALQSCKVHQTLASERHNNCLKLITNRLMKKPNLIVVVDHICSLVPNSKERVDLFITDVSKKRIFLVDMKCPNDSVTSFENVDKANLKKYDSLKNEIQAVKPDFKIELDTCIIGALGSFPAKTSEILLKIGIARSEVQGLLKECAISNITHSARRWYYHKTGTLVEIDTDKHPIKNIKK

SEQ ID NO: 1525 - protein, 968 aa, Schmidtea mediterranea
MLYKFKYRVVSSFLPIVSKIKKVKSLENNIIIENHKESENLKERKNKIDQLLIKVFKMNVDEIVDVILDQISIKTVPTHKPYLGNIERVESQINKSNLIKNFNSDMKTTVNTIINDVDVDVRPKYENIITNFEHKIPLDRTWDKVFKFCNRSDKKLKLKYLSNSEVLFELKKADNTSPGVDGIKYRDLVMLDPEGKLLTFLFNKIISKKVIPDSWKSFKTLLIPKPGKGDKYASVSSWRPIALLSVIYKLFASCLANRLTFWINKNNLLHIGQKGGSRHDGCVEHNSILSSALEHSKYSKNSQLAIAWLDIKDAFGSVPHAYMWSLLRFVGVDEEFVTILERMYSDTSTFYSCGPILTPNIAIRQGVKQGCPISMILFALAINPVLEAVSRSKCEPFMIGESAVKILAYADDIALVSKSAYDLQRVTNIAVVNGSEIGFEYRPEKCGYIELPLIETESQILINDIKIKRLASSEFYQYLGVPVGEETDQSPYDILKKVVSDTRKIADSDLLGWQKLKAYKIFLHSRLVFPFRTREIKTSALAKSNANNNLTVNITSQLRNCFRKMMSLPNHSEVCYFYNSTENGGANCVDLLDEYHTQTITHFFRLFTSNCEFARKVNLDSLNFVAGPRLGIINPTLQETFDWINGKEPKPRHSGKKTRFQRARIAIAFFKKEHDINIMFIVTKGQPSLFITSEKRGTFILTPDLRKTTSKVLHMALCDSYLSKWEKGCTSNFIASAIKLSPKINKAIYRGDISEFAWHFIHRARTNTLSINAKPHNKGNKRLCRLCHTEDETMSHIIQSCKIHLTLGSERHYDCLDLISSHLSKNSNLIVVVHHVCSLVPESKERVDLMITDMVRKKIFLVDMKCPYDTINNFALVDLLNLQKYDSLKMQIQDAKHDFKVELDTCIIGSLGSFPPKTPELLLKIGVDRTHLKGLLKDCALSNISHSARRWHYHKTGILVNLEKFRFN

SEQ ID NO: 1526 - protein, 1297 aa, Schmidtea mediterranea
MEIIKRNGIKKISSASQAFLLKQNSCVSSLLSEWFKNKNNITVLSPELTSKVIAQNNRYIRENVTFKQFSGIEHVISVIPNDMNWGLYLFSLVSGISYIFNFKNRILTERLIGIGENMTDYLNKFFISDKKVIFNCDHNIDYISITLDDPHLFASAFIELVEMLIFKNQVSRTSISESLNSFKIQQANEICKNLNLLNFKITEEITSKYFKILKLDDNFMLLNATMCSAILDDCTQYLNEYLNYECVIKAQVIFAIVAPPKYREFLLIIDYNTDEYYILNPTTLSETENHLSICKSLRNKINEIKETPGRVLNIGAFPHDIRGSGLVSKVLICAFIKHYVNDLPLVNLNLREIGNTISSLLPVINEYRKEQNSCTNKFNKVKEGNLNLEMRKIKIAILIKKVLNFNVNQIIDVINEQFPNRIKSTHKPYLGNKKNTAHKIKKSTLIANFMTDMKSTVNKLLNNINVIIRPTFQKIVSNFLIKSPFCGNWNAIFNFSKRSNVILILEPFTNDEVMFELKKADNTCPGIDGIQYRDLLLLDPEGKLLTLLYNKIISDKTIPDSWKTFKTLLTPKPDKEGKYDDVSSWRPIALLSVIYKVFASCLASRLTRWIDSNELLHIGQKGGSKHDGCVEHNSILSAALEHSKYSTNKPLAIAWLDIKDAFGSVPHEYMWSLLRFIGVSEGFVSVIQMLYSNTSTFYSCGHIQTPNIPIVQGVKQGCPISMILFALAINPVLEAVSRSDCRPFMIGKSPVKILAYADDIALVACSVSELQKMTDIAVATAAEIGFEYRPEKCGYLQLPNVDMDTVISINDIRIKRLESNEFYRYLGVPVGVDTDQNPYEILQKVVSDTKILADSELLGWQKLKAYKIFIHSRLIFPFRTREIKTYALSKPNGNSNISFNITSQLRNSLRKMLLLPKHSEVCYFYSSTENGGANCVDLLDEYHTQTITHCFRLLTSKCDFARKINTDSLKFVTGPRLGIKEPTFQEGLDWLNGKDSIPLHSGKKTRFQRVRIAIAFFARTHQIDISFAMTNHETCLYITTVMRGTVILTSDLRQTTSKVLHMALCDSYLAKWESGCTSNIIASAIRLSPMINKAIFRGDLSEFAWNFIHRARTNTLSINAKPYNKGEKRLCRRCKTEEETMSHALQSCKVHLNLASERHDNCLKLITNRLMNKSNLIVVVDHTCSLVPNSKERVDLIITDVSKKRIFLVDMKCPSDSVTTFEQVDKANLKKYENLKIEIQTVKPDFKVDLDTCIIGALGSFPAKTSELLLKIGIGRSELKGLLKECAISNITQSARR

SEQ ID NO: 1527 - protein, 868 aa, Schmidtea mediterranea
MTDMKWTVDKVFNNTNVSIRPTFQKIVLNFLIKSPFQGNWNNPLKFCKRSKQALNLELFSNFEIMFQLKRADNTSPGIDGIQYRDLLLLDPEGKLLTFLFNKIIINKIIPDSWKSFKTLLTPKPNKDGKYDDVSSWRPIALLSVIYKVFASCLASRLTYWINTNNLLHIGQKGGSRHDGCVEHNSILSAALEHSKYSKNCPLAIAWLDIKDAFGSVPHDYMWSLLRFIGVGEDFTSILQLLYFDTSTFYTCGPILTPNIPIKQGVKQGCPISMILFALAINPVLEAVSRSDCEPFMIGESPVKILAYADDIALIAKSVEDLQKITNIAVRTAAEIGFEYRPEKCGYLQLPKVHIDSEILINNTKIKKLLSKEFYQYLGVPVGEEPDQSPYDILDKAVSDTRKLANSELLGWQKLKAYKIFVHSRLIFPFRTREIKTSALSKSNGNSNRSVNISSQLRGCFRKMLCLPNQSEVSYFYNATENGGANCVDLLDEYHTQTITHFFRLLTSECDYARQINIDSLKFVTGPRLGIKIPSLQESLDWFNGKESKPHHSGRKTRFQRARIAVAFFEKTHNISVSFIVKDHKPSLYITTAMRGTTILTSDLRKTTSKVLHMALCDSYLSKWENSCVSNFIASAVKLSPKINKAIFRSELSEFAWNFIHRARTNTLSIFAKHHNKGDKRLCRLCHAEDETMSHAIQSCKVHLTLGAERHNDCLKLIASNLTKNSNLIVVVDHVCSLVPNSKERVDLMITDLSRKKIFLVDMKCPCDSVNNFEQVDLLNLSKYDSLKNQIQAVKPDFKVELDTCVFGSLGSIPLKTSEILVKIGVKRTELKPLLKECALSNIAHSARRWHFHKTGILVDSEKMYLFKN

SEQ ID NO: 1528 - protein, 1201 aa, Schmidtea mediterranea
MTDYLNKFFISDRKIIFTRDHNINHISVTLDDPHLFASGFIELVERLIFDKQVSHTSISESLNSFKLQQANEICQNLNLLNCKITEEITSKYFNILKLDYNFILLNTTMCSAILDDCTQYLNEHLNYECIIKAQVIFAIIAPPKYREFLLIIDYNTDEYYILNPTTLSETENHLSICKSLRNKINDIKETPGRVLNIGVYKHDIRGSGLVSKVLICAFIKHYVNDLPLVNLNLREIGNTISSLLPVIKDFKKKEQISTTTKFNKVKEGNLNLELRKIKIEQIIKKVLNFDVNQIIDVINEQFPNRLKPTHKPYLGNKKHPLKINKNTLIANFMTDMKSTVNKIFNNIDVNIRPTFQKIVSNFLIKSPFQGNWNKIFNFSKRSNVTLDLEPFSNLEVIIELKKADNTCPGIDGIQYRDLLLLDPEGKLLTLLFNKIISDKTIPDSWKTFKTLLTPKPDKEGKYDDVSSWRPIALLSVIYKVFASCLASRLTNWIDSNDLLHIGQKGGSKHDGCVEHNSILSAALEHSKYSTNKPLAIAWLDIKDAFGSVPHEYMWSLLRFIGVSEGFASIIQMLYSNTSTFYSCGHILTPNIPIRQGVKQGCPISMILFALAINPVLEAVSRSDCKPFMIGKSPVKILAYADDIALVACSVRELQKITDIAVSTAAEIGFEYRPEKCGYLHLPNVEIENVISINDIRIRQLESNEFYQYLGVPVGEDTDQNPYEILQKVVSDTKKLADSDLLGWQKLKAYKIFIHSRLIFPFRTREIKTSALSKSNCNGNISANITSQLRNSFRKILLLPQHSEICYFYNSTENGGANCVDLLDEYYTQTITHCFRLLTSKCDYAKTINVDSLKFVTGPRLGIKEPTLQESLDWLNGIDSKPQHSGKKTRFQRVRMAIAYFEKSHKMNISFIVTNHEASLYITTTTRGTYILTSDLRQTTSKVLHMALCDSYFSKWETSCHSNIIASAIRLSPIINKAIFRGDLSEFAWNFIHRARTNTLSINAKPYNKGEKRLCRRCNSEEETMSHALQSCKVHQTLASERHNNCLKLITNRLIKKPNLIVVVDHICSLVPNSKEQVDLFITDVSKKRIFLVDMKCPSDSVTSFQQVDKANLKKYDSLKNEIQAAKPDFKVELDTCIIGALGSFPAKTSEILLKIGIARSEVKGLLKECAISNIAHSARRWYYHKTDTLIEIDTNKHPISK

SEQ ID NO: 1529 - protein, 1422 aa, Schmidtea mediterranea
MSYFVDPIFLNRHSFTNKTIALKITMALNELFDLKAAMTFHPHDDFKYQNNNYDCGPFICAYAMMISGEWKSFPESFVEIIRKEVHQLKPLPQQKSPKLSGGGLPKFMEIIKRNGIKKISSASQAFLLKQNSCVSSLLSEWFKNKNNITVLSPELTSKVIAQNNRYIRENVTFKQFSGIEHVISVIPNDMNWGLYLFSLVSGISYIFNFKNRILTERLIGIGENMTDYLNKFFISDKKVIFNCDHNIDYISITLDDPHLFASAFIELVEMLIFENKVSRTSISESLNSFKIQQANEICKNLNLLNFKITEEITSKYFKILKLDDNFMLLNATMCSAILDDCTQYLNEYLNYECVIKAQVIFAIVAPPKYREFLLIIDYNTDEYYILNPTTLSESENHLSICKSLRNKINEIKETPGRVLNIGAFPHDIRGSGLVSKVLICAFIKHYVNDLPLVNLNLREIGNTISSLLPVINEYRKEQNSCTNKFNKVKACNLNLEMRKIKIAILIKKVLNFNVNQIIEVINEQFPNRIKTTHKPYLGNKKNTAHKIKKSTLIANFMTDMKSTVNKLLNNINVIIRPTFQKIVSNFLIKSPFCGNWNAIFNFSKRSNVILILEPFTNDEVMFELKKADNTCPGIDGIQYRDLLLLDPEGKLLTLLYNKIISDKTIPDSWKTFKTLLTPKPDKEGKYDDVSSWRPIALLSVIYKVFASCLASRLTRWIDSNELLHIGQKGGSKHDGCVEHNSILSAALEHSKYSTNKPLAIAWLDIKDAFGSVPHEYMWSLLRFIGVSEGFVSVIQMLYSNTSTFYSCGHIQTPNIPIVQGVKQGCPISMILFALAINPVLEAVSRSDCRPFMIGKSPVKILAYADDIALVACSVSELQKITDIAVATAAEIGFEYRPEKCGYLQLPNVDMDTVISINDIRIKRLESNEFYRYLGVPVGVDTDQNPYEILQKVVSDTKILADSELLGWQKLKAYKIFIHSRLIFPFRTREIKTYALSKPNGNSNISVNITSQLRNSLRKMLLLPKHSEVCYFYSSTENGGANCVDLLDEYHTQTITHCFRLLTSKCDFARKINTDSLKFVTGPRLGIKEPTLQEGLDWLNGKDSIPLHSAKKTRFQRVRIAIAFFARTHQIDISFAMTNHETCLYITTVMRGTVILTSDLRQTTSKVLHMALCDSYLAKWESGCTSNIIASAIRLSPMINKAIFRGDLSEFAWNFIHRARTNTLSINAKPYNKGEKRLCRRCKTEEETMSHALQSCKVHLNLASERHDNCLKLITNRLMNKSNLIVVVDHTCSLVPNSKERVDLIITDVSKKRIFLVDMKCPSDSVTTFEQVDKANLKKYENLKIEIQTVKPDFKVDLDTCIIGALGSFPAKTSELLLKIGIGRSELKGLLKECAISNITQSARRWYYHKTGTLSEPDLINFK

SEQ ID NO: 1530 - protein, 1422 aa, Schmidtea mediterranea
MSYFVDPIFLNRHSFTNKTIALKITMALNELFDLKAAMTFHPHDDFKYQNNNYDCGPFICAYAMMISGEWKSFPESFVEIIRKEVHQLKPLPQQKSPKLSGGGLPKFMEIIKRNGIKKISSASQAFLLKQNSCVSSLLSEWFKNKNNITVLSPELTSKVIAQNNRYIRENVTFKQFSGIEHVISVIPNDMNWGLYLFSLVSGISYIFNFKNRILTERLIGIGENMTDYLNKFFISDKKVIFNCDHNIDYISITLDDPHLFASAFIELVEMLIFENQVSRTSISESLNSYKIQQANEICKNLNLLNFKITEEITSKYFKILKLDDNFMLLNATMCSAILDDCTQYLNEYLNYECVIKAQVIFAIVAPPKYREFLLIIDYNTDEYYILNPTTLSETENHLSICKSLRNKINEIKETPGRVLNIGAFPHDIRGSGLVSKVLICAFIKHYVNDLPLVNLNLREIGNTISSLLPVINEYRKEQNSCTNKFNKVKEGNLNLEMRKIKIAILIKKVLNFNVNQIIDVINEQFPNRIKTTHKPYLGNKKNTAHKIKKSTLIANFMTDMKSTVNKLLNNINVIIRPTFQKIVSNFLIKSPFCGNWNAIFNFSKRSNVILILEPFTNDEVMFELKKADNTCPGIDGIQYRDLLLLDPEGKLLTLLYNKIISDKTIPDSWKTFKTLLTPKPDKEGKYDDVSSWRPIALLSVIYKVFASCLASRLTRWIDSNELLHIGQKGGSKHDGCVEHNSILSAALEHSKYSTNKPLAIAWLDIKDAFGSVPHEYMWSLLRFIGVSEGFVSVIQMLYSNTNTFYSCGHIQTPNIPIVQGVKQGCPISMILFALAINPVLEAVSRSDCRPFMIGKSPVKILAYADDIALVACSVSELQKITDIAVATAAEIGFEYRPEKCGYLQLPNVDMDTVISINDIRIKRLESNEFYRYLGVPVGVDTDQNPYEILQKVVSDTKILADSELLGWQKLKAYKIFIHSRLIFPFRTREIKTYALSKPNGNSNISVNITSQLRNSLRKMLLLPKHSEVCYFYSSTENGGANCVDLLDEYHTQTITHCFRLLTSKCDFARKINTDSLKFVTGPRLGIKEPTLQEGLDWLNGKDSIPLHSGKKTRFQRVRIAIAFFARTHQIDISFAMTNHETCLYITTVMRGTVILTSDLRQTTSKVLHMALCDSYLAKWESGCTSNIIASAIRLSPMINKAIFRGDLSEFAWNFIHRARTNTLSINAKPYNKGEKRLCRRCNSEEETMSHALQSCKVHLNLASERHDNCLKLITNRLMNKSNLIVVVDHTCSLVPNSKERVDLIITDVSKKRIFLVDMKCPSDSVTTFEQVDKANLKKYENLKIEIQTVKPDFKVDLDTCIIGALGSFPAKTSELLLKIGIGRSELKGLLKECAISNITQSARRWYYHKTGTLSEPDLINFK

SEQ ID NO: 1531 - protein, 1325 aa, Schmidtea mediterranea
MALNELFDLKAAMTFHPHNDFKYQNNNYDCGPFICAYAMMISGEWQSFPESFVEIIRKEVHQIKPLPQQKSPKLLGGGLPKFMEIIKRNGIKKISSASQAFLLKQNSCVSSLLSEWFKNKNNITVLSPELTSKVIAQNNRYIRENVTFKQFSGIEHVISVIPNDMNWGLYLFSLVSGISYIFNFKNRILTERLIGIGENMTDYLNKFFISDRKVIFNCDHNIDYISITLDDPHLFASAFIELVEMLIFENQVSQTIISESLNSFKIQQANEICKNLNLLNFKITEEITSKYFKILKLDDNFMLLNATMCSAILDDCTQYLNEYLNYECVIKAQVIFAIVAPPKYREFLLIIDYNTDEYYILNPMTLSETVNHLSNEYRKEQNSCTNKFNKVKEGNLNLEMRKIKIAILIKKVLNFNVNQIIDVINEQFPNRIKTTHKPYLCNKKTTAHKIKKSTLIANFMTDMKSTVNKLLNNINVIIRPTFQKIVSNLLIKSPFCGNWNAIFNFSKRSNVILILEPFTNDEVMFELKKADNTCPGIDGIQYRDLLLLDPEVKLLTLLYNKIIYDKTIPDSWKTFKTLLTPKPDKEGKYDDVSSWRPIALLSVIYKVFASCLASRLTRWIDSNELLHIGQKGASKHDGCVEHNSILSAALEHSKYSTNKPLAIAWLDIKDAFGSVPHEYMWSLLRFIGVSEGFVSVIQMLYSNTSTFYSCGHIQTPNIPIVQGVKQGCPISMILFALAINPVLEAVSRSDCRPFMIGKSPVKILAYADDIALVACSVSELQKITDIAVATAAEIGFEYRPEKCGYLQLPNVDMDTVISINDIQIKRLESNEFYRYLGVPVGVDTDQNPYEILQKVVSDTKILADSELLGWQKLKAYKIFIHSRLIFPFRTREIKTYALSKPNGNSNISVNITSQLRNSLRKMLLLPKHSEVCYFYSSTENGGANCVDLLDEYHTQTITHCFRLLTSKCDFARKINTDSLKFVTGPRLGIKEPTLQEGLDWLNGKDSIPLHSGKKTRFQRVRIAIAFFARTHQIDISFAMTNHETCLYITTAMRGTVILTSDLRQTTSKVLHMALCDSYLAKWESGCTSNIIASAIRLSPMINKAIFRGDLSEFAWNFIHRARTNTLSINAKPYNKGEKRLCRRCKTEEETMSHALQSCKVHLNLASERHDNCLKLITNRLMNKSNLIVVVDHTCSLVPNSKERVDLIITDVSKKRIFLVDMKCPSDSVTTFEQVDKANLKKYENLKIEIQTVKPDFKVDLDTCIIGALGSFPAKTSELLLEIGIGRSELKGLLKECAISNITQSARRWYYHKTGTLSEPDLINFK

SEQ ID NO: 1532 - protein, 1185 aa, Schmidtea mediterranea
MSDNLFKAQIILCPLNINGSHWILFVYCKLTKISYFVDPILRKRHNLINKSSALKITMALNNLFDLKAAVTFHPHDNLVYQDNNYDCGPYICAYAMLISQEWQTFPNNFIETIRKNVHRFQTTKFQNPPKVSGGGITTLPIFKRFQNVTRPPKVALPYKASLQNENSCVPSLIKEWFSNKNYITVLSPELTLNLFAHNNQFIRENVTFRQFTRVKYVIAVIPNNPHWCLYIFSPVFERSYILNFQGRVLNERLVSIGESMTDYLNKFFISTAKVNFIVNHNQTHFSFRSEDPHFFASAFIEFLERFFFGNILSFTKINETLKSFKLQITNEICKNFNLINFSINDEIITKYFKNLNLPSNFIFLNSAMCTAIMDDCTRYLNDFLNYDNIIKAQVIFAIVAPPKFREILFIIDYNTDEYYLLNPTTLLGNDNYLSTCKILRNKINEIRESPNRVLNLGECPHDIRGSGLVSKILFCSYMSNYANDLPLVGLNLRQIGNVVSSLLPILSSAFEHSKYSKNSQLAIAWLDIKDAFGSVPHAYMWSLLRFVGVDEEFVTILERMYSDTSTFYSCGPILTPNIAIRQGVKQGCPISMILFALAINPVLEAVSRSKCEPFMIGESAVKVLAYADDIALVSKSAYDLQRVTNIAVVIASEIGFEYRPEKCGYIELPLIETESQILINDIKIKRLASSEFYQYLGVPVGEETDQSPYDILKKVVSDTRKIADSDLLGWQKLKAYKIFLHSRLVFPFRTREIKTSALAKSNANNNLTVNITSQLRNCFRKMMSLPNHSEVCYFYNSTENGGANCVDLLDEYHTQTITYFFRLFTSNCEFARKVNLDSLNFVAGPRLGIINPTLQETFDWINGKEPKPRHSGKKTRFQRARIAIAFFKKEHDINIMFIVTNGKPSLFITSEKGGTFILTPDLRKTTSKVLHMALCDSYLSKWEKGCTSNFIASAIKLSPKINKAIYRGDISEFAWHFIHRARTNTLSINAKPHNKGNKRLCRLCHTEDETMSHIIQSCKIHLTLGSERHNDCLDLISSHLSKNSNLIVVVDHVCSLVPESKERVDLMITDMVRKKIFLVDMKCPCDTINNFALVDLLNLQKYDSLKMQIQDAKPDFKVELDTCIIGSLGSFPPKTPELLLKIGVDRTHLKGLLIDCALSNISHSARRWHYHKTGILVNLEKFRFN

SEQ ID NO: 1533 - protein, 1091 aa, Schmidtea mediterranea
MCTAILDDCTRHLTKFLNYEDLIKAQVIFAIIAPPKHREILLILDYNTDEYYIINPTTLCGTESYQSVCRIFRNKINEIKETPGRVINMGDIPNDIFGSGLVSKLLICAFIKNYANDLPLINLSLREIGTNISSLLPIISESKKILMSDLTKITKIKKSNLNLEQRKLKIDELLHDVSHLTVNEIIDIIIRQFPDRVKSKNKPYLGNKNRPQKINKGILVRKFMTDMKWTVDKVFNNTNVSIRPTFQKIVLNFLIKSPFHGNWNNPLNFCKRSKQALNLELFSNFEIMFQLKKADNTSPGIDGIQYRDLSLLDPEGKLLTFLFNKIIVNKIIPDSWKSFKTILTPKPNKDGKYDEVSSWRPIALLSVIYKVFASCLASRLTYWINTNNLLHIGQKGGSRHDGCVEHNSILSAALEHSKYSKNCPLAIAWLDIKDAFGSVPHDYMWSLLRFIGVGEDFTSILQLLYSDTSTFYSCGPILTPNIPIKQGVKQGCPISMILFALAINPVLEAVSRSDCEPFMIGESPVKILAYADDIALIAKSVEDLQKITNIAVTTAAEIGFEYRPEKCGYLQLPKVHIDSEILINNTKIKKLLSKEFYQYLGVPVGEEPDQSPYDILDKAVSDTRKLANSELLGWQKLKAYKIFVHSRLIFPFRTREIKTGALSKSNGNSNRSVNISSQLRGCFRKMLCLPNQSEVSYFYNATENGGANCVDLLDEYHTQTITHFFRLLTSECDYARQINIDSLKFVTGPRLGIKTPSLQESLDWFNGKESKPHHSGRKTRFQRARIAVAFFEKTHNISVSFIVKDHKPSLYITTAMRGTIILTSDLRKTTSKVLHMALCDSYLSKWEKSCVSNFIASAVKLSPKINKAIFRSELSEFAWNFIHRARTNTLSIFAKHHNKGDKRLCRLCHAEDETMSHAIQSCKVHLTLGAERHNDCLKLIASNLTKNSNLIVVVDHVCSLVPNSKERVDLMITDLSRKKIFLVDMKCPCDSVNNFEQVDLLNLRKYDSLKNQIQAVKPDFKVELDTCVFGSLGSFPLKTSEILVKIGVKRTELKPLLKECALSNIAHSARRWHFHKTGILVDPEKMYLFKN

SEQ ID NO: 1534 - protein, 1428 aa, Schmidtea mediterranea
MSYFVDPIFSNRHSFTNKTIALKITMALNELFDLKAAMTFHPHDDFKYQNNNYGCGPFICAYAMMISGEWQSFPESFVEIIRKEVHQFKLFPQQKDPKKSGGGLPKFMEIIKRNGIKKISSATQAFLLKQNSCVSSLLSEWFKNKNNTTVLSPELTSKVIAQNNRYIRENVTFKQFSGIEHVISVIPNDMNWGLYLFSLVSGISYLFNFRNRILTERLIGIGENMTDYLNKFFISDKKVTFNRDHNIDHISITLDDPHLFASAFIELVEMLIFENQVSRTSISESLNSFKIHQANEICKNLNLLNFKITEEITSKYFKILKLDDNFMLLNATMCSAILDDCTQYLNEYLNYECVIKAQVIFAIVAPPKYREFLLIIDYNTDEYYILNPTTLSETENHLFICKSLRNKLNEIKETPGRVLNIGVFLHDIRGSGLVSKVLICAFIKHYVNDLPLVNLNLREIGNTISSLLPVINVYKKEQNSCTTKLNKVNEGNIKLEMRKIKIAILIKKVSNSNVNQIIDVINEQFPNRIKATHKPYLGNKKNTAHKINKSILIANFMTDMKSTVNKLLNNIDVSIRPTFQKIVSNFLIKSPFRGNWNAIFNFSKRSSVILNLEPFTNDEVMFELKKANNTSPGIDGIQYRDLSLLDPEGKLLTLLYNKIISDKTIPDSWKTFKTLLTPKPDKEDKYDYVSSWRPIALLSVIYKVFASCLASRLTRWIDLNELLHIGQKGGSKHDGCVEHNSILSAALEHSKYSTNKPLAIAWLDIKDAFGSVPHEYMWSLLRFIGVSEGFAFVIQMLYSNTSTFYSCGHIQTPNIPIVQGVKQGCPISMILFALAINPVLEAVSRSDCRPFMIGKSPVKILAYADDIALVACSVSELQKITDIAVATAAEIGFEYRPEKCGYLQLPNVEMDTAISINDIRIKRLESNEFYRYLGVPVGVDTDQNPYEILQKVVSDTKILADSDLLGWQKLKAYKIFVHSRLIFPFRTREIKTYALSKPNGNSNISVNITSQLRNSFRKMLLLPKHSEVCYLYNSTENGGANCVDVLDEYHTQTVTHCFRLLTSKCDFARKINTDSLKFFTGPRLGIKEPTLQEGLDWLNGKDSIPLHSGKKTRFQRVRIAIAFFARTHQIDISFAMTNHETSLYITTAMRGTMILTSELRQTTSKVLHMALCDSYLVKWESGCTSNIIASAIRLSPMINKAIFRGDLSEFAWNFIHRARTNTLSVNAKPYNKGEKRLCRRCNSEEETMSHALQSCKVHQTLASERHNNCLKLITNRLMKKPNLIVVVDHICSLVPNSKERVDLFITDISKKRIFLVDMKCSNDSVTSFENVDKANLKKYDSLKNEIQAVKPDFKIELDTCIIGALGSFPAKTSEILLKIGIARSEVQGLLKECANSNITHSARRWYYHKTGTLVEIDTDKHPIKNIKK

SEQ ID NO: 1535 - protein, 1429 aa, Schmidtea mediterranea
MSYFVDPIFSNRHSFTNKTIALKITMALNELFDLKAAMTFHPHDDFKYQNNNYDCGPFICAYAMMISGEWQSFPESFVEIIRKEVHQFKLFPQQKDPKISGGGLPKFMEIIKRNGIKKISSATQAFLLKQNSCVSSLLSEWFKNKNNTTVLSPELTSKVIAQNNRYIRENVTFKQFSGIEHVISVIPNDMNWGLYLFSLVSGISYIFNFRNRILTERLIGIGENMTDYLNKFFISDKKVTFHRDHNIDHISITLDDPHLFASAFIELVEMLIFENQVSRTSISESLNSFKIHQANEICKNLNLLNFKITEEITSKYFKILKLDDNFMLLNATMCSAILDDCTQYLNEYLNYECVIKAQVIFAIVAPPKYREFLLIIDYNTDEYYILNPTTLSETENHLFICKSLRNKLNEIKETPGRVLNIGVFPHDIRGSGLVSKVLICAFMKHYVNDLPLVNLNLREIGNTISSLLPVINVYKKEQNSCTTKLNKVNEGNLNLEMRKIKIAILIKKVSNFNVNQIIDVINEQFPNRIKATHKPYLGNKKKNTAHKINKSILIANFMTDMKSTVNKLLNNIDVSIRPTFEKIVSNFLIKSPFRGNWNAIFNFSKRSSVILNLEPFTNDEVMFELKKANNTSPGIDGIQYRDLSLLDPEGKLLTLLYNKIISDKIIPDSWKSFKTLLTPKPDKEDKYDDVSSWRPIALLSVIYKVFASCLASRLTRWIDLNELLHIGQKGGSKHDGCVEHNSILSAALEHSKYSTNKPLAIAWLDIKDAFGSVPHEYMWSLLRFIGVSEGFASVIQMLYSNTSTFYSCGHIQTPNIPIVQGVKQGCPISMILFALAINPVLEAVSRSDCRPFMIGKSPVKILAYADDIALVACSVSELQKITDIAVATAAEIGFEYRPEKCGYLQLPNVEMDTAISINDIRIKRLESNEFYRYLGVPVGVDADQNPYEILQKVVSDTKILADSDLLGWQKLKAYKIFVHSRLIFPFRTREIKTYALSKPNGNSNISVNITSQLRNSFRKMLLLPKHSEVCYLYNSTENGGANCVDVLDEYHTQTITHCFRLLTSKCDFARKINTDSLKFVTGPRLGIKEPTLQEGLDWINGKDSIPLHSGKKTRFQRVRIAIAFFARTHQIDISFAMTNHETSLYITTAMRGTMILTSDLRQTTSKVLHMALCDSYLVKWETGCTSNIIASAIRLSPMINKAIFRGDLSEFAWNFIHRARTNTLSVNAKPYNKGEKRLCRRCNSEEETMSHALQSCKVHQTLASERHNNCLKLITNRLMKKPNLIVVVDHICSLVPNSKERVDLFITDVSKKRIFLVDMKCSNDSVTSFENVDKANLKKYDSLKNEIQAVKPDFKIELDTCIIGALGSFPAKTSEILLKIGIARSEVQGLLKECAISNITHSARRWYYHKTGTLVEIDTDKHPIKNIKK

SEQ ID NO: 1536 - protein, 1284 aa, Schmidtea mediterranea
MNGLKIKNNTTVLSPELTSKVIAQNNRYIRENVTFKQFSGIEHVISVIPNDMNWGLYLFSLVSGISYIFNFRNRTLTERLIGIGENMTDYLNKFFISDKKVTFNRDHNIDHISITLDDPHLFASAFIELVEMLIFENQISRTSISESLNSFKIQQANEICKNLNLLNFKITEEITSKYFKILKLDDNFMLLNATMCSAILDDCTQYLNEYLNYECVIKAQVIFAIVAPPKYREFLLIIDYNTDEYYILNPTTLSETENHLFICKSLRNKLNEIKETPGRVLNIGVFPHDIRGSGLVSKVLICAFIKHYVNDLPLVNLNLREIGNTISSLLPVINEYKKEQNSCKTKFNKINKGNLNLEMRKIKIAILIKKVLNFNVNQIIDVINEQFPNRIKTTHKPYLGNKKNTAHKINKGILIANFMTDMKSTVNKILNNIDVSIRPTFQKIVSNFLIKSPFRGNWNAIFNFSKRSSVILNLEPFTNDEVMLELKKADNTSPGIDGIQYRDLLLLDPEGKLLTLLYNKIISDKTIPDSWKTFKTLLTPKPDKEDKYDDVSSWRPIALLSVIYKVFASCLASRLTRWIDLNELLHIGQKGGSKHDGCVEHNSILSAALEHSRYSTNKPLAIAWLDIKDAFGSVPHEYMWSLLRFIGVSEGFAYVIQMLYSNTSTFYSCGHIQTPNIPIVQGVKQGCPISMILFSLAINPVLEAVSRSDCRPFMIGKSQVKILAYADDIALVACSVSELQKITDIAVATAAEIGFEYRPEKCGYLQLPNVDMDTVISINDIRIKRLESNEFYRYLGVPVGMDTDQNPYEILQKVVSDTKILADSDLLGWQKLKAYKIFVHSRLIFPFRTREIKTYALSKPNGNSNISVNITSQLRNSFRKMLLLPKHSEVCYFYSSTENGGANCVDLLDEYHTQTITHCFRLLTSKCDFARKINTDSLKFVTGPRLGIKEPTLQEGLDWLNGKDSIPLHSGKKTRFQRVRIAISFFARTHQIDISFAITNHETSLYITTAMHGTVILTSDLRQTTSKVLHMALCDSYLVKWESGCTSNIIASSIRLSPMINKAIFRGDLSEFAWNFIHRARTNTLSINAKPYNKGEKRLCRRCNSEEETMSHVLQSCKVHLVLASERHDNCLKLITNRLMNKPNLIVVVDHTCALVPNSKERVDLIITDVSKKRIFLVDMKCPSDSVTTFERIDKVNLEKYENLKKEIQTAKPDFKVDLDTCIIGALGSFPAKTSELLLKIGIGRSELKGLLKECAISNITQSARRWYYHKTGTLSEPDQINFK

SEQ ID NO: 1537 - protein, 1480 aa, Schmidtea mediterranea
MFYRRNFKSNCKDEIFPMPDNLFKAQIILCPLNINESHWILFVYCKLTKISYFVDPILRKRHNLINKSSALKITMALNNLFDLKAAVTFHPHDNLVYQDNNYDCGPYICAYAMLISQEWQTFPNNFIETIRKNVHRFQTTKFQNPPKVSGGGITTLPIFKRFQNVTRPPKVALPYKASLQNENSCVPSLIKEWFSNKNYITVLSPELTLNLIAHNNQFILSIYYIRENVTFRQFTRVKYVIAVIPNNPHWCLYIFSPVFERSYILNFQGRVLNERLVSIGETMTDYLNKFFISTAKVNFIVNHNQTHFSFRSEDPHFFASAFIEFLERFFFGNILSFTKINETLKSFKLQITNEICKNLNLINFSINDEITTKYFKNLNLPSNFIFLNSAMCTAIMDDCTRYLNDFLNYDNIIKAQVIFAIVAPPKFREILFIIDYNTDEYYLLNPTTLLGNDNYLSTCKILRNKINEIRESPNRVLNLGECPHNIRGSGLVSKILFCSYMSNYANDLPLVGLNLRQIDNVVSSFLPIVSEIKKVKSLENNIIIENHKESENLKERKNKIDQLLIKVFKMNVDEIVDVILDQISIKTVPTHKPYLGNIERVESQINKSNLIKNFNSDMKTTVNTIINDVDVDVRPKYENIITNFEHKIPLDRTWDKVFKFCNRSDKKLKLKYLSNSEVLFELKKADNTSPGVDGIKYRDLVMLDLEGKLLTFLFNKIISKKVIPDSWKSFKTLLIPKPGKGDKYDSVSSWRPIALFSVIYKLFASCLANRLTFWINKNNLLHIGQKGGSRHDGCVEHNSILLSALEHSKYSKNSQLAIAWLDIKDAFGSVPHAYMWSLLRFVGVDEEFVTILERMFSDTSTFYSCGPILTPNIAIRQGVKQGCPISMILFALAINPVLEAVSRSKCEPFMIDESAVKILAYADDIALVSKSAYELQRVTNIAVVIASEIGFEYRPEKCVYIELPLIETESQILINDIKIKRLASSEFYQYLGVPVGEETDQSPYDILKKVVSDTRKIADSDLLGWQKLKAYKIFLHSRLVFPFRTREIKTSALAKSNANNNLTVNITSQLRNCFRKMMSLPNHSEVCYFYNSTENGGANCVDLLDEYHTQTITHFFRLFTSNCEFARKVNLDSLNFVAGPRLGIINPTLQETFDWINGKEPKPRHSGKKTRFQRARIAIAFFKKEHDINIMFIVTKGQPSLFITSEKRGTFILTPDLRKTTSKVLHMALCDSYLSKWEKGCTSNFIASAIKLSPKINKAIYRGDISEFAWHFIHRARTNTLSINAKPHNKGNKRLCRLCHTEDETMSHIIQSCKIHLTLGSEKHNDCLELISSHLSKNSNLIIVVDHVCSLVPESKERVDLMITDMVRKKIFLVDMKCPCDTINNFALVDLLNLQKYDSLKMQIQDAKPDFKVELNTCIIGSLGSFPPKTPELLLKIGVDRTHLKGLLKDCALSNISHSARRWHYHKTGILVNLEKFRFN

SEQ ID NO: 1538 - protein, 869 aa, Schmidtea mediterranea
MTDMKSTVNKIFNNIDVNIRPTFQKIVSNFLIKSPFQGNWNKIFNFSKRSNVTLGLEPFSNLEVIIELKKADNTCPGIDGIQYRDLLLLDPEGKLLTLLFNKIISDKTIPDSWKTFKTLLTPKPDKEGKYDDVSSWRPIALLSVIYKVFASCLASRLTNWIDSNDLLHIGQKGGSKHDGCVEHNSILSAALEHSKYSTNKPLAIAWLDIKDAFGSVPHEYMWSLLRFIGVSEGFASIIQMLYSNTSTFYSCGHILTPNISIRQGVKQGCPISMILFALAINPVLEAVSRSDCKPFMIGKSPVKILAYADDIALVACSVRELQKITDIAVSTAAEIGFEYRPEKCGYLHLPNVEIENVISINDIRIRQLESNEFYQYLGVPVGEDTDQNPYEILQNVVSDTKKLADSDLLGWQKLKAYKIFIHSRLIFPFRTREIKTSALSKSNCNGNISANITSQLRNSFRKILLLPQHSEICYFYNSTENGGANCVDLLDEYYTQTITHCFRLLTSKCDYAKTINVDSLKFVTGPRLGIKEPTLQESLDWLNGIDSKPQHSGKKTRFQRVRMAIAYFEKSHKMNISFIVTNHEASLYITTTTRGTYILTSDLRQTTSKVLHMALCDSYFSKWETSCHSNIIASAIRLSPIINKAIFRGDLSEFAWNFIHRARTNTLSINAKPYNKGEKRLCRRCNSEEETMSHALQSCKVHQTLASERHNNCLKLITNRLMKKPNLIVVVDHICSLVPNSKERVDLFITDVSKKRIFLVDMKCPSDSVTSFQQVDKANLKKYDSLKNEIQAAKPDFKVELDTCIIGALGSFPAKTSEILLKIGIARSEVKGLLKECAISNIAHSARRWYYHKTGTLIEIDTDKHPISK

SEQ ID NO: 1539 - protein, 1425 aa, Schmidtea mediterranea
MSYFVDPIFLNRHSFTNKTIALKITMALNELFDLKAAMTFHPHDDFKYQNNNYDCGPFICAYAMMISGEWQSFPESFVEIIRKEVHQLKSLPQQKGPKISGGGLPKFMEIIKRNGVKKISNSSQAFLLKQNSCISSLLREWFKNKSNTTVLSPELTLKIIAQNKTFIRENVTFKQFSGIDHVISVIPNDTNWCLYLFSLVSGFSYIFNFKNKLLTERLIGIGENMTDYLNKFFISDRKIIFNRDHNINHISVTLDDPHLFASAFIELVERLIFDKQVSHTSISESLNSFKLQQANEICQNLNLLNCKITEEITSKYFNILKLDYNFILLNTTMCSAILDDCTQYLNEHLNYECIIKAQVIFAIIAPPKYREFLLIIDYNTDEYYILNPTTLSETENHLSICKSLRNKINDIKETPGRVLNIGVYKHDIRGSGLVSKVLICAFIKHYVNDLPLVNLNLREIGNTISSLLPVIKDFKKKEQISTATKFNKVKEGNLNLELRKIKIEQIIRKVLNFDVNQIIDVINEQFPNRLKPTHKPYLGNKKHPLKINKNTLIANFMTDMKSTVNKIFNNIDVNIRPTFQKIVSNFLIKSPFQGNWNKIFNFSKRSNVTLDLEPFSNLEVIIELKKADNTCPGIDGIQYRDLLLLDPEGKLLTLLFNKIISDKTIPDSWKTFKTLLTPKPDKEGKYDDVSSWRPIALLSSIYKVFASCLASRLTNWIDSNDLLHIGQKGGSKHDGCVEHNSILSAALEHSKYSTNKPLAIAWLDIKDAFGSVPHEYMWSLLRFIGVSEGFASIIQMLYSNTSTFYSCGHILTPNIPIRQGVKQGCPISMILFALAINPVLEAVSRSDCKPFMIGKSPVKILAYADDIALVACSVRELQKITDVAVSTAAEIGFEYRPEKCGYLHLPNVEIENGISINDIRIRQLESNEFYQYLGVPVGEDTDQNPYEILQKVVSDTKKLADSDLLGWQKLKAYKIFIHSRLIFPFRTREIKTSALSKSNCNGNISANITSQLRNSFRKILLLPQHSEICYFYNSTENGGANCVDLLDEYYTQTITHCFRLLTSKCDYAKKINVDSLKFVTGPRLGIKEPTLQESLDWLNGIDSKPQHSGKKTRFQRVRMAIAYFEKSHKMNISFIVTNHEASLYITTTTRGTYILTSDLRQTTSKVLHMALCDSYFSKWETSCHSNITASAIRLSPIINKAIFRGDLSEFAWNFIHRARTNTLSINAKPYNKGEKRLCRRCNSEEETMSHALQSCKVHQTLASERHNNCLKLITNRLMKKPNLIVVVDHICSLVPNSKERVDLFITDVSKKRIFLVDMKCPSDSVTSFQQVDKANLKKYDSLKNEIQAVKPDFKVELDTCIIGALGSFPAKTSEILLKIGIARSEVKGLLKECAISNIAHSARRWYYHKTGTLVEIDTDKHPLSK

SEQ ID NO: 1540 - protein, 1093 aa, Schmidtea mediterranea
MCSAILDDCTQYLNEHLNYECIIKAQVIFAIIAPPKYREFLLIIDYNTDEYYILNPTTLSETENHLSICKSLRNKINDIKETPGRVLNIGVYKHDIRGSGLVSKVLICAFIKHYVNDLPLVNLNLREIGNTISSLLPVIKDFKKKEQISTATKFNKVKEGNLNLELRKIKIEQIIKKVLNFDVNQIIDVINEQFPNRLKPTHKPYLGNKKHPLKINKNTLIANFMTDMKSTVNKIFNNIDVNIRPTFQKIVSNFLIKSPFQGNWNKIFNFSKRSNVTLDLEPFSNLEVIIELKKADNTCPGIDGIQYRDLLLLDPEGKLLTLLFNKIISDKTIPDSWKTFKTLLTPKPDKEGKYDDVSSWRPIALLSSIYKVFASCLASRLTNWIDSNDLLHIGQKGGSKHDGCVEHNSILSAALEHSKYSTNKPLAIAWLDIKDAFGSVPHEYMWSLLRFIGVSEGFASIIQMLYSNTSTFYSCGHILTPNIPIRQGVKQGCPISMILFALAINPVLEAVSRSDCKPFMIGKSPVKILAYADDIALVACSVRELQKITDVAVSTAAEIGFEYRPEKCGYLHLPNVEIENGISINDIRIRQLESNEFYQYLGVPVGEDTDQNPYEILQKVVSDTKKLADSDLLGWQKLKAYKIFIHSRLIFPFRTREIKTSALSKSNCNGNISANITSQLRNSFRKILLLPQHSEICYFYNSTENGGANCVDLLDEYYTQTITHCFRLLTSKCDYAKKINVDSLKFVTGPRLGIKEPTLQESLDWLNGIDSKPQHSGKKTRFQRVRMAIAYFEKSHKMNISFIVTNHEASLYITTTTRGTYILTSDLRQTTSKVLHMALCDSYFSKWETSCHSNIIASAIRLSPIINKAIFRGDLSEFAWNFIHRARTNTLSINAKPYNKGEKRLCRRCNSEEETMSHALQSCKVHQTLASERHNNCLKLITNRLMKKPNLIVIVDHICSLVPNSKERVDLFITDVSKKRIFLVDMKCPSDSVTSFQQVDKANLKKYDSLKHEIQAAKPDFKVELDTCIIGALGSFPAKTSEILLKIGIARSEVKGLLKECAISNIAHSARRWYYHKTGTLVEIDTDKHPISK

SEQ ID NO: 1541 - protein, 1199 aa, Schmidtea mediterranea
MTEYLNKFIISNRKVIFISEHNIEHASITSDDSLLFASAFIILIESLIFSKQVSHTRTSEFLKSVKIKQANEICLNLNSINCKINEEITAKYFSNLKLNSNFMLLNETMCTAILDDCTRHLTKFLNYEDLIKAQVIFAIIAPPKHREILLIIDYITDEYYIINPTTLCGTESSQSVCRIFRNKINEIKETPGRVINMGDIPNDIRGSGLVSKLLICAFIKNYANDLPLINLNLREIGTNISSLLPIISESKKILMSDLTKITKIKKSNLNLEQRKLKIDELLHDVSHLTVNEIIDIIVRQFPDRVKSKHKPYLGNKTRPQKINKGILVRKFMTDMKWTVDKVFNNTNVSIRPTFQKIVLNFLIKSPFQGNWNNPLNFCKRSKQALNLELFSNFEIMFQLKRADNTSPGIDGIQYRDLLLLDPEGKLLTFLFNKIIVNKIIPDSWKSFKTLLTPKPNKDGKYDDVSSWRPIALLSVIYKVFASCLASRLTYWINTNNLLHIGQKGGSRHDGCVEHNSILSAALEHSKYSKNCPLAIAWLDIKDAFGSVPHDYMWSLLRFIGVGEDFTSILQLLYSDTSTFYSCGPILTPNIPIKQGVKQGCPISMILFALAINPVLEAVSRSDCEPFMIGESPVKILAYADDIALIAKSVEDLQKITNIAVRTAAEIGFEYRPEKCGYLQLPKVHIDSEILINNTKIKKLLSKEFYQYLGVPVGEEPDQSPYDILDKAVSDTRKLANSELLGWQKLKAYKIFVHSRLIFPFRTREIKTGALSKSNGNNNRSVNISSQLRGCFRKMLCLPNQSEVSYFYNATEKGGANCVDLLDEYHTQTITHFFRLLTSECDYARQINIDSLKFVTGPRLGIKTPSLQESLDWFNGKESKPHHSGRKTRFQRARIAVAFFEKTHNISVSFIVKDHKPSLYITTAMRGTIILTSDLRKTTSKVLHMALCDSYLSKWEKSCVSNFIASAVKLSPKINKAIFRSELSEFAWNFIHRARTNTLSIFAKHHNKGDKRLCRLCHAEDETMSHAIQSCKVHLTLGAERHNDCLKLIASNLTKNSNLIVVVDHVCSLVPNSKERVDLMITDLSRKKIFLVDMKCPCDSVNNFEQVDLLNLRKYDSLKNQIQAVKPDFKVELDTCVFGSLGSFPLKTSEILVKIGVKRTELKPLLKECALSNIAHSARRWHFHKTGILVDPEKMYLFKN

SEQ ID NO: 1542 - protein, 1398 aa, Schmidtea mediterranea
MALNQLFNLKAAMTFHPHENFLYQENSYDCGPYICAYAMMISGVWQSFPDHFIDIIRKEVHQLQLFCQQKDQKVSGGGLPKFMEIIKRNGVRKTSSATQAFLLKQNSCISSLLDEYFKTRTNTTVLSPELTMNIVAQNLTFIRENVTFRQFTGIDHIISIVPNDSNWSLFVFSLVLGNSYIFNFHDRIVTERLIAIGENMTEYLNKFIISNRKVIFISEHNIEHASITSDDSLLFASAFIILIESLIFSKQVSHTRTSEFLKSVKIKQANEICLNLNSINCKINEEITAKYFSNLKLNSNFMLLNETMCTAILDDCTRHLTKFLNYEDLIKAQVIFAIIAPPKHREILLIIDYITDEYYIINPTTLCGTESSQSVCRIFRNKINEIKETPGRVINMGDIPNDIRGSGLVSKLLICAFIKNYANDLPLINLNLREIGTNISSLLPIISESKKILMSDLTKITKIKKSNLNLEQRKLKIDELLHDVSHLTVNEIIDIIVRQFPDRVKSKHKPYLGNKTRPQKINKGILVRKFMTDMKWTVDKVFNNTNVSIRPTFQKIVLNFLIKSPFHGNWNNPLNFCKRSKQALNLELFSNFEIMFQLKRADNTSPGIDGIQYRDLLLLDPEGKLLTFLFNKIIVNKIIPDSWKSFKTLLTPKPNKDGKYDDVSSWRPIALLSVIYKVFASCLASRLTYWINTNNLLHIGQKGGSRHDGCVEHNSILSAALEHSKYSKNCPLAIAWLDIKDAFGSVPHDYMWSLLRFIGVGEDFTSILQLLYSDTSTFYSCGPILTPNIPIKQGVKQGCPISMILFALAINPVLEAVSRSDCEPFMIGESPVKILAYADDIALIAKSVEDLQKITNIAVRTAAEIGFEYRPEKCGYLQLPKVHIDSEILINNTKIKKLLSKEFYQYLGVPVGEEPDQSPYDILDKAVSDTRKLANSELLGWQKLKAYKIFVHSRLIFPFRTREIKTGALSKSNGNNNRSVNISSQLRGCFRKMLCLPNQSEVSYFYNATEKGGANCVDLLDEYHTQTITHFFRLLTSECDYARQINIDSLKFVTGPRLGIKTPSLQESLDWFNGKESKPHHSGRKTRFQRARIAVAFFEKTHNISVSFIVKDHKPSLYITTAMRGTIILTSDLRKTTSKVLHMALCDSYLSKWEKSCVSNFIASAVKLSPKINKAIFRSELSEFAWNFIHRARTNTLSIFAKHHNKGDKRLCRLCHAEDETMSHAIQSCKVHLTLGAERHNDCLKLIASNLTKNSNLIVVVDHVCSLVPNSKERVDLMITDLSRKKIFLVDMKCPCDSVNNFEQVDLLNLRKYDSLKNQIQAVKPDFKVELDTCVFGSLGSFPLKTSEILVKIGVKRTELKPLLKECALSNIAHSARRWHFHKTGILVDPEKMYLFKN

SEQ ID NO: 1543 - protein, 1449 aa, Schmidtea mediterranea
MPDNLLKAQIILCPLNINESHWILFVYCKLTKISYFVDPILRKRHNLINKSSALKITMALNNLFDLKAAVTFHPHDNLVYQDNNYDFGPYICAYAMLISQEWQTFPNNFIETIRKNVHRFQTSKFQNPPKVSGGGITTLPIFKRFQNVTRPPKVALPYKASLQNENSCVPSLIKEWFSNKNYITVLSPELTLNLIAHNNQFIRENVTFRQFTILKYVIAVIPNNPHWCLYIFSPVFEHSFILNFQGRVLNERLVSIGESMTDYLNKFFISTAKVNFIVNHNQTHFSFRSEDPHFFASAFIEFLERFFFGNILSFTKINETLKSFKLQITNEICKNLNLINFSINDEIITKYFKNFNLPSNFIFLNSAMCTAIMNDCTRYLNDFLNYDNIIKAQVIFTTVAPPKFREILFIIDYNTDEYYLLNPTTLLGNDNYLSTCKILRNKINEIRESPNRVLNLGECPHDIRGSGLLSKILFCSYMSNYANDLPLVGLNLRQIGNVVSSFLPIVSEIKKVKSLKNNIINQNHRESENLKERKNKIDQLLIKVFKMNVDEIVDVILDQISIKTVPIHKPYLGNKERVESQINKSNLIKNFNSDMKTTVNTIINDVDVDVRPKYENIITNFENKIPLDRTWDKVFKFCNRSDKKLKFKYLSNSEVLFELKKADNTSPGVDGIKYRDLVMMEHEGKLLTFLFNKIISKKVIPDSWKSFKTLLIPKPDKGDKYDNVSSWRPIALLSVIYKLFASCLANRLTFWINKNNLLHIGQKGGSRHDGCVEHNSILSSALEHSKYSKNSQLAIAWLDIKDGFGSVPHAYMWSLLRFVGVDEEFVTILERMYSDTSTFYSCGLILTPNIAIRQSMTLFALAINPVLEAVSRSKCEPFMIGESAVKILAYADDIALVSKSAYDLQRVTNIAVAIASEIGFEYRPEKCGYIELPLIETESQILINDIKIKRLASSEFYQYLGVPVGEETDQSPYDILKKVVSDTRKIADSDLLGWPKLKAYKIFLHSRLVFPFRTREIKTGALAKSNANNNLTVNITSQLRNCFRKMMSLPNHSEVCYFYNLTENGGANCVDLLDEYHTQTITHFFRLFTSSCKFARKVNLDSLNFVAVPRLGIINPTLQERFDWINGKEPKPRHSGKKTRFQRARIAIAFFKKEHDINIMFIVTKGQPSLFITSEKRGKFILTPDLRKTTSKDLHMALCDSYPSKWEKGCTSNFIASAIKLSPKINKAIYRGDISEFAWHFIHLARTNTLSINAKPHSKGNKRLCRLCHTEDETMSHIIQSCKIHLTLGSERHNDCLDLISSYLSKNSNLIVVVDHVCSLVPESKERVDLMITDMVRKKIFLVDMKCPCDTINNFALVDLLNLQKFDSLKMQIQDAKPDFKVELDTCIIGSLGSFPPKTPELLLKIGVDRTHLKGLLKDCALSNISHSARRWHYHKTGILVNLEKFRFN

SEQ ID NO: 1544 - protein, 1199 aa, Schmidtea mediterranea
MTDYLNKFFISTAKVNFIVNHNQTHFSFRSEDPHFFASAFIEFLERFFFGNILSFTKINETLKSFKLQITNEICKNLNLINFSINDEIITKYFKNLNLPSNFIFLNSAMCTAIMDDCTRYLNDFLNYDNIIKAQVIFAIVAPPKFREILFIIDYNTDEYYLLNPTTLLGNDNYLSTCKILRNKINEIRESPNRVLNLGECPHDIRGSGLVSKILFCSYMSNYANDLPLVGLNLRQIGNVVSSFLPIVSEIKKVKSLENNIINENHKESENLKERKNKIDQLLIKVFKMNVDEIVDVILDQISIKTVPTHKPYLGNIERVESQINKSNLIKNFNSDMKTTVNTIINDVDVDVRPKYENIITNFEHKIPLDRTWDKVFKFCNRSDKKLKLKYLSNSEVLFELKKADNTSPGVDGIKYRDLVMLDPEGKLLTFLFNKIISKKVIPDSWKSFKTLLIPKPGKGDKYDSVSSWRPIALLSVIYKLFASCLANRLTFWINKNNLLHIGQKGGSRHDGCVEHNSILSSALEHSKYSKNSQLAIAWLDIKDAFGSVPHAYMWSLLRFVGVDEEFVTILERMYSDTSTFYSCGPILTPNIAIRQGVKQGCPISMILFALAINPVLEAVSRSKCEPFMIGESPVKILAYADDIALVSKSAYDLQRVTNIAVVIASEIGFEYRPEKCGYIELPLIETESQIYINDIKIKRLASSEFYQYLGVPVGEETDQSPYDILKKVVSDTRKVADSDLLGWQKLKAYKIFLHSRLVFPFRTREIKTSALAKSNANNNLTVNITSQLRNCFRKMMSLPNHSEVCYFYNSTENGGANCVDLLDEYHTQTITHFFRLFTSNCEFARKINLDSLNFVAGPRLGIINPTLQETFDWINGKEPKPWHSGKKTRFQRARIAIAFFKKEHDINIMFIVTKGQPSLFITSEKRGTFILTPDLRKTTSKVLHMALCDSYLSKWEKGCTSNFIASAIKLSPKINKAIYRGDISEFAWHFIHRARTNTLSINAKPHNKGNKRLCRLCHTEDETMSHIIQSCKIHLTLGSERHNDCLDLISSHLSKKNSNLIVVVDHVCSLVPESKERVDLMITDMVRKKIFLVDMKCPCDTINNFALVDLLNLQKYDSLKMQIQDAKPDFKVELDTCIIGSLGSFPPKTPELLLKIGVDRTHLKGLLKDCALSNISHSARRWHYHKTGILVNLEKFRFN

SEQ ID NO: 1545 - protein, 1370 aa, Schmidtea mediterranea
MGMDRYGSVWIGTDRCGSVRNFIETIRKNVHRFQTTKFQNPPKVSGGGITTLPIFKRFQNVTRPPKIALPYKASLQNENSCVPSLIKEWFSNKNYITVLSPELTLNLIAHNNQFIRENVTFRQFTRVKYVIAVIPNNPHWCLYIFSPVFERSYILNFQGRVLNERLVSIGESMTDYLNKFFISTAKVNFIVNHNQTHFSFRSEDPHFFASAFIEFLERFFFGNILSFTKINETLKSFKLQITNEICKNLNLINFSINDEIITKYFKNLNLPSNFIFLNSAMCTAIMDDCTRYLNDFLNYDNIIKAQVIFAIVAPPKFREILFIIDYNTDEYYLLNPTTLLGNDNYLSTCKILRNKINEIRESPNRVLNLGECPHDIRGSGLVSKILFCSYMSNYANDLPLVGLNLRQIGNVVSSFLPIVSEIKKVKSLENNIINENHKESENLKERKNKIDQLLIKVFKMNVDEIVDVILDQISIKTVPTHKPYLGNIERVESQINKSNLIKNFNSDMKTTVNTIINDVDVDVRPKYENIITNFEHKIPLDRTWDKVFKFCNRSDKKLKLKYLSNSEVLFELKKADNTSPGVDGIKYRDLVMLDPEGKLLTFLFNKIISKKVIPDSWKSFKTLLIPKPGKGDKYDSVSSWRPIALLSVIYKLFASCLANRLTFWINKNNLLHIGQKGGSRHDGCVKHNSILLSALEHSKYGKNSQLAIAWLDIKDAFGSVPHAYMWSLLRFVGVDEEFVTILERMYSDTSTFYSCGPILTPNIAIRQGVKQGCPISMILFALAINPVLEAVSRSKCEPFMIGESAVKILAYADDIALVSKSAYDLQRVTNIAVVIASEIGFEYRPEKCGYIEIPLIETESQILINDIKIKKLASSEFYQYLGVPVGEETDQSPYDILKKVVSDTRKIADSDLLGWQKLKAYKIFLHSRLVFPFRTREIKTSALAKSNANNNLTVNMTSQLRNCFRKMMSLPNHSEVCYFYNSTENGGANCVDLLDENHTQTITHFFRLFTSNCEFARKVNLDSLNFVAGPRLGIINPTLQETFDWINGKEPKPRHSGKKTCFQRARIAIAFFKKEHDINIMFIVNKGQPSLFITSEKRGTFILTPDLRKNTSKVLHMALCDSYLSKWEKGCTSNFIASAIKLSPKINKAIYRGDISEFAWHFIHRARTNTLSINAKPHNKGNKRLCRLCHTEDETMSHIIQSCKIHLTLGSERHNDCLDLISSHLSKNSNLIVVVDHVCSLVPESKERVDLMITDMVRKKIFLVDMKCPCDTINNFALVDLLNLQKYDSLKMQIQDAKPDFKVELDTCIIGSLGSFPPKTPELLLKIGVDRTHLKGLLKDCALSNISHSARRWHYHKTGILVNLEKFRFN

SEQ ID NO: 1546 - protein, 1090 aa, Schmidtea mediterranea
MCTAIMDDCTRYLNDFLNYDNIIKAQVIFAIVAPPKFREILFIIDYNTDEYYLLNPTTLLGNDNYLSTCKILRNKINEIRESPNRVLNLGECPHDIRGSGLVSKILFCSYMSNYANDLPLVGLNLRQIGNVVSSFLPIASEIKKVKSLENNIINENHKESENLKERKNKIDQLLIKVFKMNVDEIVDVILDQISIKTVPTHKPYLGNIERVESQINKSNLIKNFNSDMKTTVNTIINDVDVDVRPKYENIITNFEHKIPLDRTWDKVFKFCNRSDKKLKLKYLSNSEVLFELKKADNTSPGVDGIKYRDLVMLDPEGKLLTFLFNKIISKKVIPDSWKSFKTLLIPKPGKGDKYDSVSSWRPIALLSVIYKLFASCLANRLTFWINKNNLLHIGQKGGSRHDGCVEHNSILSSALEHSKYSKNSQLAIAWLDIKDAFGSVPHAYMWSLLRFVGVDEEFVTILERMYSDTSTFYSCGPILTPNIAIRQGVKQGCPISMILFALAINPVLEAVSRSKCEPFMIGESAVKILAYADDIALVSKSAYDLQRVTNIAVVIASEIGFEYRPEKCGYIELPLIETESQILINDIKIKRLASSEFYQYLGVPVGEETDQSPYDILKKVVSDTRKIADSDLLGWQKLKAYKIFLHSRLVFPFRTREIKTSALAKSNANNNLTVNITSQLRNCFRKMMSLPNHSEVCYFYNSTENGGANCVDLLDEYHTQTITHFFRLFTSNCEFARKVNLDSLNFVAGPRLGIINPTLQETFDWINGKEPKPWHSGKKTRFQRARIAIAFFKKEHDINIMFIVTKGQPSLFITSEKRGTFILTPDLRKTTSKVLHMALCDSYLSKWEKGCTSNFIASAIKLSPKINKAIYRGDISEFAWHFIHRARTNTLSINAKPHNKGNKRLCRLCHTEDETMSHIIQSCKIHLTLGSERHNDCLDLISSHLSKNSNLIVVVDHVCSLVPESKERVDLMITDMVRKKIFLVDMKCPCDTINNFALVDLLNLQKYDSLKMQIQDAKPDFKVELDTCIIGSLGSFPPKTPELLLKIGVDRTHLKGLLKDCALSNISHSARRWHYHKTGILVNLEKFRFN

SEQ ID NO: 1547 - protein, 1370 aa, Schmidtea mediterranea
MGMDRYGSVWIGTDRCGSVRNFIETIRKNVHRFQTTKFQNPPKVSGGGITTLPIFKRFQNVTRPPKIALPYKASLQNENSCVPSLIKEWFSNKNYITVLSPELTLNLIAHNNQFIRENVTFRQFTRVKYVIAVIPNNPHWCLYIFSPVFERSYILNFQGRVLNERLVSIGESMTDYLNKFFISTAKVNFIVNHNQTHFSFRSEDPHFFASAFIEFLERFFFGNILSFTKINETLKSFKLQITNEICKNLNLINFSINDEIITKYFKNLNLPSNFIFLNSAMCTAIMDDCTRYLNDFLNYDNIIKAQVIFAIVAPPKFREILFIIDYNTDEYYLLNPTTLLGNDNYLSTCKILRNKINEIRESPNRVLNLGECPHDIRGSGLVSKILFCSYMSNYANDLPLVGLNLRQIGNVVSSFLPIVSEIKKVKSLENNIINENHKESENLKERKNKIDQLLIKVFKMNVDEIVDVILDQISIKTVPTHKPYLGNIERVESQINKSNLIKNFNSDMKTTVNTIINDVDVDVRPKYENIITNFEHKIPLDRTWDKVFKFCNRSDKKLKLKYLSNSEVLFELKKADNTSPGVDGIKYRDLVMLDPEGKLLTFLFNKIISKKVIPDSWKSFKTLLIPKPGKGDKYDSVSSWRPIALLSVIYKLFASCLANRLTFWINKNNLLHIGQKGGSRHDGCVKHNSILLSALEHSKYSKNSQLAIAWLDIKDAFGSVPHAYMWSLLRFVGVDEEFVTILERMYSDTSTFYSCGPILTPNIAIRQGVKQGCPISMILFALAINPVLEAVSRSKCEPFMIGESAVKILAYADDIALVSKSAYDLQRVTNIAVVIASEIGFEYRPEKCGYIEIPLIETESQILINDIKIKKLASSEFYQYLGVPVGEETDQSPYDILKKVVSDTRKIADSDLLGWQKLKAYKIFLHSRLVFPFRTREIKTSALAKSNANNNLTVNMTSQLRNCFRKMMSLPNHSEVCYFYNSTENGGANCVDLLDENHTQTITHFFRLFTSNCEFARKVNLDSLNFVAGPRLGIINPTLQETFDWINGKEPKPRHSGKKTRFQRARIAIAFFKKEHDINIMFIVNKGQPSLFITSEKRGTFILTPDLRKNTSKVLHMALCDSYLSKWEKGCTSNFIASAIKLSPKINKAIYRGDISEFAWHFIHRARTNTLSINAKPHNKGNKRLCRLCHTEDETMSHIIQSCKIHLTLGSERHNDCLDLISSHLSKNSNLIVVVDHVCSLVPESKERVDLMITDMVRKKIFLVDMKCPCDTINNFALVDLLNLQKYDSLKMQIQDAKPDFKVELDTCIIGSLGSFPPKTPELLLKIGVDRTHLKGLLKDCALSNISHSARRWHYHKTGILVNLEKFRFN

SEQ ID NO: 1548 - protein, 1457 aa, Schmidtea mediterranea
MPDNLFKAQIILCPLNINESHWILFVYCKLTKISYFVDPILRKRHNLINKSSALKITMALNNLFDLKAAVTFHPHDNLVYQDNNYDCGPYICAYAMLISQEWQTFPNNFIETIRKNVHRFQTTKFQNPPKVSGGGITTLPIFKRFQNVTRPPKVALPYKASLQNENSCVPSLIKEWFSNKNYITVLSPELTLNLIAHNNQFIRENVTFRQFTRVKYVIAVIPNNPHWCLYIFSPVFERSYILNFQGRVLNERLVSIGESMTDYLNKFFISTAKVNFIVNHNQTHFSFRSEDPHFFASAFIEFLERFFFGNILSFTKINETLKSFKLQITNEICKNLNLINFSINDEIITKYFKNLNLPSNFIFLNSAMCTAIMDDCTRYLNDFLNYDNIIKAQVIFAIVAPPKFREILFIIDYNTDEYYLLNPTTLLGNDNYLSTCKILRNKINEIRESPNRVLNLGECPHDIRGSGLVSKILFCSYMSNYANDLPLVGLNLRQIGNVVSSFLPIASEIKKVKSLENNIINENHKESENLKERKNKIDQLLIKVFKMNVDEIVDVILDQISIKTVPTHKPYLGNIERVESQINKSNLIKNFNSDMKTTVNTIINDVDVDVRPKYENIITNFEHKIPLDRTWDKVFKFCNRSDKKLKLKYLSNSEVLFELKKADNTSPGVDGIKYRDLVMLDPEGKLLTFLFNKIISKKVIPDSWKSFKTLLIPKPGKGDKYDSVSSWRPIALLSVIYKLFASCLANRLTFWINKNNLLHIGQKGGSRHDGCVEHNSILSSALEHSKYSKNSQLAIAWLDIKDAFGSVPHAYMWSLLRFVGVDEEFVTILERMYSDTSTFYSCGPILTPNIAIRQGVKQGCPISMILFALAINPVLEAVSRSKCEPFMIGESAVKILAYADDIALVSKSAYDLQRVTNIAVVIASEIGFEYRPEKCGYIELPLIETESQILINDIKIKRLASSEFYQYLGVPVGEETDQSPYDILKKVVSDTRKIADSDLLGWQKLKAYKIFLHSRLVFPFRTREIKTSALAKSNANNNLTVNITSQLRNCFRKMMSLPNHSEVCYFYNSTENGGANCVDLLDEYHTQTITHFFRLFTSNCEFARKVNLDSLNFVAGPRLGIINPTLQETFDWINGKEPKPWHSGKKTRFQRARIAIAFFKKEHDINIMFIVTKGQPSLFITSEKRGTFILTPDLRKTTSKVLHMALCDSYLSKWEKGCTSNFIASAIKLSPKINKAIYRGDISEFAWHFIHRARTNTLSINAKPHNKGNKRLCRLCHTEDETMSHIIQSCKIHLTLGSERHNDCLDLISSHLSKNSNLIVVVDHVCSLVPESKERVDLMITDMVRKKIFLVDMKCPCDTINNFALVDLLNLQKYDSLKMQIQDAKPDFKVELDTCIIGSLGSFPPKTPELLLKIGVDRTHLKGLLKDCALSNISHSARRWHYHKTGILVNLEKFRFN

SEQ ID NO: 1549 - protein, 1198 aa, Schmidtea mediterranea
MTDYLNKFFISTAKVNFIVNHNQAHFSFRSEDPHFFASAFIEFLERFFFGNILSFTKINETLKSFKLQITNEICKNLNLINFSINDEIITKYFKNLNLPSNFKFLNSAMCTAIMDDCTRYLKDFLNYDNIFKAQVIFAIVAPPKFREILFIIDYNTDEYYLLNPTTLLGNDNYLSTCKILRNKINEIRESPNRVLNLGECPHDIRGSGLVSKILFCSYMSNYANDLPLVGLNLRQIGNVVSSFLPIVSEIKKVKSLENNTIIENHKESENLKERKNKIDQLLIKVFKMNVDEIVDVILDQISIKTVPTHKPYLGNIERVKSQINKSNLIKNFNSDMKTTVNTIINDVDVDVRPKYENIITNFEHKIPLDRTWDKVFKFCNRSDKKLKLKYLSNSEVLFELMKADNTSPGVDGIKYRDLVMLDPEGELLTFLFNKIISKKVIPDSWKSFKTLLIPKPGKGDKYDSVSSWRPIALLSVIYKLFASCLANRLTFWINKNNLLHIGQKGGSRHDGCVEHNSILSSALEHSKYSKNSQLAIAWLDIKDAFGSVPHAYMWSLLRFVGVDEEFVTILERVYSDTSTFYSCGPILIPNIAIRQGVKQGCPISMILFALAINPVLEAVSRSKCEPFTIGESAVKILAYADDIALVSKSSYDLQRVTNIAVVIASEIGFEYRPEKCGYIELPLIETESQILINDIKIKRLASSEFYQYLGVPVGEETDQSPYDILKKVVSDTRKIADSDLLGWQKLKAYKIFLHSRLVFPFRTREIKTSALAKSNANNNLTVNITSQLRNCFRKMMSLPNHSEVCYFYNSTENGGANCVDLLDEYHTQTIIHFFRLFTSNCEFARKVNLDSLNFVAGPRLGIINPTLQETFDWINGKEPKPRHSGKKTRFQRARIAIAFFKKEHDINIMFIVTKGQPSLFVTSEKRGTFILTPDLRKTTSKVLHMALCDSYLSIWEKGCTSNFIASAIKLSPKINKAIYRGDISEFAWHFIHSARTNTLSINAKPHNKGNKRLCRLCHTEDESMSHIIQSCKIHLTIGSERHNDCLDLISSHLSKNSNLIVVVDHVCSLVPESKERVDLMITDMVRKKIFLVDIKCPCDTINNFALVDLLNLQKYDSLKMQIQDAKPDFKVELDTCIIGSLGSFPPKTPELLLKIGVDRTHLKVLLKDCALSNISHSARRWHYHKTGILVNLEKFRFN

SEQ ID NO: 1550 - protein, 1198 aa, Schmidtea mediterranea
MTDYLNKFFISTAKVNFIVNHNQTHFSFRSEDPHFFASAFIEFLERFFFGNILLFTKINESLKSFKLQITNEICKNLNLINFSINDEIITKYFKNLNLPSNFIFLNSAMCTAIMDDCTRYLNDFLNYDNIIKAQVIFAIVAPPKFREIIFIIDYNTDEYYLLNPTTLLGNDNYLSTCKILRNKINEIRESPNRVLNLGECPHDIRGSGLVSKILFCSYMSNYANDLPLVGLNLRQIGNVVSSFLPIVSEIKKVKSLENNIINENHKENENLKERKNKIDQLLIKVFKMNVDEIVDVILDQISIKTVPTHKPYLGNIERVESQINKSNLIKNFNSDMKTTVNTIINDVDVDVRPKYENIITNFEHKIPLDRTWDKVFKFCNRSDKKLKLKYLSNSEVLFELKKADNTSPGVDGIKYRDLVMLDPEGKLLTFLFNKIISKKVIPDSWKSFKTLLIPKPGKGDKYDSVSSWRPIALLSVIYKLFASCLANRLTFWINKNNLLHIGQKGGSRHDGCVEHNSILSSALEHSKYSKNSQLAIAWLDIKDAFGSVPHAYMWSLLRFVGVDEEFVTILERMYSDTSTFYSCGPILTPNIAIRQGVKQGCPISMILFALAINPVLEAVSRSKCEPFMIGESAVKILAYADDIALVSKSAYDLQRVTNIAVVIASEIGFAYRPEKCGYIELPLIETESQILINDIKIKRLASSEFYQYLGVPVGEETDQSPYDILKKVVSDTRKIADSDLLGWQKLKAYKIFLHSRLVFPFRTREIKTSALAKSNANNNLTVNITSQLRNCFRKMMSLPNHSEVCYFYNSTENGGANCVDLLDEYHTQTITHFFRLFTSNCEFARKVNLDSLNFVAGPRLGIINPTLQETFDWINGKEPKPWHSGKKTRFQRVRIAIAFFKKEHDINIMFIVTKGQPSLFITSEKRGTFILTPDLRKTTSKVLHMALCDSYLSKWEKGCTSNFIASAIKLSPKINKAIYRGDISEFAWHFIHRARTNTLSINAKPHNKGNKRLCRLCHTEDETMSHIIQSCKIHLTLGSERHNDCLDLISSHLSKNSNLIVVVDHVCSLVPESKERVDLMITDMVRKKIFLVDMKCPCDTINNFALVDLLNLQKYDSLKMQIQDAKPDFKVELDTCIIGSLGSFPPKTPELLLKIGVDRTHLKGLLKDCALCNISHSARRWHYHKTGILVNLEKFRFN

SEQ ID NO: 1551 - protein, 1349 aa, Schmidtea mediterranea
MPDNLFKAQIILCPLNINESHWILFVYCKLTKISYFVDPILRKRHNLINKSSALKITMALNNLFDLKAAVTFHPHDNLVYQDNNYDCGPYICAYAMLISQEWQTFPNNFIETIRKNVHRFQTTKFQNPPKVSGGGITTLPIFKRFQNVTRPPKVALPYKASLQNENSCVPSLIKEWFSNKNYITVLSPELTLNLIAHNNQFIRENVTFRQFTRVKYVIAVIPNNTHWCLYIFSPVFERSYILNFQGRVLNERLVSIGETMTDYLNKFFISTAKVNFIVNHNQTHFSFRSEDPHFFASAFIEFLERFFFGNILSFTKINETLKSFKLQITNEICKNLNLINFSINDEIITKYFKNLNLPSNFIFLNSAMCTAIMDDCTRYLKDFLNYDNIIKAQVIFAIVAPPKFREILFIIDYNTDEYYLLNPTTLLGNDNYLSTCKILRNKINEIRESPNRVLNLGECPHDIRGSGLVSKILFCSYMSNYANDLPLVGLNLRQIGNVVSSFLPIVSEIKKVKSLENNIIIENHKESENLKERKNKIDQLLIKVFKMNVDEIVDVILDQISIKTVPTHKPYLGNIERVESQINKSNLIKNFNSDMKTTVNTIINDVDVDVRPKYENIITNFEHKIPLDRTWDKVFKFCNRSDKKLKLKYLSNSEVLFELKKADNTSPGVDGIKYRDLVMLDPEGKLLTFLFNKIISKKVIPDSWKSFKTLLIPKPGKGDKYDSVSSWRPIALLSVTYKLFASCLANRLTFWINKNNLLHIGQKGGSRHDGCVEHNSILSSALEHSKYSKNSQLAIAWLDIKDAFGSVPHAYMWSLLRFVGVDEEFVTILERMYSDTSTFYSCGPILTPNIAIRQGVKQGCPISMILFALAINPVLEAVSRSKCEPFMIGESAVKILAYADDIALVSKSAYDLQRVTNIAVVIASEIGFEYRPEKCGYIELPLIETESQILINDIKIKRLASSEFYQYLGVPVGEETDQSPYDILKKVVSDTRKIADSDLLGWQKLKAYKIFLHSRLVFPFRTREIKTSALAKSNANNNLTVNITSQLRNCFRKMMSLPNHSEVCYFYNSTENGGANCVDLLDEYHTQTITHFFRLFTSNCEFARKVNLDSLNFVAGPRLGIINPTLQETFDWINGKEPKPRHTGKKTRFQRARIAIAFFKKEHDINIMFIVTKGQPSLFITSEKRGTFILTPDLRKTTSKVLHMALCDSYLSKWEKGCTSNFIASAIKLSPKINKAIYRGDISEFAWHFIHRARTNTLSINAKPHNKGNKKLCRLCHTEDETMSHIIQSCKIHLTLGSERHNDCLDLISSHLSKNSNLIVVVDHVCSLVPESKERVDLMITDMVRKKYF

SEQ ID NO: 1552 - protein, 911 aa, Schmidtea mediterranea
MNVDEIVDVILDQISIKTVPTHKPYLGNIERVESQINKSNLIKNFNSDMKTTVNTIINDVDVDVRPKYENIITNFEHKIPLDRTWDKVFKFCNRSDKKLKLKYLSNSEVLFELKKADNTSPGVDGIKYRDLVMLDPEGKLLTFLFNKIISKKVIPDSWKSFKTLLIPKPGKGDKYDSVSSWRPIALLSVIYKLFASCLANRLTFWINKNNLLHIGQKGGSRHDGCVEHNSILSSALEHSKYSKNSQLAIAWLDIKDAFGSVPHAYMWSLLRFVGVDEEFVTILERMYSDTSTFYSCGPILTPNIAIRQGVKQGCPISMILFALAINPVLEAVSRSKCEPFMIGESAVKILAYADDIALVSKSAYDLQRVTNIAVVIASEIGFEYRPAKCGYIELPLIETESQILINDIKIKRLASSEFYQYLGVPVGEEIDQSPYDILKKVVSDTRKIADSDLLGWQKLKAYKIFLHSRLVFPFRTREIKTSALAKSNANNNLTVNITSQLRNCFRKMMSLPNHSEVCYFYNSTENGGANCVDLLDEYHTQTITHFFRLFTSNCEFARKVNLDSLNFVAGPRLGIINPTLQETFDWINGKEPKPWHSGKKTRFQRARIAIAFFKKEHDINIMFIVTKSQPSLFITSEKCGTFILTPDLRKTTSKVLHMALCDSYLSKWEKGCTSNFIASAIKLSPKINKAIYRGDISEFAWHFIHRARTNTLSINAKPHNKGNKRLCRLCHTEDETMSHIIQSCKIHLTLGSERHNDCLDLISSHLSKNSNLIVVVDHVCSLVPESKERVDLMITDMVRKKIFLVDMKCPCDTINNFVLVDLLNLQKYDSLKMQIQDAKPDFKVELDTCIIGSLGSFPPKTPELLLKIGVDRTHLKGLLKDCALSNISHSARRWHYHKTGILVNLEKFRFN

SEQ ID NO: 1553 - protein, 982 aa, Schmidtea mediterranea
MCTAIMDDCTHYLNDFLNYDNIIKAQVIFAIVAPPKFREILFIIDYNTDEYYLLNPTTLLGNDNYLSTCKILRNKINEIRESPNRVLNIGECPHDIRGSGLVSKILFCSYMSNYANDLPLIGFNLRQIGNVVSSFLPIVSEIKKVKSLENNIIIENHKESENLKERKNKIDQLLIKVFKMNVDEIVDVILDQISNKTVPTHKPYLGNIERVESQINKSNLIKNFNSDMKTTVNTIINDVDVDVRPKYENIITNFEHKIPLDRTWDRVFKVCYRYDKKLKLKYLSNSEVLFELKKADNTSPGVDGIKYRDLVMLDPEGKLLTFLFNKIISKKVIPDSWKSFKTLLIPKPGKGDKYDSVSSWRPIALLSVIYKLFASCLANRLTFWINKNNLLHIGQKGGSRHDGCVEHNSILSSALEHSKYSKNSQLAIAWLDIKDAFGSVPHAYMWSLLRFVGVDEEFVTILERMYSDTSTFYSCGPILTPNIAIRQGVKQGCPISMILFALAINPVLEAVSRSKCEPFMIGESAVKILAYADDIALVSKSANDLQRVTNIAVVIASEIGFEYRPEKCGYIELPLIETESQILINDIKIKRLASSEFYQYLGVPVGEETDQSPYEILKKVVSDTRKIADSDLLGWQKLKAYKIFLHSRLVFPFRTREIRTSALAKSNANNNLTVNITSQLRNCFRKMMSLPNHSEVCYFYNSTENGGPNCVDLLDEYHTQTITHFFRLFTSNCEFARKVNLDSLNFVAGPRLGIINPTLQETFDWINGKEPKPRHSGKKTRFQRARIAIAFFKKEHDINIMFIVTKGQPSLFITSEKHGTFILTPDLRKTTSKVLHMALCDSYLSKWEKGCTSNFIASAIKLSPKINKAIYRGDISEFAWHFIHRARTNTLSINAKPHNKGNKRLFRLCHTEDETMSHIIQSCKIHLTLGSERHNDCLDLISSHLSKNSNLIVVVDHVCSLVPESKERVDLMITDMVRKKNF

SEQ ID NO: 1554 - protein, 1457 aa, Schmidtea mediterranea
MPDNLFKAQIILCPLNINESHWILFVYCKLTKISYFVDPILRKRHNLINKSSALKITMALNNLFDLKAAVTFHAHDNLVYQDNNYDCGPYICAYAMLISQEWQTFPNNFIETIRKNVHRFQTTKFQNPPKVSGGGITTLPIFKRFQNVTRPPKVALPYKDSLQNENSCVPSLIKEWFSNKNYITVLSPELTLNLIAHNNQFIRENVTFRQFTRVKYVIAVIPNNPHWCLYIFSPVFERSYILNFQGRVLNERLVSIGESMTDYLNKFFISTAKVNFIVNHNQTHFSFRSEDPHFFASAFIEFLERFFFGNILSFTKINETLKSFKLQITNEICKNLNLINFSINDEIITKYFKNLNLPSNFIFLNSAMRTAIMDDCTRYLNDFLNYDNIIKAQVIFAIVAPPKFREILFIIDYNTDEYYLLNPTTLLGNDNYLSTCKILRNKINEIRESPNRVLNLGECPHDIRGSGLVSKILFCSYMSNYANDLPLVGLNLRQIGNVVSSFLPIVSEIKKVKSLENNIINENHKESENLKERKNKIDQLLIKVFKMNVDEIVDVILDQISIKTVPTHKPYLGNIERVESQINKSNLIKNFNSDMKTTVNTIINDVDVDVRPKYENIITNFEHKIPLDRTWDKVFKFCNRSDKKLKLKYLSNSEVLFELKKADNTSPGVDGIKYRDLVMLDPEGKLLTFLFNKIISKKVIPDSWKSFKTLLIPKPGKGDKYDSVSSWRPIALLSVIYKLFASCLANRLTFWINKNNLLHIGQKGGSRHDGCVEHNSILSSALEHSKYSKNSQLAIAWLDIKDAFGSVPHAYMWSLLRFVGVDEEFVTILERMYSDTSTFYSCGPILTPNIAIRQGVKQGCPISMILFALAINPVLEAVSRSKCEPFMIGESPVKILAYADDIALVSKSAYDLQRVTNIAVVIASEIGFEYRPEKCGYIELPLIETESQILINDIKIKRLASSEFYQYLGVPVGEETDQSPYDILKKVVSDTRKVADSDLLGWQKLKAYKIFLHSRLVFPFRTREIKTSALAKSNANNNLTVNITSQLRNCFRKMMSLPNHSEVCYFYNSTENGGANCVDLLDEYHTQTITHFFRLFTSNCEFARKINLDSLNFVAGPRLGIINPTLQETFDWINGKEPKPWHSGKKTRFQRARIAIAFFKKEHDINIMFIVTKGQPSLFITSEKRGTFILTPDLRKTTSKVLHMALCDSYLSKWEKGCTSNFIASAIKLSPKINKAIYRGDISEFAWHFIHRARTNTLSINAKPHNKGNKRLCRLCHTEDETMSHIIQSCKIHLTLGSERHNDCLDLISSHLSKNSNLIVVVDHVCSLVPESKERVDLMITDMVRKKIFLVDMKCPCDTINNFALVDLLNLQKYDSLKMQIQNAKPDFKVELDTCIIGSLGSFPPKTPELLLKIGVDRTHLKGLLKDCALSNISHSARRWHYHKTGILVNLEKFRFN

SEQ ID NO: 1555 - protein, 1198 aa, Schmidtea mediterranea
MTDYLNKFFISTAKVNFIVNHNQTHFSFRSEDTHFFASAFIGFLERFFFGNILSFTKINETLKSFKLQITNEICKNLNLINFSINDEIITKYFKNLNLPSNFIFLNSAMCTAIMDDCTRYLNDFLNYDNIIKAQVIFAIVAPPKFREILFIIDYNTDEYYLLNPTTILGNDNYLSTCKILRNKINEIRESPNRVLNLGECPHDIRGSGLVSKILFCSYMSNYANDLPLVGLNLRQIGNVVSSFLPIVSEIKKVKSLENNIINENHKESENLKERKNKIEQLLIKVFKMNVDEIVDVILDQISIKTVPTHKPYLGNIERVESQINKSNLIKNFNSDMKTTVNTIINDVDVDVRPKYENIITNFEHKIPLDRTWDKVFKFCNRSDKKLKLKYLSNSEVLFELKKADNTSFGVDGIKYRDLVMLDPEGKLLTFLFNKIISKKVIPDSWKSFKTLLIPKPGKGDKYDSVSSWRPIALLSVIYKLFASCLANRLTFWINKNNLLHIGQKGGSRHDGCVEHNSILSSALEHSKYSKNSQLAIAWLDIKDAFGSVPHAYMWSLLRFVGVDEEFVTILERMYSDTSTFYSCGPILTPNIAIRQGVKQGCPISMILFDLAINPVLEAVSRSKCEPFMIGESAVKILAYADDIALVSKSAYDLQRVTDIAVVIASEIGFEYRPEKCGYIELPLIETESQILINDIKIKRLASSEFYQYLGVPVGEETDQSPYDILKKVVSDTMKIADSDLLGWQKLKAYKIVLHSRLVFPFRTREIKTSALAKSNANNNLTVNITSQLRNCFRKMMSLPNHSEVCYFYNSIENGGANCVDLLDEYHTQTITHFFRLFTSNCEFARKVNLDSLNFVAGPRLGIINPTLQETFDWINGKEPKPRHSGKKTSFQRARIAIAFFKKEHDINIMFIVNKGQPSLFITSEKRGTFILTPDLRKTTSKVLHMALCDSYLSKWEKGCTSNFIASAIKLSPKINKAIYRGDISEFACHFIHRARTNTLSINAKPHNKGNKRLCRLCHTEDETMSHIIQSCKIHLTLGSERHNDCLDLISSHLSKNSNLIVVVDHVCSLVPESKERVDLMITDMVRKKIFLVDMKCPCDTINNFALVDLLNLQKYDSLKMQIQDAKPDFKVELDTCIIGSLGSFPPKTPELLLKIGVDRTYLKGLLKDCALSNISHSARRWHYHKTGILVNLEKFRFN

SEQ ID NO: 1556 - protein, 1198 aa, Schmidtea mediterranea
MTDYLNKFFISTAKVNFIVNHNQTHFSFRSEDPHFFASAFIEFLERFFFGNILSFTKINETLKSFKLQITNEICKNLNLINFSINDEIITKYFKNLNLPSNFIFLNSAMCTAIMDDCTRYLNDFLNYDNIIKAQVIFAIVAPPKFREILFIIDYNTDEYYLLNPTTLLGNDNYLSTCKILRNKINEIRESPNRVLNLGECPHDIRGSGLVSKILFCSYMSNYANDLPLVGLNLRQIGNVVSSFLPIVSEIKKVKSLENNIINENHKESENLKERKNKIDQLLIKVFKMNVDEIVDVILDQISIKTVPTHKPYLGNIERVESQINKSNLIKNFNSDMKTTVNTIINDVDVDVRPKCENIITNFEHKIPLDRTWDKVFKFCNRSDKKLKLKYLSNSEVLFELKKADNTSPGVDGIKYRDLVMLDPEGKLLTFLFNKIISKKVIPDSWKSFKTLLIPKPGKGDKYDSVSSWRPIALLSVIYKLFASCLANRLTFWINKNNLLHIGQKGGSRHDGCVEHNSTLSSALEHSKYSKNSQLAIAWLDIKDAFGSVPHAYMWSLLRFVGVDEEFVTILERMYSDTSTFYSCGPILTPNIAIRQGVKQGCPISMILFALAINPVLEAVSRSKCEPFMIGESAVKILAYADDIALVSKSAYDLQRLTNIAVVIASEIGFEYRPEKCGYIELPLIETESQILINDIKIKRLASSEFYQYLGVPVGEETDQSPYDILKKVVSDTRKIADSDLLGWQKLKAYKIFLHSRLVFPFRTREIKTSALAKSNANNNLTVNITSQLRNCFRKMMSLPNHSEVCYFYNSTENGGANCVDLLDEYHTQTITHFFRLFTSNCEFARKVNLDSLNFVAGPRLGIINPTLQETFDWINGKEPKPWHSGKKTRFQRARIAIAFFKKEHDINIMFIVTKGQPSLFITSEKRGTFILTPDLRKTTSKVFHMALCDSYLSKWEKGCTSNFIASAIKLSPKINKAIYRGDISEFAWHFIHRARTNTLSINAKPHNKGNKRLCRLCHTEDETMSHIIQSCKIHLTLGSERHNDCLDLISSHLSKNSNLIVVVDHVCSLVPESKERVDLMITDMVRKKIFLVDMKCPCDTINNFALVDLLNLQKYNSLKMQIQDAKPDFKVELDTCIIGSLGSFPPKTPELLLKIGVDRTHLKGLLKDCALSNISHSARRWHYHKTGILVNLEKFRFN

SEQ ID NO: 1557 - protein, 1198 aa, Schmidtea mediterranea
MTDYLNKFFISTAKVNFIVNHNQTHFSFRSEDPHFFASAFIEFLERFFFGNILSFTKINETLKSFKLQITNEICKNLNLINFSINDEIITKYFKNLNLPSNFIFLNSAMCTAIMDDCTRYLNDFLNYDNIIKAQVIFAIVAPPKFREILFIIDYNTDEYYLLNPTTLLGNDNYLSTCKILRNKINEIRESPNRVLNLGECPHDIRGSGLVSKILFCSYMSNYANDLPLVGLNLRQIGNVVSSFLPIVSEIKKVKSLENNIINENHKESENLKERKNKIDQLLIKVFKMNVDEIVDVILDQISIKTVPTHKPYLGNIERVESQINKSNLIKNFNSDMKTTVNTIINDVDVDVRPKYENIITNFEHKIPLDRTWDKVFKFCNRSDKKLKLKYLSNSEVLFELKKADNTSPGVDGIKYRDLVMLDPESKLLTFLFNKIISKKVIPDSWKSFKTLLIPKPGKGDKYDSVSSWRPIALLSVIYKLFASCLANRLTFWINKNNLLHIGQKGGSRHDGCVEHNSILSSALEHSKYSKNSQLAIAWLDIKDAFGSVPHAYMWSLLRFVGVGEEFVTILERMYSDTSTFYSCGPILTPNIAIRQGVKQGCPISMILFALAINPVLEAVSRSKCEPFMIGESAVKILAYADDIALVSKSAYDLQRVTNIAVVIASEIGFEYRPEKCGYIELPLIETESQILINDIKIKRLASSEFYQYLGVPVGEETDQSPYDILKKVVSDTRKIADSDLLGWQKLKAYKIFLHSRLVFPFRTREIKTSALAKSNSNNNLTVNITSQLRNCFRKMMSLPNHSEVCYFYNSTENGGANCVDLLDEYHTQTITHFFRLFTSNCEFARKVNLDSLNFVAGPRLGIINPTLQETFDWINGKEPKPWHSGKKTRFQRARIAIAFFKKEHDINIMFIVTKGQPSLFITSEKRGTFILTPDLRKTTSKVLHMALCDSYLSKWEKGCTSNFIASAIKLSPKINKAIYRGDISEFAWHFIHRARTNTLSINAKPHNKGNKRLCRLYHTEDETMSHIIQSCKIHLTLGSERHNDCLDLISSHLSKNSNLIVVVDHVCSLVPESKERVDLMITDMVRKKIFLVDMKCPCDTINNFALVDLLNLQKYDSLKMQIQDAKPDFKVELDTCIIGSLGSFPPKTPELLLKIGVDRTHLKGLLKDCALSNISHSARRWHYHKTGILVNLEKFRFN

SEQ ID NO: 1558 - protein, 1457 aa, Schmidtea mediterranea
MPDNLFKAQIILCPLNINESHWILFVYCKLTKISYFVDPILRKRHNLINKSSALKITMALNNLFDLKAAVTFHPHDNLVYQDNNYDCGPYICAYAMLISQEWQTFPNNFIETIRKNVHRFQTTKFQNPPKVSGGGITTLPIFKRFQNVTRPPKVALPYKDSLQNENSCVPSLIKEWFSNKNYITVLSPELTLNLIAHNNQFIRENVTFRQFTRVKYVIAVIPNNPHWCLYIFSPVFERSYILNFQGRVLNERLVSIGESMTDYLNKFFISTAKVNFIVNHNQTHFSFRSEDPHFFASAFIEFLERFFFGNILSFTKINETLKSFKLQITNEICKNLNLINFSINDEIITKYFKNLNLPSNFIFLNSAMCTAIMDDCTRYLNDFLNYDNIIKAQVIFAIVAPPKFREILFIIDYNTDEYYLLNPTTLLGNDNYLSTCKILRNKINEIRESPNRVLNLGECPHDIRGSGLVSKILFCSYMSNYANDLPLVGLNLRQIGNVVSSFLPIVSEIKKVKSLENNIINENHKESENLKERKNKIDQLLIKVFKMNVDEIIDVILDQISIKTVPTHKPYLGNIERVESQINKSNLIKNFNSDMKTTVNTIINDVDVDVRPKYENIITNFEHKIPLDRTWDKVFKFCNRSDKKLKLKYLSNSEVLFELKKADNTSPGVDGIKYRDLVMLDPEGKLLTFLFNKIISKKVIPDSWKSFKTLLIPKPGKGDKYDSVSSWRPIALLSVIYKLFASCLANRLTFWINKNNLLHIGQKGGSRHDGCVEHNSILSSALEHSKYSKNSQLAIAWLDIKDAFGSVPHAYMWSLLRFVGVDEEFVTILERMYSDTSTFYSCGPILTPNIAIRQGVKQGCPISMILFALAINPVLEAVSRSKCEPFMIGESPVKILAYADDIALVSKSAYDLQRVTNIAVVIASEIGFEYRPEKCGYIELPLIETESQILINDIKIKRLASSEFYQYLGVPVGEETDQSPYDILKKVVSDTRKVADSDLLGWQKLKAYKIFLHSRLVFPFRTREIKTSALAKSNANNNLTVNITSQLRNCFRKMMSLPNHSEVCYFYNSTENGGANCVDLLDEYHTQTITHFFRLFTSNCEFARKINLDSLNFVAGPRLGIINPTLQETFDWINGKEPKPWHSGKKTRFQRARIAIAFFKKEHDINIMFIVTKGQPSLFITSEKRGTFILTPDLRKTTSKVLHMALCDSYLSKWEKGCTSNFIASAIKLSPKINKAIYRGDISEFAWHFIHRARTNTLSINAKPHNKGNKRLCRLCHTEDETMSHIIQSCKIHLTLGSERHNDCLDLISSHLSKNSNLIVVVDHVCSLVPESKERVDLMITDMVRKKIFLVDMKCPCDTINNFALVDLLNLQKYDSLKMQIQDAKPDFKVELDTCIIGSLGSFPPKTPELLLKIGVDRTHLKGLLKDCALSNISHSARRWHYHKTGILVNLEKFRFN

SEQ ID NO: 1559 - protein, 980 aa, Schmidtea mediterranea
MSNYANDLPLVGLNLRQIGNVVSSFLPIVSEIKKVKSLENNIIIENHKESENLKERKNKIDQLLIKVFKMNVDEIVDVILDQISIKTVPTHKPYLGNIERVESQINKSNLIKNFNSDMKTTVNTIINDVEVDVRPKYENIITNFEHKIPLDRTWDKVFKFCNRSDKKLKLKYLSNSEVLFELKKADNTSPGVDGIKYRDLVMLDPEGKLLTFLFNKIISKKVIPDSWKSFKTLLIPKPGKGDKYDSVSSWRPIALLSVIYKLFASCLANRLTFWINKNNLLHIGQKGGSRHDGCVEHNSILSSALEHSKYSKSSQLAIAWLDIKDAFGSVPRAYMWSLLRFVGVDEEFVTILERMYSDTSTFYSCGPILTPNIAIRQGVKQGCPISMILFALAINPVLEAVSRSKCEPFMIGESAVKILAYADDIALVSKSAYDLQRVTNIAVVIASEIGFEYRPEKCGYIELPLIETESQILINDIKIKRLASSEFYQYLGVPVGEETDQSPYDILKKVVSDTRKIADSDLLGWQKLKAYKIFLHSRLVFPFRTREIKTSALAKSNANNNLTVNITSQLRNCFRKMMSLPNHSEVCYFYNSTENGGANCVDLLDEYHTQTITHFFRLFTSNCEFARKVNLDSLNFVAGPRLGIINPTLQETFDWINGKKPKPRHSGKKTRFQRARIAIAFFKKEHDINIMFIVTKGQPSLFITSEKRGTFILTPDLRKTTSKVLHMALCDSYLSKWEKGCTSNFIASAIKLSPKINKAIYRGDISEFAWHFIHRARTNTLSINAKPHNKGNKRLCRLCHTEGETMLHIIQSCKIHLTLGSERHNDCLDLISSHLSKNSNLIVVVDHVCSLVPESKERVDLMITDMVRKKIFLVDMKCPCDTINNFALVDLLNLQKYDSLKMQIQDAKPDFKVELDTCIIGSLGSFPPKTPELLLKIGVDRTHLKVLLKDCALSNISHSARRWHYHKTGILVNLEKFRFN

SEQ ID NO: 1560 - protein, 1198 aa, Schmidtea mediterranea
MTDYLNKFFISTAKVNFIVNHNQTHFSFRSEDPHFFASAFIEFLERFFFGNILSFTKINETLKSFKLQITNEICKNLNLINFSINDEIITKYFKNLNLPSNFIFLNSAMCTAIMDDCTRYLNDFLNYDNIIKAQVIFAIVAPPKFREILFIIDYNTDEYYLLNPTTLLGNDNYLSTCKILRNKINEIRESPNRVLNLGECPHDIRGSGLVSKILFCSYMSNYANDLPLVGLNLRQIGNVVSSFLPIVSEIKKVKSLENNIIIENHKERENLKERKNKIDQLLIKVFKMNVDEIVDVILDQISIKTVPTHKPYLGNIERVESQINKSNLIKNFNSDMKTTVNTIINDVDVDVRPKYENIITNFEHKIPLDRTWDKVFKFCNRSDKKLKLKYLSNSEVLFELKKADNTSPGVDGIKYRDLVMLDPEGKLLTFLFNKIISKKVIPDSWKSFKTLLIPKPGKGDKYDSVSSWRPIALLSVIYKLFASCLANRLTFWINKNNLLHIGQKGGSRHDGCVEHNSILSSALEHSKYSKNSQLAIAWLDIKDAFGSVPHAYMWSLLRFVGVDEEFVTILERMYSDTSTFYSCGPILTPNIAIRQGVKQGCPISMILFALAINPVLEAVSRSKCEPFMIGESAVKILAYADDIALVSKSAYDLQRVTNIAVVIASEIGFEYRPEKCGYIELPLIETESQILINDIKIKRLASSEFYQYLGVPVGEETDQSTYDILKKVVSDTRKIADSDLLGWQKLKAYKIFLHSRLVFPFRTREIKTSALAKSNANNNLTVNITSQLRNCFRKMMSLPNHSEVCYFYNSTENGGANCVDLLDEYHTQTITHFFRLFTSNCEFARKVNLDSLNFVAGPRLGIINPTLQETFDWINGKEPKPRHTGKKTRFQRARIAIAFFKKEHDINIMFIVTKGQPSLFITSEKRGTFILTPDLRKTTSKVLHMALCDSYLSKWEKGCTSNFIASAIKLSPKINKAIYRGDISEFAWHFIHRARTNTLSINAKPHNKGNKRLCRLCHTEDETMSHIIQSCKIHLTLGSERHNDCLDLISSHLSKNSNLIVVVDHVCSLVPESKERVDLMITDMVRKKIFLVDMKCPCDTINNFALVDLLNLQKYDSLKMQIQDAKPDFKVELDTCIIGSLGSFPPKTPELLLKIGVDRTHLKGLLKDCALSNISHSARRWHYHKTGILVNLEKFRFN

SEQ ID NO: 1561 - protein, 1457 aa, Schmidtea mediterranea
MPDNLFKAQIILCPLNINESHWILFVYCKLTKISYFVDPILRKRHNLINKSSALKITVALNNLFDLKAAVTFHPHDNLVYQDNNYDCGPYICAYAMLISQEWQTFPNNFIETIRKNVHRFQTTKFQNPPKVSGGGITTLPIFKRFQNVTRPPKVALPYKASLQNENSCVPSLIKEWFSNKNYITVLSPELTLNLIAHNNQFIRENVTFRQFTRVKYVIAVIPNNPHWCLYIFSPVFERSYILNFQGRVLNERLVSIGESMTDYLNKFFISTAKVNFIVNHNQTHFSFRSEDPHFFASAFIEFLERFFFGNILSFTKINETLKSFKLQITNEICKNLNLINFSINDEIITKYFKNLNLPSNFIFLNSAMCTAIMDDCTRYLNDFLNYDNIIKAQVIFAIVAPPKFREILFIIDYNTDEYYLLNPTTLLGNDNYLSTCKILRNKINEIRESPNRVLNLGECPHDIRGSGLVSKILFCSYMSNYANDLPLVGLNLRQIGNVVSSFLPIVSEIKKVKSLENNIINENHKESENLKERKNKIDQLLIKVFKMNVDEIVDVILDQISIKTVPTHKPYLGNIERVESQINKSNLIKNFNSDMKTTVNTIINDVDVDVRPKYENIITNFEHKIPLDRTWDKVFKFCNRSDKKLKLKYLSNSEVLFELKKADNTSPGVDGIKYRDLVMLDPEGKLLTFLFNKIISKKVIPDSWKSFKTLLIPKPGKGDKYDSVSSWRPIALLSVIYKLFASCLANRLTFWINKNNLLHIGQKGGSRHDGCVEHNSILSSALEHSKYSKNSQLAIAWLDIKDAFGSVPHAYIWSLLRFVWVDEEFVTILERMYSDTSTFYSCGPILTPNIAIRQGVKQGCPISMILFALAINPVLEAVSRSKCEPFMIGESAVKILAYADDIALVSKSAYDLQRVTNIAVVIASEIGFEYRPEKCGYIELPLIETESQILINDIKIKRLASSEFYQYLGVPVGEETDQSPYDILKKVVSDTRKIADSDLLGWQKLKAYKIFLHSRLVFPFRTREIKTSALAKSNANNNLTVNITSQLRNCFRKMMSLPNHSEVCYFYNSTENGGANCVDLLDEYHTQTITHFFRLFTSNCEFARKVNLDSLNFVAGPRLGIINPTLQETFDWINGKEPKPRHSGKKTRFQRARIAIAFFKKEHDINIMFIVTKGQPSLFITSEKRGTFILTPDLRKTTSKVLHMALCDSYLSKWEKGCTSNFIASAIKLSPKINKAIYRGDISEFAWHFIHRARTNTLSINAKPHNKGNKRLCRLCHTEDETMSHIIQSCKIHLTLGSERHNDCLDLISSHLSKNSNLIVVVDHLCSLVRESKERVDLMITDMMRKKIFLVDMKCPCDTINNFALVDLLNLQKYDSLKIQIQDAKPDFKVELDTCIIGSLGSFPPKTPELLLKIGVDRTHLKGLLKDCALSNISHSARRWHYHKTGILVNLEKFRFN

SEQ ID NO: 1562 - protein, 1090 aa, Schmidtea mediterranea
MCTAIMDDCTRYLNDFLNYDNIIKAQVIFAIVAPPKFREILFIIDYNTDEYYLLNPTTLLGNDNYLSTCKILRNKINEIRESPNRVLNLGECPHDIRGSGLVSKILFCSYMSNYANDLPLVGLNLRQIGNVVSSFLPIVSEIKKVKSLENNIINENHKESENLKERKNKIDQLLIKVFKMNVDEIVDVILDQISIKTVPTHKPYLGNIERVESQINKSNLIKNFNSDMKTTVNTIINDVDVDVRPKYENIITNFEHKIPLDRTWDKVFKFCNRSDKKLKLKYLSNSEVLFELKKADNTSPGVDGIKYRDLVMLDPEGKLLTFLFNKIISKKVIPDSWKSFKTLLIPKPGKGDKYDSVSSWRPIALLSVIYKLFASCLANRLTFWINKNNLLHIGQKGGSRHDGCVEHNSILSSALEHSKYSKNSQLAIAWLDIKDAFGSVPHAYMWSLLRFVGVDEEFVTILERMYSDTSTFYSCGPILTPNIAIRQGVKQGCPISMILFALAINPVLEAVSRSKCEPFMIGESPVKILAYADDIALVSKSAYDLQRVTNIAVVIASEIGFEYRPEKCGYIELPLIETESQILINDIKIKRLASSEFYQYLGVPVGEETDQSPYDILKKVVSDTRKVADSDLLGWQKLKAYKIFLHSRLVFPFRTREIKTSALAKSNANNNLTVNITSQLRNCFRKMMSLPNHSEVCYFYNSTENGGANCVDLLDEYHTQTITHFFRLFTSNCEFARKINLDSLNFVAGPRLGIINPTLQETFDWINGKEPKPWHSGKKTRFQRARIAIAFFKKEHDINIMFIVTKGQPSLFITSEKRGTFILTPDLRKTTSKVLHMALCDSYLSKWEKGCTSNFIASAIKLSPKINKAIYRGDISEFAWHFIHRARTNTLSINAKPHNKGNKRLCRLCHTEDETMSHIIQSCKIHLTLGSERHNDCLDLISSHLSKNSNLIVVVDHVCSLVPESKERVDLMITDMVRKKIFLVDMKCPCDTINNFALVDLLNLQKYDSLKMQIQDAKPDFKVELDTCIIGSLGSFPPKTPELLLKIGVDRTHLKGLLKDCALSNISHSARRWHYHKTGILVNLEKFRFN

SEQ ID NO: 1563 - protein, 911 aa, Schmidtea mediterranea
MNVDEIVDVILDQISIKTVPTHKPYLGNIERVESQINKSNLIKNFNSDMKTTVNTIINDVDVDVRPKYENIITNFEHEIPLDRTWDKVFKFCNRSDKKLKLKYLSNSEVLFELKKADNTSPGVDGIKYRDLVMLHPEGKLLTFLFNKIISKKVIPDSWKSFKTLLIPKPGKGDKYDSVSSWRPIALLSVIYKLFASCLANRLTFWINKNNLLHIGQKGGSRHDGCVEHNSILSSALEHSKYSKNSQLAIAWLDIKDAFWSVPHAYMWSLLRFVGVDEEFVTILERMYSDTSTFYSCGPILTPNIAIRQGVKQGCPISMILFALAINPVLEAVSRSKCEPFMIGESPVKILAYADDIALVSKSAYDLQRVTNIAVVIASEIGFEYRPEKCGYIELPLIETESQILINDIKIKRLASSEFYQYLGVPVGEETDQSPYDILKKVVSDTRKIADSDLLGWQKLKAYKIFLHSRLVFPFRTREIKTSALAKSNANNNLTINITSQLRNCFRKMMSLPNHSEVCYFYNSTENGGANCVDLLDEYHTQTITHFFRLFTSNCEFARKVNLDSLNFVAGPRLGIINPTLQETFDWINGKEPKPWHSGKKTRFQRARIAIAFFKKEHDINIMFIVTKGQPSLFITSEKRGTFILTPDLRKTTSKVLHMALCDSYLSKWEKGCTSNFIASAIKLSPKINKAIYRGDISEFAWHFIHRARTNTLSINAKPHNKGNKRLCRLCHTEDETMSHIIQSCKIHLTLGSERHNDCLDLISSHLSKNSNLIVVVDHVCSLVPESKERVDLMITDMVRKKIFLVDMKCPCDTINNFALVDLLNLQKYDSLKMQIQDAKPDFKVELDTCIIGSLGSFPPKTPELLLKIGVDRTHLKGLLKDCALSNISHSARRWHYHKTGILVNLEKFRFN

SEQ ID NO: 1564 - protein, 1198 aa, Schmidtea mediterranea
MTDYLNKFFISTAKVNFIVNHNQTHFSFRSEDPHFFASAFIEFLERFFFGNILSFTKINETLKSFKLQITNEICKNLNLINFSINDEIITKYFKNLNLPSNFIFLNSAMCTAIMDDCTRYLNDFLNYDNIIKAQVIFAIVAPPKFREILFIIDYNTDEYYLLNPTTLLGNDNYLSTCKILRNKINEIRESPNRVLNLGECPHDIRGSGLVSKILFCSYMSNYANDLPLVGLNLRQIGNVVSSFLPIVSEIKKVKSLENNIINENHKESENLKERKNKIDQLLIKVFKMNVDEIVDVILDQISIKTVPTHKPYLGNIERVESQINKSNLIKNFNSDMKTTVNTIINDVDVDVRPKYENIITNFEHKIPLDRTWDKVFKFCNRSDKKLKLKYLSNSEVLFELKKADNTSPGVDGIKYRDLVMLDPEGKLLTFLFNKIISKKVIPDSWKSFKTLLIPKPGKGDKYDSVSSWRPIALLSVIYKLFASCLANRLTFWINKNNLLHIGQKGGSRHDGCVEHNSILSSALEHSKYSKNSQLAIAWLDIKDAFGSVPHAYMWSLLRFVGVDEEFVTILERMYSDTSTFYSCGPILTPNIAIRQGVKQGCPISMILFALAINPVLEAVSRSKCEPFMIGESAVKILAYADDIALVSKSAYDLQRVTNFAVVIASEIGFEYRPEKCGYIELPLIETESQILINDIKIKRLASNEFYQYLGVPVGEETDQSPYDILKKVVSDTRKIADSDLLGWQKLKAYKIFLHSRLVFPFRTREIKTSALAKSNANNNLTVNITSQLRNCFRKMMSLPNHSEVCYFYNSTENGGANCVDLLDEYHTQTITHFFRLFTSNCEFARKVNLDSLNFVAGPRLGIINPTLQETFDWINGKEPKPWHSGKKTRFQRARIAIAFFKKEHDINIMFIVTKGQPSLFITSEKRGTFILTPDLRKTTSKVLHMALCDSYLSKWEKGCTSNFIASAIKLSPKINKAIYRGDISEFAWHFIHRARTNTLSINAKPHNKGNKRLCRLCHTEDETMSHIIQSCKIHLTLGSERHNDCLDLISSYLSKNSNLIVVVDHVCSLVPESKERVDLMITDMVRKKIFLVDMKCPCDTINNFALVDLLNLQKYDSLKMQIQDAKPDFKVELDTCIIGSLGSFPPKTPELLLKIGVDRTHLKGLLKDCALSNISHSARRWHYHKTGILVNLEKFRFN

SEQ ID NO: 1565 - protein, 996 aa, Schmidtea mediterranea
METGSGLVSKILFCSYMSNYANDLPLVGLNLRQIGNVVSSFLPIVSEIKKVKSLENNIINENHKESENLKERKNKIDQLLIKVFKMNVDEIVDVILDQISIKTVPTHKPYLGNIERVESQINKSNLIKNFNSDMKTTVNTIINDVDVDVRPKYENIITNFEHKIPLDRTWDKVFKFCNRSDKKLKLKYLSNSEVLFELKKADNTSPGVDGIKYRDLVMLDPEGKLLTFLFNKIISKKVIPDSWKSFKTLLIPKPGKGDKYDSVSSWRPIALLSVIYKLFASCLANRLTFWINKNNLLHIGQKGGSRHDGCVEHNSILSSALEHSKYSKNSQLAIAWLDIKDAFGSVPHAYMWSLLRFVGVDEEFVTILERMYSDTSTFYSCGPILTPNIAIRQGVKQGCPISMILFALAINTVLEAVSRSKCEPFMIGESAVKILAYADDIALVSKSAYDLQRVTNIAVVIASEIGFEYRPEKCGYIELPLIETESQILINDIKIKRLASNEFYQYLGVPVGEETDQSPYDILKKVVSDTRKIADSDLLGWQKLKAYKIFLHSRLVFPFRTREIKTSALAKSNANNNLTVNITSQLRNCFRKMMSLPNHSEVCYFYNSTENGGANCVDLLDEYHTQTITHFFRLFTSNCEFARKVNLDSLNFVAGPRLGIINPTLQETFDWINGKEPKPWHSGKKTRFQRARIAIAFFKKEHDINIMFIVTKGQPSLFITSEKRGTFILTPDLRKTTSKVLHMALCDSYLSKWEKGCTSNFIASAIKLSPKINKAIYRGDISEFAWHFIHRARTNTLSINAKPHNKGNKRLCRLCHTEDETMSHIIQSCKIHLTLGSERHNDCLDLISSYLSKNSNLIVVVDHVCSLVPESKERVDLMITDMVRKKIFLVDMKCPCDTINNFALVDLLNLQKYDSLKMQIQDAKPDFKVELDTCIIGSLGSFPPKTPELLLKIGVDRTHLKGLLKDCALSNISHSARRWHYHKTGILVNLEKFRFN

SEQ ID NO: 1566 - protein, 1090 aa, Schmidtea mediterranea
MCTAIMDDCTRYLNDFLNYDNIIKAQVIFAIVAPPKFREILFIIDYNTDEYYLLNPTTLLGNDNYLSTCKILRNKINEIRESPNRVLNLGECPHDIRGSGLVSKILFCSYMSNYANDLPLVGLNLRQIGNVVSSFLPIVSEIKKVKSLENNIINENHKESENLKERKNKIDQLLIKVFKMNVDEIVDVILDQISIKTVPTHKPYLGNIERVESQINKSNLIKNFNSDMKTTVNTIINDVDMDVRPKYENIITNFEHKIPLDRTWDKVFKFCNRSDKKLKLKYLSNSEVLFELKKADNTSPGVDGIKYRDLVMLDPEGKLLTFLFNKIISKKVIPDSWKSFKTLLIPKPGKGDKYDSVSSWRPIALLSVIYKLFASCLANRLTFWINKNNLLHIGQKGGSRHDGCVKHNSILSSALEHSKYSKNSQLAIAWLDIKDAFGSVPHAYMWSLLRFVGVDEEFVTILERMYSDTSTFYSCGPILTPNIAIRQGVKQGCPISMILFALAINPVLEAVSRSKCEPFMIGESAVKILAYADDIALVSKSAYDLQRVTNIAVVIASEIGFEYRPEKCGYIELPLIETESQILINDIKIKRLASSEFYQYLGVPVGEETDQSPYDILKKVVSDTRKIADSDLLGWQKLKAYKIFLHSRLVFPFRTREIKTSALAKSNANNNLTVNITSQLRNCFRKMMSLPNHSEVCYFYNSTENGGANCVDLLDEYHTQTITHFFRLFTSNCEFARKVNLDSLNFVAGPRLGIINPTLQETFDWINGKEPKPWHSGKKTRFQRARIAIAFFKKEHDINIMFIVTKGQPSLFITSEKRGTFILTPDLRKTTSKVLHMALCDSYLSKWEKGCTSNFIASAIKLSPKINKAIYRGDISEFAWHFIHRARTNTLSINAKPHNKGNKRLCRLCHTEDETMSHIIQSCKIHLTLGSERHNDCLDLISSHLSKNSNLIVVVDHVCSLVPESKERVDLMITDMVRKKIFLVDMKCPCDTINNFELVDLLNLQKYDSLKMQIQDAKPDFKVELDTCIIGSLGSFPPKTPELLLKIGVDRTHLKGLLKDCALSNISHSARRWHYHKTGILVNLEKFRFN

SEQ ID NO: 1567 - protein, 911 aa, Schmidtea mediterranea
MNVDEIVDVILDQISIKTVPTHKPYLGNIERVESQINKSNLIKNFNSDMKTTVNTIINDVDVDVRPKYENIITNFEHKIPLDRTWDKVFKFCNRSDKKLKLKYLSNSEVLFELKKADNTSPGVDGIKYRDLVMLDPEGKLLTFLFNKIISKKVIPDSWKSFKTLLIPKPGKGDKYDSVSSWRPIALLSVIYKLFASCLANRLTFWINKNNLLHIGQKGGSRHDGCVEHNSILSSALEHSKYSKNSQLAIAWLDIKDAFGSVPHAYMWSLLRFVGVDEEFVTILERMYSDTSTFYSCGPILTPNIAIRQGVKQGCPISMILFALAINPVLEAVSRSKCEPFMIGESAVKILAYADDIALVSKSAYDLQRVTNIAVVIASEIGFEYRPEKCGYIELPLIETESQILINDIKIKRLASSEFYQYLGVPVGEETDQSPYDILKKVVSDTRKIADSDLLGWQKLKAYKIFLHSRLVFPFRTREIKTSALAKSNANNNLTVNITSQLRNCFRKMMSLPNHSEVCYFYNSTENGGANCVDLLDEYHTQTITHFFRLFTSNCEFARKVNLDSLNFVAGPRLGIINPTLQETFDWINGKEPKPRHTGKKTRFQRARIAIAFFKKEHDINIMFIVTKGQPSLFITSEKRGTFILTPDLRKTTSKVLHMALCDSYLSKWEKGCTSNFIASAIKLSPKINKAIYRGDISEFAWHFIHRARTNTLSINAKPHNKGNKRLCRLCHTEDETMSHIIQSCKIHLTLGSERHNDCLDLISSHLSKNSNLIVVVDHVCSLVPESKERVDLMITDMVRKKIFLVDMKCPCDTINNFALVDLLNLQKYDSLKMQIQDAKPDFKVELDTCIIGSLGSFPPKTPELLLKIGVDRTHLKGLLKDCALSNISHSARRWHYHKTGILVNLEKFRFN

SEQ ID NO: 1568 - protein, 1090 aa, Schmidtea mediterranea
MCTAIMDDCTRYLNDFLNYDNIIKAQVIFAIVAPPKFREILFIIDYNTDEYYLLNPTTLLGNDNYLSSCKILRNKINEIRESPNRVLNLGECPHDIRGSGLVSKILFCSYMSNYANDLPLVGLNLRQIGNVVSSFLPIVSEIKKVKSLENNIINENHKESENLKERKNKIDQLLIKVFKMNVDEIVDVILDQISIKTVPTHKPYLGNIERVESQINKSNLIKNFNSDMKTTVNTIINDVDVDVRPKYENIITNFEHKIPLDRTWDKVFKFCNRSDKKLKLKYLSNSEVLFELKKADNTSPGVDGIKYRDLVMLDPEGKLLTFLFNRIISKKVIPDSWKSFKTLLIPKPGKGDKYDSVSSWRPIALLSVIYKLFASCLANRLTFWINKNNLLHIGQKGGSRHDGCVEHNSILSSALEHSKYSKNSQLAIAWLDIKDAFGSVPHAYMWSLLRFVGVDEEFVTILERMYSDTSTFYSCGPILTPNIAIRQGVKQGCPISMILFALAINPVLEAVSRSKCEPFMIGESAVKILAYADDIALVSKSAYDLQRVTNIAVVIASEIGFEYRPEKCGYIELPLIETESQILINDIKIKRLASSEFYQYLGVPVGEETDQSPYDILKKVVSDTRKVADSDLLGWQKLKAYKIFLHSRLVFPFRTREIKTSALAKSNANNNLTVNITSQLRNCFRKMMSLPNHSEVCYFYNSTENGGANCVDLLDEYHTQTITHFFRLFTSNCEFARKINLDSLNFVAGPRLGIINPTLQETFDWINGKEPKPWHSGKKTRFQRARIAIAFFKKEHDINIMFIVTKGQPSLFITSEKRGTFILTPDLRKTTSKVLHMALCDSYLSKWEKGCTSNFIASAIKLSPKINKAIYRGDISEFAWHFIHRARTNTLSINAKPHNKGNKRLCRLCHTEDETMSHIIQSCKIHLTLGSERHNDCLDLISSHLSKNSNLIVVVDHVCSLVPESKERVDLMITDMVRKKIFLVDMKCPCDTINNFALVDLLNLQKYDSLKMQIQDAKPDFKVELDTCIIGSLGSFPPKTPELLLKIGVDRTHLKGLLKDCALSNISHSARRWHYHKTGILVNLEKFRFN

SEQ ID NO: 1569 - protein, 911 aa, Schmidtea mediterranea
MNVDEIVDVILDQISIKTVPTHKPYLGNIERVESQINKSNLIKIFNSDMKTTVNTIINDVDVDVRPKYENIITNFEHKIPLDRTWDKVFKFCNRSDKKLKLKYLSNSEVLFELKKADNTSPGVDGIKYRDLVMLDPEGKLLTFLFNKIISKKVIPDSWKSFKTLLIPKPGKGDKYDSVSSWRPIALLSVIYKLFASCLANRLTFWINKNNLLHIGQKGGSRHDGCVEHNSILSSALEHSKYSKNSQLAIAWLDIKDAFGSVPHAYMWSLLRFVGVDEEFVTILERMYSDTSTFYSCGPILTPNIAIRQGVKQGCPISMILFALAINPVLEAVSRSKCEPFMIGESAVKILAYADDIALVSKSAYDLQRVTNIAVVIASEIGFEYRPEKCGYIELPLIETESQILINDIKIKRLASSEFYQYLGVPVGEETDQSPYDILKKVVSDTRKIADSDLLGWQKLKAYKIFLHSRLVFPFRTREIKTSALAKSNANNNLTVNITSQLRNCFRKMMSLPNHSEVCYFYNSTENGGANCVDLLDEYHTQTITHFFRLFTSNCEFARKVNLDSLNFVAGPRLGIINPTLQETFDWINGKEPKPWHSGKKTRFQRARIAIAFFKKEHDINIMFIVTKGQPSLFITSEKRGTFILTPDLRKTTSKVLHMALCDSYLSKWEKGCTSNFIASAIKLSPKINKAIYRGDISEFAWHFIHRARTNTLSINAKPHNKGNKRLCRLCHTEDETMSHIIQSCKIHLTLGSERHNDCLDLISSHLSKNSNLIVVVDHVCSLVPESKERVDLMITDMVRKKIFLVDMKCPCDTINNFALVDLLNLQKYDSLKMQIQDAKPDFKVELDTCIIGSLGSFPPKTPELLLKIGVDRTHLKGLLKDCALSNISHSARRWHYHKTGILVNLEKFRFN

SEQ ID NO: 1570 - protein, 1457 aa, Schmidtea mediterranea
MPDNLFKAQIILCPLNINGSHWILFVYCKLTKISYFVDPILRKRHNLINKSSALKITMALNNLFDLKAAVTFHPHDNLVYQDNNYDCGPYICAYAMLISQEWQTFPNNFIETIRKNVHRFQTTKFQNPPKVSGGGIMTVPIFKRFQNVTRPPKVALPYKASLQNENSCVPSLIKEWFSNKNYITVLSPELTLNLIAHNNQFIRENVTFRQFTRVKYVIAVIPNNPHWCLYIFSPVFERSYILNFQGRVLNERLVSIGESMTDFLNKFFISTAKVNFIVNHNQTHFSFRSEDPHFFASAFIEFLERFFFGNILSFTKINETLKSFKLQITNEICKNLNLINFSIIDEIITKYFKNLNLPSIFIFLNSAMCTAIMDDCTRYLNDFLNYDNIIKAQVIFAIVAPPKFREIHFIIDYNTDEYYLLNPTTLLGNDNYLSTCKILRNKFNEIRESPNRVLNLGECPHDIRGSGLVSKILFCSYMSNYANDLPLVGLNLRQITNVVSSFLPIVSEVKKVKSLENNIINENHKESENLKERKNKIDQLLIKVFKMNVDEIVDVILDQISIKTVPTHKPYLGNIERVESQINKSNLIKNFNSDMKTTVNTIINDVDVDVRPKYENIITNFEHKIPLDRTWDKVFKFCNRSDKKLKLKYLSNSEVLFELKKADIASPGVDGIKYRDLVMLDPEGKLLTFLFNKIISKKVIPDSWKSFKTLLIPKPGKDDKYDSVSSWRPIALLSVIYKLFASCLANRLTFWINKNNLLHIGQKGGSRHDGCVEHNSILSSALEHSKYSKNSQLAIAWLDIKDAFGSVPHAYMWSLLRFVGVDEEFVTILERMYSDTSTFYSCGPILTPNIAITQGVKQGCPISMILFALAINPVLEAVSRSKCEPFMIGKSAVKILAYADDIALVSKSAYDLQRVTNIAVVIASEIGFEYRPEKCGYIELPLIETESQILINDIKIKRLASSEFYQYLGVPVGEETDQSPYDILKKVVSNTRKIADSDLLGWQKLKAYKIFLHSRLVFPFRTREIKTSALAKSNANNNLTVNITSQLRNCFRKMMSLPDHSEVCYFYNSTENGGANCVDLLDEYHTQTITHFFRLFTSNCEFARKVNLDSLNFVAGPRLGIINPTLQETFDWINGKEPKPRHSGKKTRFQRARIAIAFFKKEHDINIMFIVTKGQPSLFITSEKRGSFILTPDLRKTTSKVLHMALCDSYLSKWEKGCTSNFIASAIKLSPKINKAIYRGDISEFAWHFIHRARTNTLSINAKPHNKGNKRLCRLCHTEDETMSHIIQSCKIHLTLGSERHNDCLDLISSHLSKNSNLIVVVDHVCSLVPESKERVDLMITDMVRKKIFLVDMKCPCDTINNFALVDLLNLQKYDSLKMQIQDAKPDFKVELDTCIIGSLGSFPPKTPELLLKIGVDRTHLKVLLKDCALSNISHSARRWHYHKTGILVNLEKFRFN

SEQ ID NO: 1571 - protein, 1445 aa, Schmidtea mediterranea
MPLNINESHWILFVYCKLTKISYFVDPILRKRHNLINKSSALKITMALNNLFDLKAAVTFHPHDNLVYQDNNYDCGPYICAYAMLISQEWQTFPNNFIETIRKNVHRFQTTKFQNPPKVSGGGITTLPIFKRFQNVTRPPKVALPYKDSLQNENSCVPSLIKEWFSNKNYITVLSPELTLNLIAHNNQFIRENVTFRQFTRVKYVIAVIPNNPHWCLYIFSPVFERSYILNFQGRVLNERLVSIGESMTDYLNKFFISTAKVNFIVNHNQTHFSFRSEDPHFFASAFIEFLERFFFGNILSFTKINETLKSFKLQITNEICKNLNLINFSINDEIITKYFKNLNLPSNLIFLNSAMCTAIMDDCTRYLNDFLNYDNIIKAQVIFAIVAPPKFREILFIIDYNTDEYYLLNPTTLLGNDNYLSTCKILRNKINEIRESPNRVLNLGECPHDIRGSGLVSKILFCSYMSNYANDLPLVGLNLRQIGNVVSSFLPIVSEIKKVKSLENNIINENHKESENLKERKNKIDQLLIKVFKMNVDEIVDVILDQISIKTVPTHKPYLGNIERVESQINKSNLIKNFNSDMKTTVNTIINDVDVDVRPKYENIITNFEHKIPLDRTWDKVFKFCNRSDKKLKLKYLSNSEVLFELKKADNTSPGVDGIKYRDLVMLDPEGKLLTFLFNKIISKKVIPDSWKSFKTLLIPKPGKGDKYDSVSSWRPIALLSVIYKLFASCLANRLTFWINKNNLLHIGQKGGSRHDGCVEHNSILSSALEHSKYSKNSQLAIAWLDIKDAFGSVPHAYMWSLLRFVGVDEEFVTILERMYSDTSTFYSCGPILTPNIAIRQGVKQGCPISMILFALAINPVLEAVSRSKCEPFMIGESPVKILAYADDIALVSKSAYDLQRVTNIAVVIASEIGFVYRPEKCGYIELPLIETESQILINDIKIKRLASSEFYQYLGVPVGEETDQSPYDILKKVVSDTRKVADSDLLGWQKLKAYKIFLHSRLVFPFRTREVKTSALAKSNANNNLTVNITSQLRNCFRKMMSLPNHSEVCYFYNSTENGGANCVDLLDEYHTQTITHFFRLFTSNCEFARKINLDSLNFVAGPRLGIINPTLQETFDWINGKEPKPWHSGKKTRFQRARIAIAFFKKEHDINIMFIVTKGQPSLFITSEKRGTFILTPDLRKTTSKVLHMALCDSYLSKWEKGCTSNFIASAIKLSPKINKAIYRGDISEFAWHFIHRARTNTLSINAKPHNKGNKRLCRLCHTEDETMSHIIQSCKIHLTLGSERHNDCLDLISSHLSKNSNLIVVVDHVCSLVPESKERVDLMITDMVRKKIFLVDMKCPCDTINNFALVDLLNLQKYDSLKMQIQDAKPDFKVELDTCIIGSLGSFPPKTPELLLKIGVDRTHLKGLLKDCALSNISHSARRWHYHKTGILVNLEKFRFN

SEQ ID NO: 1572 - protein, 1090 aa, Schmidtea mediterranea
MCTAIMDDCTRYLNDFLNYDNIIKAQVIFAIVAPPKFREILFIIDYNTDEYYLLNPTTLLGNDNYLSTCKILRNKINEIRESPNRVLNLGECPHDIRGSGLVSKILFCSYMSNYANDLPLVGLNLRQIGNVVSSFLPIVSEIKKVKSLENNIINENHKESENLKERKNKIDQLLIKVFKMNVDEIVDVILDQISIKTVPTHKPYLGNIERVESQINKSNLIKNFNSDMKTTVNTIINDVDVDVRPKYENIITNFEHKIPLDRTWDKMFKFCNRSDKKLKLKYLSNSEVLFELKKADNTSPGVDGIKYRDLVMLDPEGKLLTFLFNKIISKKVIPDSWKSFKTLLIPKPGKGDKYDSVSSWRPIALLSVIYKLFASCLANRLTFWINKNNLLHIGQKGGSRHDGCVEHNSILSSALEHSKYSKNSQLAIAWLDIKDAFGSVPHAYMWSLLRFVGVDEEFVTILERMYSDTSTFYSCGPILTPNIAIRQGVKQGCPISMILFALAINPVLEAVSRSKCEPFMIGESPVKILAYADDIALVSKSAYDLQRVTNIAVVIASEIGFEYRPEKCGYIELPLIETESQILINDIKIKRLASSEFYQYLGVPVGEETDQSPYDILKKVVSDTRKVADSDLLGWQKLKAYKIFLHSRLVFPFRTREIKTSALAKSNANNNLTVNITSQLRNCFRKMMSLPNHSEVCYFYNSTENGGANCVDLLDEYHTQTITHFFRLFTSNCEFARKINLDSLNFVAGPRLGIINPTLQETFDWINGKEPKPWHSGKKTRFQRARIAIAFFKKEHDINIMFIVTKGQPSLFITSEKRGTFILTPDLRKTTSKVLHMALCDSYLSKWEKGCTSNFIASAIKLSPKINKAIYRGDISEFAWHFIHRARTNTLSINAKPHNKGNKRLCRLCHTEDETMSHIIQSCKIHLTLGSERHNDCLDLISSHLSKNSNLIVVVDHVCSLVPESKERVDLMITDMVRKKIFLVDMKCPCDTINNFALVDLLNLQKYDSLKMQIQDAKPDFKVELDTCIIGSLGSFPPKTPELLLKIGVDRTHLKGLLKDCALSNISHSARRWHYHKTGILVNLEKFRFN

SEQ ID NO: 1573 - protein, 1198 aa, Schmidtea mediterranea
MTDYLNKFFISTAKVNFIVNHNQTHFSFRSEDPHFFASAFIEFLERFFFGNILSFTKINETLKSFKLQITNEICKNLNLINFSINDEIITKYFKNLNLPSNFIFLNSAMCTAIMDDCTRYLNDFLNYDNIIKAQVIFAIVAPPKFREILFIIDYNTDEYYLLNPTTLLGNDNYLSSCKILRNKINEIRESPNRVLNLGECPHDIRGSGLVSKILFCSYMSNYANDLPLVGLNLRQIGNVVSSFLPIVSEIKKVKSLENNIINENHKESENLKERKNKIDQLLIKVFKMNVDEIVDVILDQISIKTVPTHKPYLGNIERVESQINKSNLIKNFNSDMKTTVNTTINDVDVDVRPKYENIITNFEHKIPLDRTWDKVFKFCNRSDKKLKLKYLSNSEVLFELKKADNTSPGVDGIKYRDLVMLDPEGKLLTFLFNKIISKKVIPDSWKSFKTLLIPKPGKGDKYDSVSSWRPIALLSVIYKLFASCLANRLTFWINKNNLLHIGQKGGSRHDGCVEHNSILSSALEHSKYSKNSQLAIAWLDIKDAFGSVPHAYMWSLLRFVGVDEEFVTILERMYSDTSTFYSCGPILTPNIAIRQGVKQGCPISMILFALAINPVLEAVSRSKCEPFMIGESAVKILAYADDIALVSKSAYDLQRVTNIAVVIASEIGFEYRPEKCGYIELPLIETESQILINDIKIKRLASSEFYQYLGVPVGEETDQSPYDILKKVVSDIRKIADSDLLGWQKLKAYKIFLHSRLVFPFRTREIKTSALAKSNANNNMTVNITSQLRNCFRKMMSLPNHSEVCYFYNSTENGGANCVDLLDEYHTQTITHFFRLFTSNCEFARKVNLDSLNFVAGPRLGIINPTLQETFDWINGKEPKPWHSGKKTRFQRARIAIAFFKKEHDINIMFIVTKGQPSLFITSEKRGTFILTPDLRKATSKVLHMALCDSYLSKWEKGCTSNFIASAIKLSPKINKAIYRGDISEFAWHFIHRARTNTLSINAKPHNKGNKRLCRLCHTEDETMSHIIQSCKIHLTLGSERHNDCLDLISSHLSKNSNLIVVVDHVCSLVPESKERVDLMITDMVRKKIFLVDMKCPCDTINNFALVDLLNLQKYDSLKMQIQDGKPDFKVELDTCIIGSLGSFPPKTPELLLKIGVDRTHLKGLLKDCALSNISHSARRWHYHKTGILVNLEKFRFN

SEQ ID NO: 1574 - protein, 980 aa, Schmidtea mediterranea
MSNYANDLPLVGLNLRQIGNVVSSFLPIVSEIKKVKSLENNIINENHKESENLKERKNKIDQLLIKVFKMNVDEIVDVILDQISIKTVPTHKPYLGNIERVESQINKSNLIKNFNSDMKTTVNTIINDVDVDVRPKYENIITNFEHKIPLDRTWDKVFKFCNRSDKKLKLKYLSNSEVLFELKKADNTSPGVDGIKYRDLVMLDPEGKLLTFLFNKIISKKVIPDSWKSFKTLLIPKPGKGDKYDSVSSWRPIALLSVIYKLFASCLANRLTFWINKNNLLHIGQKGGSRHDGCVEHNSILSSALEHSKYSKNSQLAIAWLDIKDAFGSVPHAYMWSLLRFVGVDEEFVTILERMYSDTSTFYSCGPILTPNIAIRQGVKQGCPISMILFALAINPVLEAVSRSKCEPFMIGESAVKILAYADDIALVSKSAYDLQRVTNIAVVIASEIGFEYRPEKCGYIELPLIETESQILINDIKIKRLASNEFYQYLGVPVGEETDQSPYDILKKVVSDTRKIADSDLLGWQKLKAYKIFLHSRLVFPFRTREIKTSALAKSNANNNLTVNITSQLRNCFRKMMSLPNHSEVCYFYNSTENGGANCVDLLDEYHTQTITHFFRLFTSNCEFARKVNLDSLNFVAGPRLGIINPTLQETFDWINGKEPKPWHSGKKTRFQRARIAIAFFKKEHDINIMFIVTKGQPSLFITSEKRGTFILTPDLRKTTSKVLHMALCDSYLSKWEKGCTSNFIASAIKLSPKINKAIYRGDISEFAWHFIHRARTNTLSINAKPHNKGNKRLCRLCHTEDETMSHIIQSCKIHLTLGSERHNDCLDLISSYLSKNSNLIVVVDHVCSLVPESKERVDLMITDMVRKKIFLVDMKCPCDTINNFALVDLLNLQKYDSLKMQIQDAKPDFKVELDTCIIGSLGSFPPKTPELLLKIGVDRTHLKGLLKDCALSNISHSARRWHYHKTGILVNLEKFRFN

SEQ ID NO: 1575 - protein, 911 aa, Schmidtea mediterranea
MNVDEIVDVILDQISIKTVPTHKPYLGNIERVESQINKSNLIKNFNSDMKTTVNTIINDVDVDVRPKYENIITNFEHKIPLDRTWDKVFKFCNRSDKKLKLKYLSNSEVLFELKKADNTSPGVDGIKYRDLVMLDPEGKLLTFLFNKIISKKVIPDSWKSFKTLLIPKPGKGDKYDSVSSWRPIALLSVIYKLFASCLANRLTFWINKNNLLHIGQKGGSRHDGCVEHNSILSSALEHSKYSKNSQLAIAWLDIKDAFGSVPHAYMWSLLRFVGVDEEFVTILERMYSDTSTFYSCGPILTPNIAIRQGVKQGCPISMILFALAINPVLEAVSRSKCEPFMIGESPVKILAYADDIALVSKSAYDLQRVTNIAVVIASEIGFEYRPEKCGYIELPLIETESQILINDIKIKRLASSEFYQYLGVPVGEETDQSPYDILKKVVSDTRKVADSDLLGWQKLKAYKIFLHSRLVFPFRTREIKTSALAKSNANNNLTVNITSQLRNCFRKMMSLPNHSEVCYFYNSTENGGANCVDLLDEYHTQTITHFFRLFTSNCEFARKINLDSLNFVAGPRLGIINPTLQETFDWINGKEPKPWHSGKKTRFQRARIAIAFFKKEHDINIMFIVTKGQPSLFITSEKRGTFILTPDLRKTTSKVLHMALCDSYLSKWEKGCTSNFIASAIKLSPKINKAIYRGDISEFAWHFIHRARTNTLSINAKPHNKGNKRLCRLCHTEDETMSHIIQSCKIHLTLGSERHNDCLDLISSHLSKNSNLIVVVDHVCSLVPESKERVDLMITDMVRKKIFLVDMKCPCDTINNFALVDLLNLQKYDSLKMQIQDAKPDFKVELDTCIIGSLGSFPPKTPELLLKIGVDRTHLKGLLKDCALSNISHSARRWHYHKTGILVNLEKFRFN

SEQ ID NO: 1576 - protein, 1457 aa, Schmidtea mediterranea
MPDNLFKAQIILCPLNINESHWILFVYCKLTKISYFVDPILRKRHNLINKSSALKITMALNNLFDLKAAVTFHPHDNLVYQDNNYDCGPYICAYAMLISQEWQTFPNNFIETIRKNVHRFQTTKFQNPPKVSGGGITTLPIFKRFQNVTRPPKVVLPYKDSLQNENSCVPSLIKEWFSNKNYITVLSPELTLNLIAHNNQFIRENVTFRQFTRVKYVIAVIPNNPHWCLYIFSPVFERSYILNFQGRVLNERLVSIGESMTDYLNKFFISTAKVNFIVNHNQTHFSFRSEDPHFFASAFIEFLERFFFGNILSFTKINETLKSFKLQITNDICKNLNLINFSINDEIITKYFKNLNLPSNFIFLNSAMCTAIMDDCTRYLNDFLNYDNIIKAQVIFAIVAPPKFREILFIIDYNTDEYYLLNPTTLLGNDNYLSSCKILRNKINEIRESPNRVLNLGECPHDIRGSGLVSKILFCSYMSNYANDLPLVGLNLRQIGNVVSSFLPIVSEIKKVKSLENNIINENHKESENLKERKNKIDQLLIKVFKMNVDEIVDVILDQISIKTVPTHKPYLGNIERVESQINKSNLIKNFNSDMKTTVNTIINDVDVDVRPKYENIITNFEHKIPLDRTWDKVFKFCNRSDKKLKLKYLSNSEVLFELKKADNTSPGVDGIKYRDLVMLDPEGKLLTFLFNRIISKKVIPDSWKSFKTLLIPKPGKGDKYDSVSSWRPIALLSVIYKLFASCLANRLTFWINKNNLLHIGQKGGSRHDGCVEHNSILSSALEHSKYSKNSQLAIAWLDIKDAFGSVPHAYMWSLLRFVGVDEEFVTILERMYSDTSTFYSCGPILTPNIAIRQGVKQGCPISMILFALAINPVLEAVSRSKCEPFMIGESAVKILAYADDIALVSKSAYDLQRVTNIAVVIASEIGFEYRPEKCGYIELPLIETESQILINDIKIKRLASSEFYQYLGVPVGEETDQSPYDILKKVVSDTRKVADSDLLGWQKLKAYKIFLHSRLVFPFRTREIKTSALAKSNANNNLTVNITSQLRNCFRKMMSLPNHSEVCYFYNSTENGGANCVDLLDEYHTQTITHFFRLFTSNCEFARKINLDSLNFVAGPRLGIINPTLQETFDWINGKEPKPWHSGKKTRFQRARIAIAFFKKEHDINIMFIVTKGQPSLFITSEKRGTFILTPDLRKTTSKVLHMALCDSYLSKWEKGCTSNFIASAIKLSPKINKAIYRGDISEFAWHFIHRARTNTLSINAKPHNKGNKRLCRLCHTEDETMSHIIQSCKIHLTLGSERHNDCLDLISSHLSKNSNLIVVVDHVCSLVPESKERVDLMITDMVRKKIFLVDMKCPCDTINNFALVDLLNLQKYDSLKMQIQDAKPDFKVELDTCIIGSLGSFPPKTPELLLKIGVDRTHLKGLLKDCALSNISHSARRWHYHKTGILVNLEKFRFN

SEQ ID NO: 1577 - protein, 873 aa, Schmidtea mediterranea
MSNYANDLPLVGLNLRQIGNVVSSFLPIVSEIKKVKSLENNIIIENHKESENLKERKNKIDQLLIKVFKMNVDEIVDVILDQSSIKTVPTHKPYLGNIERVEFQINKSNLIKNFNSDMKTTVNTIINDVDVDVRPKYENIITNFEHKIPLDRTWDKVFKFCNRSDKKLKLEYLSNSEVLFELKKADNTSPGVDGIKYRDLVMLDPEGKLLTFLFNKIISKKVKPDSWKSFKTLLIPKHGKGDKYDSVSSWRPIALLSVIYKLFASCLANRLTFWINKNNLLHIGQKGGSRHDGCVEHNSILSSALEHSKYSKNSQLAIAWLDIKDAFGSVPHAYMWSLLRFVGVDEEFVTILERMYSDTSTFYSCGPILTPNIAIRQGVKQGCPISMILFALAINPVLEAVSRSKCEPFMIGESAVKILAYADDIALVSKSAYELQRVTNIAVVIASEIGFEYRPEKCGYIELPLIETESQILINDIKIKRLASSEFYQYLGVPVGEETDQSPYHILKKVVSDTRKIADSDLLGWQKLKAYKIFLHSRLVFPFRTREIKTSALAKSNANNNLTVNITSQLRNCFRKMMSLPDHSEVCYFYNSTENGGANCVDLLDEYHTQTITHFFRLFTSSCEFARKVNLDSLNFVAGPRLGIINPTLQETFDWINGKEPKPRHSGKKTRFQRARIAIAFFKKEYDINIMFIVTKGQPSLFITSDKRGTFILTPDLRKTTSKVLHMALCDSYLSKWEKGCTSNFIASAIKLSPKINKAIYRGDISEFAWHFIHRARTNTLSINTKPHNKGNKRLCRLCHTEDETMSHIIQSCKIHFTLGFERHNDCLDLISSHLSKNSNLIVVVDHVCSLVPESKERVDLMITDMVRKKLYF

SEQ ID NO: 1578 - protein, 1090 aa, Schmidtea mediterranea
MTDYLNKFFISTAKVNFIVNHNQTHFSFRSEDPHFFASAFIEFLERFFFGNILSFTKINETLKSFKLQITNEICKNLNLINFSINDEIITKYFKNLNLPSNFIFLNSAMCTAIMDDCTRYLNDFLNYDNIIKAQVIFAIVAPPKFREILFIIDYNTDEYYLLNPTTLLGNDNYLSICKILRNKINEIRESPNCVLNLGECPHDIRGSGLVSKILFCSYMSNYANDLPLVGLNLRQIGNVVSSFLPIASEIKKVKSLENNIINENHKESENLKERKNKIDQLLIKVFKMNVDEIVDVILDQISIKTVPTHKPYLGNIERVESQINKSNLIKNFNSDMKTTVNTIINDVDVDVRPKYENIITNFEHKIPLDRTWDKVFKFCNRSDKKLKLKYLSNSEVLFELKKADNTSPGVNGIKYRDLVMLDPEGKLLTFLFNKIISKKVIPDSWKSFKTLLIPKPGKGDKYDSVSSWRPIALLSVIYKLFASCLANRLTFWINKNNLLHIGQKGGSRHDGCVEHNSILSSALEHSKYSKNSQLAIAWLDIKDAFGSVPHAYMWSLLRFVGVDEEFVTILERIYSDTSTFYSCGPILTPNIAIRQGVKQGCPISMILFALAINPVLEAVSRSKCEPFMIGESAVKILAYADDIALVSKSAYDLQRVTKIAVVIASEIGFEYRPEKCGYIELPLIETESQILIKDIKIKRLASSEFYQYLGVPVGEETDQSPYDILKKVVSDIRKIADSDLLGWQKLKAYKIFLHSRLVFPFRTREIKTSALAKSNANNNLTVNITSQLRNCFRKMMSLPNHSEVCYFYNSTENGGANCVDLLDEYHTQTITHFFRLFTSNCEFARKVNLDSLNFVAGPRLGIINPTLQETFDWINGKEPKPWHFGKKTRFQRARIAIAFFKKEHDINIMFIVTKGQPSLFITSEKRGTFILTPDLRKTTSKVLHMALCDSYLSKWEKGCTSNFIASAIKLSPKINKAIYRGDISEFAWHFIYRARTNTLSINAKPHNKGNKRLCRLCHTEDETMSHIIQSCKIHLTLGSERHNDCLDLISSHLSKNSNLIVVVDHVCSLVPESKERVDLMITDMVRKKYF

SEQ ID NO: 1579 - protein, 1359 aa, Schmidtea mediterranea
MGVCVCGSLVGIETIRKNVHRFQTTKFQNPPKVSGGGITTLPIFKRFQNVTRPPKVALPYKASLQNENSCVPSLIKEWFSNKNYITVLSPELTLNLIAHNNQFIRENVTFRQFTRVKYVIAVIPNNPHWCLYIFSPVFERSYILNFQGRVLNERLVSIGETMTDYLNKFFISTAKVNFIVNHNQTHFSFRSEDPHFFASAFIEFLERFFFGNILSFTKINETLKSFKLQITNEICKNLNLINFSINDEIITKYFKNLNLPSNFIFLNSAMCTAIMDDCTRYLNDFLNYDNIIKAQVIFAIVAPPKFREILFIIDYNTDEYYLLNPTTLLGNDNYLSTCKILRNKINEIRESPNRVLNLGECPHDIRGSGLVSKILFCSYMSNYANDLPLVGLNLRQIGNVVSSFLPIVSEIKKVKSLENNIIIENHKESENLKERKNKIDQLLIKVFKMNVDEIVDVILDQISIKTVPTHKPYLGNIERVESQINKSNLIKNFNSDMKTTVNTIINDVDVDVRPKYENIITNFEHKIPLDRTWDKVFKFCNRSDKKLKLKYLSNSEVLFELKKADNTSPGVDGIKYRDLVMLDPEGKLLTFLFNKIISKKVIPDSWKSFKTLLIPKPGKGDKYDSVSSWRPIALLSVIYKLFASCLANRLTFWINKNNLLHIGQKGGSRHDGCVEHNSILSSALEHSKYSKNSQLAIAWLDIKDAFGSVPHAYMWSLLRFVGVDEEFVTILERMYSDTSTFYSCGPILTPNIAIRQGVKQGCPISMILFALAINPVLEAVSRSKCEPFMIGESAVKILAYADDIALVSKSAYDLQRVTNIAVVIASEIGFEYRPEKCGYIELPLIETESQILINDIKIKRLASSEFYQYLGVPVGEETDQSPYDILKKVVSDTRKIADSDLLGWQKLKAYKIFLHSRLVFPFRTREIKTSALAKSNANNNLTVNITSQLRNCFRKMMSLPNHSEVCYFYNSTENGGANCVDLLDEYHTQTITHFFRLFTSNCEFARKVNLDSLNFVAGPRLGIINPTLQETFDWINGKEPKPRHTGKKTRFQRARIAIAFFKKEHDINIMFIVTKGQPSLFITSEKRGTFILTPDLRKTTSKVLHMALCDSYLSKWEKGCTSNFIASAIKLSPKINKAIYRGDISEFAWHFIHRARTNTLSINAKPHNKGNKRLCRLCHTEDETMSHIIQSCKIHLTLGSERHNDCLDLISSHLSKNSNLIVVVDHVCSLVPESKERVDLMITDMVRKKIFLVDMKCPCDTINNFALVDLLNLQKYDSLKMQIQDAKPDFKVELDTCIIGSLGSFPPKTPELLLKIGVDRTHLKGLLKDCALSNISHSARRWHYHKTGILVNLEKFRFN

SEQ ID NO: 1580 - protein, 1198 aa, Schmidtea mediterranea
MTDYLNKFFISTAKVNFIVNHNQTHFSFRSEDPHFFASAFIEFLERFFFGNILSFTKINETLKSFKLQITNEICKNLNLINFSINDEIITKYFKNLNLPSNFIFLNSAMCTAIMDDCTRYLNDFLNYDNIIKAQVIFAIVAPPKFREILFIIDYNTDEYYLLNPTTLLGNDNYLSTCKILRNKINEIRESPNRVLNLGECPHDIRGSGLVSKILFCSYMSNYANDLPLVGLNLRQIGNVVSSFVPIVSEIKKVKSLENNIINENHKESENLKERKNKIDQLLIKVFKMNVDEIVDVILDQISIKTVPTHKPYLGNIERVESQINKSNLIKNFNSDMKTTVNTIINDVDVDVRPKYENIITNFEHKIPLDRTWDKVFKFCNRSDKKLKLKYLSNSEVLFELKKADNTSPGVDGIKYRDLVMLDPEGKLLTFLFNKIISKKVIPDSWKSFKTLLIPKPGKGDKYDSVSSWRPIALLSVIYKLFASCLANRLTFWINKNNLLHIGQKGGSRHDGCVEHNSILSSALEHSKYSKNSQLAIAWLDIKDAFGSVPHAYMWSLLRFVGVDEEFVTILERMYSDTSTFYSCGPILTPNIAIRQGVKQGCPISMILFALAINPVLEAVSRSKCEPFMIGESPVKILAYADDIALVSKSAYDLQRVTNIAVVIASEIGFEYRPEKCGYIELPLIETESQILINDIKIKRLASSEFYQYLGVPVGEETDQSPYDILKKVVSDTRKVADSDLLGWQKLKAYKIFLHSRLVFPFRTREIKTSALAKSNANNNLTVNITSQLRNCFRKMMSLPNHSEVCYFYNSTENGGANCVDLLDEYHTQTITHFFRLFTSNCEFARKINLDSLNFVAGPRLGIINPTLQETFDWINEKEPKPLHSDKKTRFQRARIAIAFFKKEHDINIMFIVTKGQPSLFITSEKRGTFILTPDLRKTTSKVLHMALCDSYLSKWEKGCTSNFIASAIKLSPKINKAIYRGDISEFAWHFIHRARTNTLSINAKPHNKGNKRLCRLCHTEDETMSHIIQSCKIHLTLGSERHNDCLDLISSHLSKNSNLIVVVDHVCSLVPESKERVDLMITDMVRKKIFLVDMKCPCDTINNFALVDLLNLQKYDSLKMQIQDAKPDFKVELDTCIIGSLGSFPPKTPELLLKIGVDRTHLKGLLKDCALSNISHSARRWHYHKTGILVNLEKFRFN

SEQ ID NO: 1581 - protein, 1457 aa, Schmidtea mediterranea
MPDNLFKAQIILCPLNINGSHWILFVYCKLTKFSYFVDPILRKRHNLINKSSALKITMALNNLFDLKAAVTFHPHDNLVYQDNNYDCGPYICAYAMLISQEWQTFPNNFIETIRKNVHRFQTTKFQNPPKVSVGGITTLPIFKRFQNVTRPPKVALPYKASLQNENSCVPSLIKEWFSNKNYITVLSPELTLNLIAHNNQFKRENVTFRQFTRVKYVIAVIPNNPHWCLYIFSPVFERSYILNFQGRVLNERLASIGESMTDYLNKFFISTAKVNFIVNHNQTHFSFRSEDPHFFASAFIEFLETFFFGNILSFTKINETLKSFKLQITNEICKNLNLINFSINDEIITKYFKNLNLPSNFIFLNSAMCTAIMDDCTRYLNDFLNYDNIIKAQVIFAIVAPPKFREILFIIDYNTDEYYLLNPTTLLGNDNYLSTCKILRNKINEIRESPNRVLNIGECPHDIRGSGLVSKILFCSYMSNYANDLPLVGLNLRQIGNVVSSFLPIVSEIKKVKSLENNIIIENHKESENLKELKNKIDQLLIKVFKMNVDEIVDVILDQISIKTVPTHKPYLGNIERVESQINKSNLIKNFNSDMKTTVNTIINDVDLDVRPKYENIITNFEHKIPLDRTWNKVFKFCNRSDKKLKLKYLSNSEVLFELKKADNTSPGVDGIKYRDLVMLDPEGKLLTFLFNKIISKKVIPDSWKSFKTLLIPKPGKGDKYDSVSSWRPIALLSVIYKLFASCLANRLTFWINKNNLLHIGQKGGSRHDGCVEHNSILLSALEHSKYSKNSQLAIAWLDIKDAFGSVPHAYMWSLLRFVGVDEEFVTILERMYSDTSTFYSCGPILTPNIAIRQGVKQRCPISMILFALAINPVLEAVSRSKCEPFMIGESAVKILAYADDIALVSKSAYDLQRVTNIAVVIASEIGFEYRPEKCGYIELPLIETESQILINDIKIKRLASSEFYQYLGVPVGEETDQSPYDILKKVVSDTRKIADSDLLGWQKLKAYKIFLHSRLVFPFRTREIKTSALAISNANNNLTVNITSQLRNCFRKMMSLPNHSEVCYFYNSTENGGANCVDLLDEYHTQTITHFFRLFTSNCEFARKVNLDSLNFVAGPRLGIINPTLQETFDWINGKEPKPRHSGKKTRFQRARIAIAFFKKEHDINIMFIVTKGQPSLFITSEKRGTFILTPDLRKTTSKVLHMGLCDTYLSKWEKGCTSNFIASAIKLSPKINKAIYRGDISEFAWHFIHRARTNTLSINAKPHNKGNKRLCRLCHTEDETMSHIIQSCKIHLTFGSERHNDCLDLISSHLSKNSNLIVVVDHVCSLIPESKERVDLMITDMVRKKIFLVDMKCPCDTINNFALVDLLNLQKYDSLKMQIQDAKPDFKVELDTCIIGSLGSFPPKTPELLLKIGVDRTHLKGLLKDCALSNISHSARRWHYHKTGILVNLEKFRFN

SEQ ID NO: 1582 - protein, 1362 aa, Schmidtea mediterranea
MLISQEWQTFPNNFIETIRKNVHRFQTTKFQNPPKVSGGGITTLPIFKRFQNVTRPPKVALPYKASLQNENSCVPSLIKEWFSNKNYITVLSPELTLNLIAHNNQFIRENVTFRQFTRVKYVIAVIPNNPHWCLYIFSPVFERSYILNFQGRVLNERLVSIGESMTDYLNKFFISTAKVNFIVNHNQTHFSFRSEDPHFFASAFIEFLERFFFGNILSFTKINETLKSFKLQITNEICKNLNLINFSINDEIITKYFKNLNLPSNFIFLNSAMCTAIMDDCTRYLNDFLNYDNIIKAQVIFAIVAPPKFREILFIIDYNTDEYYLLNPTTLLGNDNYLSTCKILRNKINEIRESPNRVLNLGECPHDIRGSGLVSKILFCSYMSNYANDLPLVGLNLRQIGNVVSSFLPIVSEIKKVKSLENNIIIENHKESENLKERKNKIDQLLIKVFKMNVDEIVDVILDQISIKTVPTHKPYLGNIERVESQINKSNLIKNFNSDMKTTVNTIINDVDVDVRPKYENIITNFEHKIPLDRTWDKVFKFCNRSDKKLKLKYLSNSEVLFELKKADNTSPGVDGIKYRDLVMLDPEGKLLTFLFNKIISKKVIPDSWKSFKTLLIPKPGKGDKYDSVSSWRPIALLSVIYKLFASCLANRLTFWINKNNLLHIGQKGGSRHDGCVEHNSILSSALEHSKYSKNSQLAIAWLDIKDAFGSVPHAYMWSLLRFVGVDEEFVTILERMYSDTSTFYSCGPILTPNIAIRQGVKQGCPISMILFALAINPVLEAVSRSKCEPFMIGESAVKILAYADDIALVSKSAYDLQRVTNIAVVIASEIGFEYRPEKCGYIELPLIETESQILINDIKIKRLASSEFYQYLGVPVGEETDQSPYDILKKVVSDTRKIADSDLLGWQKLKAYKIFLHSRLVFPFRTREIKTSALAKSNANNNLTVNITSQLRNCFRKMMSLPNHSEVCYFYNSTENGGANCVDLLDEYHTQTITHFFRLFTSNCEFARKVNLDSLNFVAGPRLGIINPTLQETFDWINGKEPKPRHTGKKTRFQRARIAIAFFKKEHDINIMFIVTKGQPSLFITSEKRGTFILTPDLRKTTSKVLHMALCDSYLSKWEKGCTSNFIASAIKLSPKINKAIYRGDISEFAWHFIHRARTNTLSINAKPHNKGNKRLCRLCHTEDETMSHIIQSCKIHLTLGSERHNDCLDLISSHLSKNSNLIVVVDHVCSLVPESKERVDLMITDMVRKKIFLVDMKCLCDTINNFALVDLLNLQKYDSLKMQIQDAKPDFKVELDTCIIGSLGSFPPKTPELLLKIGVDRTHLKGLLKDCALSNISHSARRWHYHKTGILVNLEKFRFN

SEQ ID NO: 1583 - protein, 1457 aa, Schmidtea mediterranea
MPDNLFKAQIILCPLNINESHWILFVYCKLTKISYFVDPILRKRHNLINKSSALKITMALNNLFDLKAAVTFHPHDNLVYQDNNYDCGPYICAYAMLISQEWQTFPNNFIETIRKNVHRFQTTKFQNPPKVSGGGITTLPIFKRFQNVTRPPKVALPYKDSLQNENSCVPSLIKEWFSNKNYITVLSPELTLNLIAHNNQFIRENVTFRQFTRVKYVIAVIPNNPHWCLYIFSPVFERSYILNFQGRVLNERLVSIGESMTDYLNKFFISTAKVNFIVNHNQTHFSFRSEDPHFFASAFIEFLERFFFGNILSFTKINETLKSFKLQITNEICKNLNLINFSINDEIITKYFKNLNLPSNFIFLNSAMCTAIMDDCTRYLNDFLNYDNIIKAQVIFAIVAPPKFREILFIIDYNTDEYYLLNPTTLLGNDNYLSTCKILRNKINEIRESPNRVLNLGECPHDIRGSGLVSKILFCSYMSNYANDLPLVGLNLRQIGNVVSSFVPIVSEIKKVKSLENNIINENHKESENLKERKNKIDQLLIKVFKMNVDEIVDVILDQISIKTVPTHKPYLGNIERVESQINKSNLIKNFNSDMKTTVNTIINDVDVDVRPKYENIITNFEHKIPLDRTWDKVFKFCNRSDKKLKLKYLSNSEVLFELKKADNTSPGVDGIKYRDLVMLDPEGKLLTFLFNKIISKKVIPDSWKSFKTLLIPKPGKGDKYDSVSSWRPIALLSVIYKLFASCLANRLTFWINKNNLLHIGQKGGSRHDGCVEHNSILSSALEHSKYSKNSQLAIAWLDIKDAFGSVPHAYMWSLLRFVGVDEEFVTILERMYSDTSTFYSCGPILTPNIAIRQGVKQGCPISMILFALAINPVLEAVSRSKCEPFMIGESPVKILAYADDIALVSKSAYDLQRVTNIAVVIASEIGFEYRPEKCGYIELPLIETESQILINDIKIKRLASSEFYQYLGVPVGEETDQSPYDILKKVVSDTRKVADSDLLGWQKLKAYKIFLHSRLVFPFRTREIKTSALAKSNANNNLTVNITSQLRNCFRKMMSLPNHSEVCYFYNSTENGGANCVDLLDEYHTQTITHFFRLFTSNCEFARKINLDSLNFVAGPRLGIINPTLQETFDWINGKEPKPWHSGKKTRFQRARIAIAFFKKEHDINIMFIVTKGQPSLFITSEKRGTFILTPDLRKTTSKVLHMALCDSYLSKWEKGCTSNFIASAIKLSPKINKAIYRGDISEFAWHFIHRARTNTLSINAKPHNKGNKRLCRLCHTEDETMSHIIQSCKIHLTLGSERHNDCLDLISSHLSKNSNLIVVVDHVCSLVPESKERVDLMITDMVRKKIFLVDMKCPCDTINNFALVDLLNLQKYDSLKMQIQDAKPDFKVELDTCIIGSLGSFPPKTPELLLKIGVDRTHLKGLLKDCALSNISHSARRWHYHKTGILVNLEKFRFN

SEQ ID NO: 1584 - protein, 1417 aa, Schmidtea mediterranea
MPDNLFKAQIILCPFNINESHWILFVYCKLTKISYFVDPILRKRHNLINKSSALKITMALNNLFDLKAAVTFHPHDNLVYQDNNYDCGPYICAYAMLISQEWQTFPNNFIETLRKNVHRFQTTKFQNPPKVSGGGITTLPIFKRSQNVTRPPKVALPYKASLQNENSCVPSLIKEWFSNKNYITVLSPELTLNLIAHNNQFIRENVTFRQFTRVKYVIAVIPNNPHWCLYIFSPVFERSYILNFQGRVLNERLVSIGESMTDYLNKFFISTAKVNFIVNHNQTHFSFRSEDPHFFASAFIEFLERFFFGNILSFTKINETLKSFKLQITNEICKNLNLINFSINDEIITKYFKNLNLPSNFIFLNSAMCTAIMDDCTRYLNDFLNYDNIIKAQVIFAIVATPKFREILFIIDYNTDEYYLLNPTTLLGNDNYLSTCKILRNKINEIRESPNRVLNLGECPHDIRGSGLVSKILFCSYMSNYANDLPLVGLNLRQIGNVVSSFLPIVSEIKKVKSLVNNIINENHKESENLKERKNKIDQLLIKVFKMNVDEIVDVILDQISIKTVPTHKPYLGNIERVESQINKSNLIKNFNSDMKTTVNTIINDVDVDVRPKYENIITNFEHKIPLDRTWDKVFKFCNRSDKKLKLKYLSNSEVLFELKKADNTSPGVDGIKYRDLVMLDPEGKLLTFLFNKIISKKVIPDSWKSFKTLLIPKPGKGDKYDSVSSWRPIALLSVIYKLFASCLANRLTFWINKNNLLHIDQKCGSRHDRCVEHNSILSSALEHSKYSKNSQLAFAWLDIKDAFGSVPHAYMWSLLRFVGVDEEFVTILERMYSDTSTFYSCGLILTPNIAIRQGVKQGCPISMILFALAINPVLEAVSRSKCEPFMIGESAVKILAYADDIALVSKSAYDLQRVTNIAVVIASEIGFEYRPEKCGYIELPLIETESQILINDIKIKRLASSEFYQYLGVPVGEETDQSPYDILKKVVSDTRKIADSDLLGWQKLKAYKIFLHSRLVFPFRTREIKTSALAKSNANNNLTVNITSQLRNCFRKMMSLPNHSEVCYFYNSTENGGANCVDLLDEYHTQTITHFFRLFTSNCEFARKVNLDSLNFVAGPRLGIINPTLQEKFDWINGKEPKPWHSGKKTRFQRARIAITFFKKEHDINIMFIVTKGQPSLFITSEKRGTFILTPDLRKTTSKVLHMALCDSYLSKWEKGCTSNFIASAIKLSPKINKAIYRGDISEFAWHFIHRARTNTLSINAKPHNKGNKRLCRLCHTEDETMSHIIQSCKIHLTLGSERHNDCLDLISSHLSKNSNLIVVVDHICSLVPESKERVDLMITDMVRKKIFLVDMKCPCDTINNFALVDLLNLQKYDSLKMQIQDAKPDFKVELDTCIIGSLGSFPPKTPELLLKIGVD

SEQ ID NO: 1585 - protein, 1457 aa, Schmidtea mediterranea
MPDNLFKAQIILCPLNINESHWILFVYCKLTKISYFVDPILRKRHNLSNKSSALKITMALNNLFDLKAAVTFHPHDDLVYQDNNYDCGPYICAYAMLISQEWQTFPNNFIETIRKNVHRFQTTKFQNPPKVSGGGITTLPIFKRFQNVTRPPKVALPYKASLQNENSCVPSLIKEWFSNKNYITVLSPELTLNLIAHNNQFIRENVTFRQFTRVKYVIAVIPNNPHWCLYIFSLVFERSYILNFQGRVLNERLVSIGETMTDYLNKFFISTAKVNFIVNHNQTHFSFRSEDPHFFASAFIEFLERFFFGNILSFTKINETLKSFKLQITNEICKNLNLINFSINDEIITKYFKNLNLPSNFIFLNSAMCTAIMDDCTRYLNDFLNYDNIIKAQVIFAIVAPPKFREILFIIDYNTDEYYLLNPTTLLGNDNYLSTCKILRNKINEIRESPNRVLNLGECPHDIRGSGLVSKILFCSYMSNYANDLPLVGLNLRQIGNVVSSFLPIVSEIKKVKSLENNIINENHKESENLKERKNKIDQLLIKVFKMNVDEIVDVILDQISIKTVPTHKPYLGNIERVESQINKSNLIKNFNSDMKTTVNTIINDVDVDVRPKYENIITNFEHKIPLDRTWDKVFKFCNRSDKKLKLKYLSNSEVLFELKKADNTSPGVDGIKYRDLVMLDPEGKLLTFLFNKIISKKVIPDSWKSFKTLLIPKPGKGDKYDSVSSWRPIALLSVIYKLFASCLANRLTFWINKNNLLHIGQKGGSRHDGCVEHNSILSSALEHSKYSKNSQLAIAWLYIKDAFGSVPHAYMWSLLRFVGVDEEFVTILERMYSDTSTFYSCGPILTPNIAIRQGVKQGCPISMILFALAINPVLEAVSRSKCEPFMIGESAVKILAYADDIALVSKSAYDLQRVTNIAVVIASEIGFEYRPEKCRYIELPLIETESQILINDIKIKRLASSEFYQYLGVPVGEETDQSPYDILKKVVSDTRKIADSDLLGWQKLKAYKIFLHSRLVFPFRTREIKTSALAKSNANNNLTVNITSQLRNCFRKMMSLPNHSEVCYFYNSTENGGANCVDLLDEYHTQTITHFFRLFTSNCKFARKVNLDSLNFVAGPRLGIINPTLQETFDWINGKEPKPWHSGKKTRFQRARIAIAFFKKEHDINIMFIVTKGQPSLFITSEKRGTFILTPDLRKTTSKVLHMALCDSYLSKWEKGCTSNFIASAIKLSPKINKAIYRGDISEFAWHFIHRARTNTLSINAKPHNKGNKRLCRLCHTEDETMSHIIQSCKIHLTLGSERHNDCLDLISSHLSKNSNLIVVVDHVCSLVPESKERVDLMITDMVRKKIFLVDMKCPCDTINNFALVDLLNLQKYDSLKMQIQDAKPDFKVELDTCIIGSLGSFPPKTPELLLKIGVDRTHLKGLLKDCALSNISHSARRWHYHKTGILVNLEKFRFN

SEQ ID NO: 1586 - protein, 1090 aa, Schmidtea mediterranea
MCTAIMDDCTRYLNDFLNYDNIIKAQVIFAIVAPPKFREILFIIDYNTDEYYLLNPTTLLGNDNYLSTCKILRNKINEIRESSNRVLNLGECPHDIRGSGLVSKILFCSYMSNYANDLPLVGLNLRQIGNVVSSFLPIVSEIKKVKSLENNIINENHKESENLKERKNKIDQLLIKVFKMNVDEIVDVILDQISIKTVPTHKPYLGNIERVESQINKSNLIKNFNSDMKTTVNTIINDVDVDVRPKYENIITNFEHKIPLDRTWDKVFKFCNRSDKKLKLKYLSNSEVLFELKKADNTSLGVDGIKYRDLVMLDPEGKLLTFLFNKIISKKVIPDSWKSFKTLLIPKPGKGDKYDSVSSWRPIALLSVIYKLFASCLANRLTFWINKNNLLHIGQKGGSRHDGCVEHNSILLSALEHSKYNKNSQLAIAWLDIKDAFGSVPHAYMWSLLRFVGVDEEFVTILERMYSDTSTFYSCGPILTPNIAIRQGVKQGCPISMILFTLAINPVLEAVSQSKCEPFMIGESAVKILAYADDVALVSKSAYELQRVTNIAVVIASEIGFEYRPEKCGYIELPLIETESQILINDIKIKRLASSEFYQYLGVPVGEETDQSPYDILKKVVSDTRKIADSDLLGWQKLKAYKIFLHSCLVFPFRTREIKTFALAKSNANNNLTVNITSQLRNCFRKMMFLPDHSEVCYFYNSTENGGANCVDLLDKYHTQTITHFFRLFTSSCEFARKVNLDSLNFVAGPRLGIINPTLQETFDWINGKEPKPRHSGKKTRFQRARIAIAFFKKEHDINIMFIVTKGQPSLFITSEKRGTFILTPDLRKTTSKVLHMALCDSYLSKWEKGCTSNFIASAIKLSPKINKAIYRGDISEFAWHFIHRARTNTLSINAKPHNKGNKRLCRLCHTEDETMLHIIQSCKIHLTLGSERHNDCLDLISSHLSKNSNLIVVVDHVCSLVPESKERVDLMITDMVRKKIFLVDMKCPCDTINNFALVDLLNLQKYDSLKMQIQDAKPDFKVELDTCIIGSLGSFPPKTPELLLKIGVDRTHLKGLLKDCALSNISHSARRWHYHKTGILVNLEKFRFN

SEQ ID NO: 1587 - protein, 1090 aa, Schmidtea mediterranea
MCTAIMDDCTRYLNDFLNYDNIIKAQVIFAIVASPKFREILFIIDYNTDEYYLLNPTTLLGNDNYLSTCKILRNKINEIRESPNRVLNLGECPHDIRGSGLVSKILFCSYMSNYANDLPLVGLNLRQIGNVVSSFLPIVSEIKKVKSLENNIINENHKESENLKERKNKIDQLLIKVFKMNVDEIVDVILDQISIKTVPTHKPYLGNIERVESQINKSNLIQNFNSDMKTTVNTIINDVDVDVRPKYENIITNFEHKIPLDRTWDKVFKFCNRSDKKLKLKYLSNSEVLFELKKADNTSPGVDGIKYRDLVMLDPEGKLLTFLFNKIISKKVIPDSWKSFKTLLIPKPGKGDKYDSVSSWRPIALLSVIYKLFASCLANRLTFWINKKNLLHIGQKGGSRHDGCVEHNSILSSALEHSKYSKNSQLAIAWLGIKDAFGSVPHAYMWSLLRFVGVDEEFVTILERMYSDTSTFYSCGPILTPNIAIRQGVKQGCPISMILFALAINPVLEAVSRSKCEPFMIGESAVKILAYADDIALVSKSAYDLQRVTNIAVVIASEIGFEYRPEKCGYIELPLIETESQILINDIKIKRLASSEFYQYLGVPVGEETDQSPYDILKKVVSDTRKIADSDLLGWQKLKAYKIFLHSRLVFPFRTREIKTSALAKSNANNNLTVNITSQLRNCFRKMMSLPNHSEVCYFYNSTENGGANCVDLLDEYHTQTITHFFRLFTSNCEFARKVNLDSLNFVAGPRLGIINPTLQETFDWINGKEPKPWHSGKKTRFQRARIAIAFFKKEHDINIMFIVTKGQPSLFITSEKRGTFILTPDLRKTTSKVLHMALCDSYLSKWEKGCTSNFIASAIKLSPKINKAIYRGDISEFTWHFIHRARTNTLSINAKPHNKGNKRLCRLCHTEDETMSHIIQSCKIHLTLGSERHNDCLDLISSHLSKNSNLIVVVDHVCSLVPESKERVDLMITDMVRKKIFLVDMKCPCDTINNFALVDLLNLQKYDSLKMQIQDAKPDFKVELDTCIIGSLGSFPPKTPELLLKIGVDRTHLKGLLKDCVLSNISHSARRWHYHKTGILVNLEKFRFN

SEQ ID NO: 1588 - protein, 1198 aa, Schmidtea mediterranea
MTDYLNKFFISTAKVNFIVNHNQTHFSFRSEDPHFFASAFIEFLERFFFGNILSFTKINETLKSFKLQITNEICKNLNLINFSINDEIITKYFKNLNLPSNFIFLNSAMCTAIMDDCTRYLNDFLNYDNIIKAQVIFAIVAPPKFREILFIIDYNTDEYYLLNPTTLLGNDNYLSTCKILRNKINEIRESPNRVLNLGECPHDIRGSGLVSKILFCSYMSNYANDLPLVGLNLRQIGNVVSSFLPIVSEIKKVKSLENNIIIENHKESENLKERKNKIDQLLIKVFKMNVDEIVDVILDQISIKTVPTHKPYLGNIERVESQINKSNLIKNFNSDMKTTVNTIINDVDVDVRPKYENIITNFEHKIPLDRTWDKVFKFCNRSDKKLKLKYLSNSEVLFELKKADNTSPGVDGIKYRDLVMLDPEGKLLTFLFNKIISKKVIPDSWKSFKTLLIPKPGKGDKYDSVSSWRPIALLSVIYKLFASCLANRLTFWINKNNLLHIGQKGGSRHDGCVEHNSILSSALEHSKYSKNSQLAIAWLDIKDAFGSVPHAYMWSLLRFVGVDEEFVTILERMYSDTSTFYSCGPILTPNIAIRQGVKQGCPISMILFALAINPVLEAVSRSKCEPFMIGESAVKILAYADDIALVSKSAYDLQRVTNIAVVIASEIGFEYRPEKCGYIELPLIETESQILINDIKIKRLASSEFYQYLGVPVGEETDQSPYDILKKVVSDTRKIADSDLLGWQKLKAYKIFLHSRLVFPFRTREIKTSALAKSNANNNLTVNITSQLRNCFRKMMSLPNHSEVCYFYNSTENGGANCVDLLDEYHTQTITHFFRLFTSNCEFARKVNLDSLNFVAGPRLGIINPTLQETFDWINGKEPKPRHTGKKTRFQRARIAIAFFKKEHDINIMFIVTKGQPSLFITSEKRGTFILTPDLHKTTSKVLHMALCDSYLSKWEKGCTSNFIASAIKLSPKINKAIYRGDISEFAWHFIHRARTNTLSINAKPHNKGNKRLCRLCHTEDETMSHIIQSCKIHLTLGSERHNDCLDLISSHLSKNSNLIVVVDHVCSLVPESKERVDLMITDMVRKKIFLVDMKCPCDTINNFALVDLLNLQKYDSLKMQIQDAKPDFKVELDTCIIGSLGSFPPKTPELLLKIGVDRTHLKGLLKDCALSNISHSARRWHYHKTGILVNLEKFRFN

SEQ ID NO: 1589 - protein, 911 aa, Schmidtea mediterranea
MNVDEIVDVILDQISIKTVPTHKPYLGNIERVESQINKSNLIKNFNSDMKTTVNTIINDVDVDVRPKYENIITNFEHKIPLDRTWDKVFKFCNRSDKKLKLKYLSNSEVLFELKKADNTSPGVDGIKYRDLVMLDPEGKLLTFLFNKIISKKVIPDSWKSFKTLLIPKPGKGDKYDSVSSWRPIALLSVIYKLFASCLANRLTFWINKNNLLHIGQKGGSRHDGCVEHNSILSSALEHSKYSKNSQLAIAWLDIKDAFGSVPHAYMWSLLRFVGVDEEFVTILERMYSDTSTFYSCGPILTPNIAIRQGVKQGCPISMILFALAINPVLEAVSRSKCEPFMIGESAVKILAYADDIALVSKSAYDLQRVTNIAVVIASEIGFEYRPEKCGYIELPLIETESQILINDIKIKRLASSEFYQYLGVPVGEETDQSPYDILKKVVSDTRKIADSDLLGWQKLKAYKIFLHSRLVFPFRTREIKTSALAKSNANNNLTVNITSQLRNCFRKMMSLPNHSEVCYFYNSTENGGANCVDLLDEYHRQTITHFFRLFTSNCEFARKVNLDSLNFVAGPRLGIINPTLQETFDWINGKEPKPWHSGKKTRFQRARIAIAFFKKEHDINIMFIVTKGQPSLFITSEKRGTFILTPDLRKTTSKVLHMALCDSYLSKWEKGCTSNFIASAIKLSPKINKAIYRGGISEFAWHFIHRARTNTLSINAKPHNKGNKRLCRLCHTKDETMSHIIQSCKIHLTLGSERHNDCLDLISSHLSKNSNLIVVVDHVCSLVPESKERVDLMITDMVRKKIFLVDMKCPCDTINNFALVDLLNLQKYDSLKMQIQDAKPDFKVELDTCIIGSLGSFPPKTPELLLKIGVDRTHLKGLLKDCALSNISHSARRWHYHKTGILVNLEKFRFN

SEQ ID NO: 1590 - protein, 1090 aa, Schmidtea mediterranea
MCTAIMDDCTRYLNDFLNYDNIIKAQVIFAIVAPPKFREILFIIDYNTDEYYLLNPTTFLGNDNYLSTCKILRNKINEIRESPNRVLNLGECPHDIRGSGLVSKILFCSYMSNYANDLPLVGLNLRQIGNVVSSFLPIASEIKKVKSLENNIINENHKESENLKERKNKIDQLLIKVFKMNVDEIVDVILDQISIKTVPTHKPYLGNIERVESQINKNNLIKNFNSDMKTTVNTIINDVDVDVRPKYENIITNFEHKIPLDRTWDKVFKFCNRSDKKLKLKYLSNSEVLFELKKADNTSPGVDGIKYRDLVMLDPEGKLLTFLFNKIISKKVIPDSWKSFKTLLIPKPGKGDKYDSVSSWRPIALLSVIYKLFASCLANRLTFWINKNNLLHIGQKGGSRHDGCVEHNSILSSALEHSKYSKNSQLAIAWLDIKDAFGSVPHAYMWSLLRFVGVDEEFVTILERMYSDTSTFYSCGPILTPNIAIRQGVKQGCPISMILFALAINPVLEAVSRSKCEPFMIGESAVKILAYADDIALVSKSAYDLQRVTNIAVVIASEIGFEYRPEKCGYIELPLIETESQILINDIKIKRLASSEFYQYLGVPVGEETDQSPYDILKKVVSDTRKIADSNLLGWQKLKAYKIFLHSRLVFPFRTREIKRSALAKSNTNNNLTVNITSQLRNCFRKIMSLPNHSEVCYFYNSTENGGANCVDLLDEYHTQTITHFFRLFTSNCEFARKVNLDSLNFVAGPRLGIINPTLQETFDWINGKEPKPWHSGKKTRFQRARIAIAFFKKEHDINIMFIVTKVQPSLFITSEKRGTFILTPDLRKTTSKVLHMALCDSYLSKWEKGCTSNFIASAIKLSPKINKAIYRGDISEFAWHFIHRARTNTLSINAKPHNKGNKRLCRLCHTEDETMSHIIQSCKIHLTLGSERHNDCLDLISSHLSKNSNLIVVVDHVCSLVPESKERVDLMITDMVRKKIFLVDMKCPCDTINNFALVDLLNLQKYDSLKMQIQDAKSDFKVELDTCIIGSLGSFPPKTPELLLKIGVDRTHLKGLLKDCALSNISHSARRWHYHKTGILVNLEQFRFN

SEQ ID NO: 1591 - protein, 960 aa, Sitophilus oryzae
MNAECKTTITSINTALEKYFNEADSLENLCHKVYCAATLTCKILKQDKYNSPGGEPQSPPWKKRLETKISNYRKEIGIIHSYLSTQQPSRKLVKKIKTCARKLKVKPGTLLLEQTLIQRAETLKQKIAALGKRLKRYHKRTLRCKQNTLFNNNQRLFFRNLEAEITDEQHELPKETEMTEFWSEIWAENIQHDRKAQWINIEKENSEKYTEMPNITVSKDDVQATVKRMKNWTAPGMDGIHNYWWKALSNSHEPLARLIQNAMRDPNSIPIYFTQGETHMLPKKGDLAKPNNYRPITCLPSAYKILTSILCHKLNCHLKQNNIMSWEQNGCKHKGRGCKELLIIDNIATMQARKRQRNLSVAWIDYQKAFDSVPHSWLMEILKIYKINEQTIDLLRHLMGSWRTTLLVRGNTNSYKTREIPIQRGIFQGDSLSPLWFCLAMNPLSNMLNRSAYGYKIDDRTKLTHLFYMDDLKLYAKSREQLEGQLELVRSFSQGICMRFGLDKCATIHIKRGKLTESADITLADGSEIRNLGAETSYKYLGIQQTYELKQKDNKEQAEKELVRRTNKILKTQLDAKNKFTAYNIWAVPVLTYTAGILTWSKTDLERLDRKIRSLLTKHGILHPNSAIERLYLPRDEGGRGLISLESASQEERQKLRKYLLTNNAPVYKSIRVLDKNYTSLNLASDQEPEAVNLAGQMKQRWQSKELHGRFYASLHQEDVDFKASNTYLTAGYLFPGTEGAILSIQDQVVKTRTYARYILKQQVENTKCRLCNISEESVQHLSSGCSKIAGTRYLERHNNMGKVVHQLVCLNKGLLDTFTPHHMYVPKAVLENNTTKIYWDFTVETDIGVEHNKPDMVIWNKPEKTAIIIDFSVPQDYNVAKAYADKINKYAALSQEIKAIWELRKVIIVPLIISANGLVHKMTNQHIKELNLPNNTIMWMQKAVVLGTVGIIRRIVSPY

SEQ ID NO: 1592 - protein, 1037 aa, Sitophilus oryzae
MKSEAKTSPNRKSINTRTPRLSGTFNPRLHSLNTYAPSEEDIQRIEEQESILLMFQEANQNYEGIPMGTRPKIPRLKMNAECKTTITSINTALEKYFNEADSLENLCHKVYCAATLTCKILKQDKYNSPGGEPQSPPWKKRLETKISNYRKEIGIIHSYLSTQQPSRKLVKKIKTCARKLKVKPGTLLLEQTLIQRAETLKQKIAALGKRLKRYHKRTLRCKQNTLFNNNQRLFFRNLEAEITDEQHELPKETEMTEFWSEIWAENIQHDRKAQWINIEKENSEKYTEMPNITVSKDDVQATVKRMKNWTAPGMDGIHNYWWKALSNSHEPLARLIQNAMRDPNSIPIYFTQGETHMLPKKGDLAKPNNYRPITCLPSAYKILTSILCHKLNCHLKQNNIMSWEQNGCKHKGRGCKELLIIDNIATMQARKRQRNLSVAWIDYQKAFDSVPHSWLMEILKIYKINEQTIDLLRHLMGSWRTTLLVRGNTNSYKTREIPIQRGIFQGDSLSPLWFCLAMNPLSNMLNRSAYGYKIDDRTKLTHLFYMDDLKLYAKSREQLEGQLELVRSFSQGICMRFGLDKCATIHIKRGKLTESADITLADGSEIRNLGAETSYKYLGIQQTYELKQKDNKEQAEKELVRRTNKILKTQLDAKNKFTAYNIWAVPVLTYTAGILTWSKTDLERLDRKIRSLLTKHGILHPNSAIERLYLPRDEGGRGLISLESASQEERQKLRKYLLTNNAPVYKSIRVLDKNYTSLNLASDQEPEAVNLAGQMKQRWQSKELHGRFYASLHQEDVDFKASNTYLTAGYLFPGTEGAILSIQDQVVKTRTYARYILKQQVENTKCRLCNISEESVQHLSSGCSKIAGTRYLERHNNMGKVVHQLVCLNKGLLDTFTPHHMYVPKAVLENNTTKIYWDFTVETDIGVEHNKPDMVIWNKPEKTAIIIDFSVPQDYNVAKAYADKINKYAALSQEIKAIWELRKVIIVPLIISANGLVHKMTNQHIKELNLPNNTIMWMQKAVVLGTVGIIRRIVSPY

SEQ ID NO: 1593 - protein, 932 aa, Sitophilus oryzae
MYVYIYIYIYIYIYIYIYIYIYIYIYIYIYIYIYIYMETKISNYRKEIGIIHSYLSTQQPSRKLVKKIKTCARKLKVKPGTLLLEQTLIQRAETLKQKIAALGKRLKRYHKRTLRCKQNTLFNNNQRLFFRNLEAEITDEQHELPKETEMTEFWSEIWAENIQHDRKAQWINIEKENSEKYTEMPNITVSKDDVQATVKRMKNWTAPGMDGIHNYWWKALSNSHEPLARLIQNAMRDPNSIPIYFTQGETHMLPKKGDLAKPNNYRPITCLPSAYKILTSILCHKLNCHLKQNNIMSWEQNGCKHKGRGCKELLIIDNIATMQARKRQRNLSVAWIDYQKAFDSVPHSWLMEILKIYKINEQTIDLLRHLMGSWRTTLLVRGNTNSYKTREIPIQRGIFQGDSLSPLWFCLAMNPLSNMLNRSAYGYKIDDRTKLTHLFYMDDLKLYAKSREQLEGQLELVRSFSQGICMRFGLDKCATIHIKRGKLTESADITLADGSEIRNLGAETSYKYLGIQQTYELKQKDNKEQAEKELVRRTNKILKTQLDAKNKFTAYNIWAVPVLTYTAGILTWSKTDLERLDRKIRSLLTKHGILHPNSAIERLYLPRDEGGRGLISLESASQEERQKLRKYLLTNNAPVYKSIRVLDKNYTSLNLASDQEPEAVNLAGQMKQRWQSKELHGRFYASLHQEDVDFKASNTYLTAGYLFPGTEGAILSIQDQVVKTRTYARYILKQQVENTKCRLCNISEESVQHLSSGCSKIAGTRYLERHNNMGKVVHQLVCLNKGLLDTFTPHHMYVPKAVLENNTTKIYWDFTVETDIGVEHNKPDMVIWNKPEKTAIIIDFSVPQDYNVAKAYADKINKYAALSQEIKAIWELRKVIIVPLIISANGLVHKMTNQHIKELNLPNNTIMWMQKAVVLGTVGIIRRIVSPY

SEQ ID NO: 1594 - protein, 1101 aa, Sitophilus oryzae
MNLALMNAYFHVTEGETKKSKYRSKLQEIWNTTYPNKQFSSQHLAAQISNIKARKLISTDELNTMKSEAKTSPNRKSINTRTPRLSGTFNPRLHSLNTYAPSEEDIQRIEEQESILLMFQEANQNYEGIPMGTRPKIPRLKMNAECKTTITSINTALEKYFNEADSLENLCHKVYCAATLTCKILKQDKYNSPGGEPQSPPWKKRLETKISNYRKEIGIIHSYLSTQQPSRKLVKKIKTCARKLKVKPGTLLLEQTLIQRAETLKQKIAALGKRLKRYHKRTLRCKQNTLFNNNQRLFFRNLEAEITDEQHELPKETEMTEFWSEIWAENIQHDRKAQWINIEKENSEKYTEMPNITVSKDDVQATVKRMKNWTAPGMDGIHNYWWKALSNSHEPLARLIQNAMRDPNSIPIYFTQGETHMLPKKGDLAKPNNYRPITCLPSAYKILTSILCHKLNCHLKQNNIMSWEQNGCKHKGRGCKELLIIDNIATMQARKRQRNLSVAWIDYQKAFDSVPHSWLMEILKIYKINEQTIDLLRHLMGSWRTTLLVRGNTNSYKTREIPIQRGIFQGDSLSPLWFCLAMNPLSNMLNRSAYGYKIDDRTKLTHLFYMDDLKLYAKSREQLEGQLELVRSFSQGICMRFGLDKCATIHIKRGKLTESADITLADGSEIRNLGAETSYKYLGIQQTYELKQKDNKEQAEKELVRRTNKILKTQLDAKNKFTAYNIWAVPVLTYTAGILTWSKTDLERLDRKIRSLLTKHGILHPNSAIERLYLPRDEGGRGLISLESASQEERQKLRKYLLTNNAPVYKSIRVLDKNYTSLNLASDQEPEAVNLAGQMKQRWQSKELHGRFYASLHQEDVDFKASNTYLTAGYLFPGTEGAILSIQDQVVKTRTYARYILKQQVENTKCRLCNISEESVQHLSSGCSKIAGTRYLERHNNMGKVVHQLVCLNKGLLDTFTPHHMYVPKAVLENNTTKIYWDFTVETDIGVEHNKPDMVIWNKPEKTAIIIDFSVPQDYNVAKAYADKINKYAALSQEIKAIWELRKVIIVPLIISANGLVHKMTNQHIKELNLPNNTIMWMQKAVVLGTVGIIRRIVSPY

SEQ ID NO: 1595 - protein, 984 aa, Sitophilus oryzae
MFQEANQNYEGIPMGTRPKIPRLKMNAECKTTITSINTALEKYFNEADSLENLCHKVYCAATLTCKILKQDKYNSPGGEPQSPPWKKRLETKISNYRKEIGIIHSYLSTQQPSRKLVKKIKTCARKLKVKPGTLLLEQTLIQRAETLKQKIAALGKRLKRYHKRTLRCKQNTLFNNNQRLFFRNLEAEITDEQHELPKETEMTEFWSEIWAENIQHDRKAQWINIEKENSEKYTEMPNITVSKDDVQATVKRMKNWTAPGMDGIHNYWWKALSNSHEPLARLIQNAMRDPNSIPIYFTQGETHMLPKKGDLAKPNNYRPITCLPSAYKILTSILCHKLNCHLKQNNIMSWEQNGCKHKGRGCKELLIIDNIATMQARKRQRNLSVAWIDYQKAFDSVPHSWLMEILKIYKINEQTIDLLRHLMGSWRTTLLVRGNTNSYKTREIPIQRGIFQGDSLSPLWFCLAMNPLSNMLNRSAYGYKIDDRTKLTHLFYMDDLKLYAKSREQLEGQLELVRSFSQGICMRFGLDKCATIHIKRGKLTESADITLADGSEIRNLGAETSYKYLGIQQTYELKQKDNKEQAEKELVRRTNKILKTQLDAKNKFTAYNIWAVPVLTYTAGILTWSKTDLERLDRKIRSLLTKHGILHPNSAIERLYLPRDEGGRGLISLESASQEERQKLRKYLLTNNAPVYKSIRVLDKNYTSLNLASDQEPEAVNLAGQMKQRWQSKELHGRFYASLHQEDVDFKASNTYLTAGYLFPGTEGAILSIQDQVVKTRTYARYILKQQVENTKCRLCNISEESVQHLSSGCSKIAGTRYLERHNNMGKVVHQLVCLNKGLLDTFTPHHMYVPKAVLENNTTKIYWDFTVETDIGVEHNKPDMVIWNKPEKTAIIIDFSVPQDYNVAKAYADKINKYAALSQEIKAIWELRKVIIVPLIISANGLVHKMTNQHIKELNLPNNTIMWMQKAVVLGTVGIIRRIVSPY

SEQ ID NO: 1596 - protein, 863 aa, Macrostomum lignano
MREILGEARVECAVPLADVEADFRRRYADRGPRDWDSDAAYIPTATTADHSTAEPITAADVRRALKGRTDSAPGNDGLRYSDLTKADPSGRALAAISDLCLRRFHRVPPSWKSYRTILLFKKPDRYIAGQESDLSKWRPITLLDTCYKILAAILAERVTRWASDADLISPGQRGGLQYEGCADHNYVLRACRDDARRRKAVLDAAFVDLRDAFTSVPHDLLFGQLERGGLDAVTQALIQDIYADNVTAVYTGPDQATADIPVESGVRQGCPLSGVLFALCMEPLLRAPNQADGYNLLGHSRQLSLAYADDAALLANSGEALQRTVTAIDRAAAWAGLEINPDKCGRLTINGGPGEDFQLRVQAGAIRALAEDEFYEYLGVPAGERRSASVAALLERALNDLTAVANSDLLPWQKLDAYNTFIASRLPFHLRLRDADWTKLGNPRRKLQGHQRAELGYDERARQILRRIVYLPTQSSTDYLYADRCHGGLGLSLAKEEAAVQKVTEAVRRLCCTDAALRELAWAELRGLVQRRLRLRAAPVRPRDVADFLNGAALPPSGETASWWFQVRHATREVLHATGLRFTISNDWTASLEWRDPLSGTIQRCDRAAAITRRLHQAVRAAHTAAWRGCHSQGRFATTATHIGSHTWLFSSTGMRACDWRFIHRARLNLVPTNALRRLADPTSDPRCRRCGAGVETLGHVINSCPVHAARWRDRHDGIVNAVATAISEARPNATITTDQEVLPGSDLRPDISIMDPDRGRRLLIEVKSPFEVGPATFPRKHRAVCQKYAGITQQLSAEAPTALATFCIGSLGAWSPFNNAILRAAGLRERDIRHLQRRLALHCIHWSRNTWVEHCTGAPQIH

(The sequence listing continues in the following parts.)
